United States Patent Application Publication US 2026/0130347 A1 - sequence listing, part 4

SEQ ID NO: 166 - DNA, 186742 bp, Hippotragus leucophaeus
  source 1..186742: mol_type = genomic DNA
ggcagggaaaacagaccaacttgggaatgaatctgtccgtaactcggagaaccgcttcaaaagaagcaatccagtcccaaattatccacttttccaaagagaaggaccacagaagcgagaaattcatctaaacccgcaacgctcttcccctcccacctttcctcctgccagcatcaaatatggcgctctttgcttccttccccggcagcacgcaggttctgcaaagctacaccacctctccttggtaaatcctccagccccgcccccgcgcgtctggggcggggcttgcctggaggtggggcgtagggatccggaaacacctgaactgtattagctattcccttataaatttagcgtccagcagtgtttttcccggctgaacctgcagtccaacttcttaggcgtctcctcgtcgaatcttttgagggcagcccagaggctgccgcagtttgggccgcggcctggtgccctgccgtgtgggccccatattagctcgagccatgcccgcggctgctgcccccatcatcagctcggttcagaagctggtcctgtatgagactagagctgtgagtaccccgcgccgtggggcgccggcgggaggatggcggccgagtaggtgtggggcagagacagcattctccccctttgctccccccattttctcagttcccttatccccgcagaggggaatgtgtccggggctgggggtgggggtaggggcggtcttcgccttgtaatcgcaccctgggcactgctgcttttgcatgcaaacatttccacttaaaaagccacggtcggagcacacgggcaacaggtgtttgtggtatctcagaaactgttaatggcgctttatacgagttactgaattcttttcaactttcagaaaggcttaagagttctgcagttcactggttgcagtacaggcaggggtatggagagtatttttgatcctggcatagcattgctgagattgatgttaattacgtgcgctgtacttgctgacgtatttctcttgatctgaaaggaaggaaaaacattttctttaaagacagtcgatttgtttgggtaacattgttttgcttttcacttgacttttccaacacattttattttatttcgtcaaatctccatgaaaatagttactcgtagaataagcagactcgtttttaggttactcagttcagttcagtcgctcagtcgtgtccgactctttgcgaccccatgaatcgcagcacgccaggcctccctgtccatcaccatctcccggagttcactcagactcacgtccatcgagtcggtgatgccatccagccatctcatcctctgtcgtccccttctcctcctgaccccaatccctcccagcatcacagtcttttccaatgagtcaactcttcacacgaggtggccaaagtactggagtttcagctttagcatcatttcttccaaagaaatcccagggctgatctccttcagaatggactggttggatctccttgcagtccaagggactctcaagagtcttctccaataccactagttccctaaaattgaggcaccatcagtcgaacgtgggctgtctctgttagataggagagtataagaaggtacttatcctaatactttcttggttataacagggttgtaaaagcttgtctgcctgaggtcatcattaatgtagaaacaatgttggccctaagttaattttggtgacggcttcatctgattagatccagaccagaagatgaacttacctaatatactgtgtatgcagataccttccccctgaggagagccatgcagaagtatcattttgaaacaaaagcttctgctttctgtacaaatgctaatcaatgtccctggttagaaacatacatactatgtttaaaacacatcaatttcagcccattaagccgagcatgcctgaggactggctgatatgtgaatgttctttctaaagcaaaattcatattatagggctcttctgcttagaaacttcagtggctcccattctgaggaaaggaaactctttatctcttaagttgccatttaattactggcaactaaatagatccaaggaattaaaaaaaatggtagcaggttgtattaatgagaatagtagctaatactcttggaagagttatatagtccgggcactggtcaaaacactctacatagttcattatttaatcctcataaaacttctgaggcaaatattgttgctattactattattatttggtgaaggaaaaaatgaggcaaagaaaggttaggacattggatggtgtgggctggtaactggtgccaggcgcagatagtgtgtaactggatggcaacaaattgggtatataaattgagagtaaatgactagaaatttttacagcaatttgacagagtaattgtatttcagatgagtcagataaacatagggcttgtggataatgtctttggttttttgttttcagctttaatatggaaatttcaagaaaatacaaagtagaataataaactcccatctagccatcacccagctccaaaattaccaacattctgtcatcctctattacctataacttgttccacttcccatccaccacatatattttatatggttctttttctttaaaatttacataaattgaatgcacaaatctaagctacagaatttggacagacgcatacatgtgtaaccacacccctgtgttgtcacagaaaattcccttgtgtccatatctggtcacctgtcccttccttcctggcaattaatattctgttttttaaatgttagattagatatgcccgttaaagaagtctatgtgaatagaattgtgcatactgtcttgagtctagtggcttttgcttggcatcatgtctttgatgttcatccatgttgtgtgtgacagtagttagctgcttcttcttgagtactcatccattggatacatgttccacagctttgtttatcccttaacaatattgccttagaatgttaccacgtttagcctgttgtctcttaccgacatgtctcagaagtgtaggccagggaagcaatatgagcctggggaggggctggcctccttctcaggtcacgtgcggacaggagatagaaagcagggtaacagacacatttgtacctttaaggtggttggagtggaggtcattaacttattgagggcttacctctaagtggctattttaaaaggcgctctgggaaaagcaaaccaggaatttatggtaggacgcctcagctcactggttcatctaaatgtccacgctgttggtgtgagcagggacgagtactgaaaaatgcctaggaaccactcaaaacagtgtttttctcatcatactcaggtacagtggatctcactattacttctttaaaattcactctgatttttatgttttattgcagtaaagttgatttaatatgttgtgcttattataggtgtacagaatcttttttagttcaacatatagattctttactcaaataggtggcaacagggtgttgagtagaactcccttgctacacgatgggtccttgttgattacctgttatatgtgtattattgtggatttgttcatcccaacctcccaattgataccttccctcacccttcccttctggtaaccataattttgtattctaatttggagactctatttttcttttgtcagttggttcagtgttcagatttcaccaatatgtgatatttgtcttttttttctgacttacatcactcggtatgatgacagctactttcatgcatgttgctgtgataggagttggctcgttctttctttttcatgacggagtaatacgccattgtggacaggtaccactctttcttaatgcattcatctgtccttggacatttctcttgcttcaaggtcttggctattggaagtagtactgtagggtacatttgggtgcaatttttttttttttttttaagaattctgtttgtctgtgaatatcctgttaggagtgggactgatgaaatatatggtagctctgtttttacagtttcatagttctgtattgtaccattatcattcatatactcctggagaatcccgtggacagaggaggctggcaggctacagtccatagggtcacaaagagtcaggcgcaactgagtgactaacacttacttacttagcagtgtaagaggatccccttttctccacgcctactctagcatttattatttgtagacatattgatgatggccattctgaacaccagaaggtgatcccttctgatttgcatgtctctaataatttgtgactttgtacatcatttcatgtgatttaaaaaaaaaattagtgtcagtagtacttggcttttcatattgtcttaatgacactttgccctttgtaaagatttcttttagaatacttactgaaaattttgaggacaggtatcttgcagtccagcgatcctttcgaatattgtcccctgctgctgctaagtcacttcagtcgtatccgactctgtgcgaccccagagacagcagcccaaaaggctcccccgtccctgggattctccaggcaaaaacactggagtgggttgccatttccttctctaatgcatgaaagtgaaaagtgaaagggaagtcgctcagttgtgtccaaccctcagcgaccccatggactgcagccttccaggctcctccgtccctgggattttccaggcaagagtactggagtggggtgccattgccttaagcagcagttttcaagttgtttttgcgttaaacggccacaaggcggcagcatttcttcaaagcccaactcggcctcctttagcaaacagcgcctcagtggaagtcgtggttttgggttgtatattggactggattgtgccagaaacaacaccccaaagcttggatcttgttgcctccttttttttttcccctggttttatgtatagtttttctttgagtaacagtgatatacggtgtgaatcttttacatttgcacatatacatatatagcttgatcttcaaagtcttatctcatagagattattacagaatgttgagtagacgtctcttggtatactcaagtccttgttgattatatattttgtatgtgatagtttttattcgttaatcccaatttcctcatttattccttcccagcatctttcctcttgtgtaatgatcattttttatattgtgtaatgatattgtgtaatgatatttttgactgctgtgagtctgtctgtctttggtcagttggtttcttggtattaatttttacattttacctttaagtgaaatgtatctgttttttctgagtaacatctctcagtatgcttagaactgggtccatgtgggttcctgcaactggtattattgccttctgtttcatggctaagtctcgttccattgtggacacacaccacttcttcctaattcattcatctctcgatggaaactttgttggcttccaggtctctggccttgtaaggggtggtgcagtacagctttggatcatgttcctttttgaattctggtttcccctggattttctcataggcctgggactgtggatcacgtaggtagctccagttttcctttaaaagcacctgcatgcagggagtgcagccagtttcatcccacttgcctcttaggaagttttccttttctccaggccctctccactgtggattctttgaagacttattgatgatggccattcaggctttggcgatgtgaggcctcactgtagttctgatttccttgtctctaagaagaggggaatttgtgcaccgtttcatgtgttcttttctttaactaaatggtgataataaaattgacttgtggttggctccctgaaagtcaaccaggcgttgaatttttttggatgatctgcttcaggacatttattgacagaaggttatcatttacaactccgcaactcttgtgaatattgcatgcccaagaagcactgattttaaacttgctattttggaaaacagccacagtgcggcaggatttcttcatgcccaactagttaccacggaaagtagagccatcgtgatcgtggtgtttctgggtgtagattagtgtggagcatgccagcacaaacacctgatcttgggtctcatcacttactggttttaaattaacttagttattattaataactattattttggctactgtaagtgctgctgtagtggacatttgggtgccagtttcttttagaagtctggttctgtttgaatatcctgttaggatcagactctcaaatctatggtagctctgtttctacctttttaaaaaaattaatttattttaatgggaggataattactttacagtactgtgatggtttttgccatacatcaaccttttaaagacaattccctattgttctgtctcgtggctgttaccatttgtatgccactggcattttctccacccctcctctagcatttattatttgtggacattttgatgatggtagttttgactgtgattcctcattgtagttttgatttccatgtctttaataatttgtgactttgtgcatcatttcatgtacttttaaaaaaaatcatgtgagtagtatctaccttgtgatattgtcttatgaaatacagccctttgttaaaaaaatatatatatatttttttagaatacttaccctagacagtttttgagggctcataccttaagtccagtcatccttgtgaatgttagtcctcataaagtgaaagtgttagtcgcttagctgtgttcgattctttgtaatcccatgtaatgtagccctccaggctcctctgtccatggaattctccaggctagaatattggagtgtgtaacacttccccttctccatggaatcttcctgacccaggtatggaaacaggctgtctcgctttgcaggcccattcctttacagtttgagacaccagggaaacccagtttcctgtgtgggtgtgttagttgctcagttgtgtctgactctttgtgaccctttgactcaaaccctccaggcttcaccgtccacagaattctctgggtaagaacattggagtagccattcccttctccgtaacaattttcaagttgctgtcaaggctgtatattgtcaccctgcttatttaacttatatgcagagtacatcatgagaaacgctggactggaagaaacacaagctggaatcaagattgccgggagaaatatcaataacttcagatatgcagatgacaccacccttatggcagaaattgaagaggagctaaaaagcctcttgatgaaagtgaaagaggagagtgaaaaagttggcttaaagctcaacattcagaaaacgaaggtcatggcatccggtcccatcacttcatgggaaatagatgaggaaacagtggaaacagtgtcagactttatttttggggggctccaaaatcagtgcagatggtgactgcagccatgaaattaaaagatgcttactccttggaagaaaagttatgaccaacctagatagtatattcaaaagcagagacattactttgccaactaaggtccatctagtcaaggctatggtttttccagtggtcatgtatggatgttagagttggactgtgaagaaggctgagcgccggagaattgatgcttttgaactgtggtgttggagaagactcttgagagtcccttggactgcaaggagatccaaccagtccattctgaaggagatcagccctgggatttctttggaaggactgatgctaaagctgaaactccagtactttggccacctcatgtgaagagctgactcattggaaaagactctgatgctgggagggattgggggcaggagaaagggatgaccgaggatgagatggctggatggcatcaccgactcgatggacgtgagtctgagtgaactccgggagatggtgatggacagggaggcctggcgtgctgcgattcatggggtggcaaagagtcggacacgactgagcgactgaactgaactgaactgaactgttgtgcaatatagccacaaggtggcagcattttccaaaccgcaactcggttctctggcaaacagagcctcagtggacataatgatttggggttggcaattagaccaaaatgtgccacaagcaacaccccaaaatgtgtgtcttgtcgcttctttcttttctgattcaatgtttaggttttattgggtgtaacagtgatgtgcaaagctggatatgtacaaaactgttatatttacacatatacacatatctattgatcttcaaattattttccatagaggttgtcacagaatgctggattgatctcccttggtatacctaggtccttgttgattgtatattttatatgtaataatttttatttgttaatctaaacatccttatgtattttacatgtaatggttttatttgttaaaccaacttcctagtttaccccttccccatgcaatggcagcccactccagtactcttgccggaaaatcccatggatggaggagcctggtgggctgcagtccatggggtcgctaagagtcagacacgactgagcgacttcccttccacttttccctttcatgcattggagaaggaaatgggaacccactccagtgttcttgcctggagaatcccagggacaggggagcctggtgggctgccgtctatggggtcgcacagtcggacaggactgaagtgacttagcagcagcagcagcatatgtttccactttcttaatgatgattttattttgtgactgtttctctttggtcagttgtttttcttggttaattttcagaatccacctttgagtgataccatgtgatatgtcttttttttgagttagctctctgagtatggttagaactacttctatgttcagttcagttgctcagtcgtgtccgactctttgtgaccccatgaaccgcagcacgccaggcctccctgtccatcaccaactcctggagtgcacccaaactcatgtccatcaagtccatgatgccatccagccatctatctcatcctctgtcgtccccttctcttcctgccctcaatctttcccagtgtcacggtcttttccactgagtcagttcttcacgtcaggtggccaaatcattggagtttcagcatgtcggttgctgtggttggtattttttattctgtttagtgggtgggtcatgtaccattgtggacctgtaccactgtctgtgcattcattctcggtggacactgcctgcaggcctttgctgctgtaactggtagatgcagtgcagctttggatacatgttccttttttgaattctgtttttttccggatactcccttgacgtgggactgctggatcataggtttctcttgttttcctttaaaggcacctgcatactgttctgtgtcaggacttttccagtgtcatctcaccatcgccttataggctctgctttggtccaggccctctccaccagtattcttcgaagacttattgatgatgcccattcagattgggatgaggtgaaccctcatcgtagtatggatttgcatggccctaaaaactggcaaattaaaaaagttttttttaaaaaagcaaagtgttaataaaattgacatgttgaaattggctccttgaaagcgggccatgtgttgatttttttgactaccttctttgggacacttagtaacagtatgtgtcatttgcacatgttgtctgtgaatgttgtgtgcccataagcattgattttaaagttgctgtttgggaaaaagcccagaaggaggcagaatttctttatgcctaactctaattactacagaaagcagagactagtgggaggagtgttcttgagtgtgaattcgtgtggaatgtactagtacaaacactcataagctgtgtctcaacatttgtttttttattaatttaatttttgttttttaattatttaaaaaatgttttttgttgtgtggagaatcttctccagctctatgtgtattattcctctttggcttcttttctcacatgggttgttaccgagtgtagtgtagacctcccttgctctatatagtaggtccttttgatgatctcactgatatcactcagcatattagacctaggttcacatctgtttctgcggtagacattgtctcattctcattctcttttttttttaagcattcgaacagaacatctaattttatttttattttctttatttaaataaaaacttttaaaccccaaagcattttgtattgggatacaactgattaacaatttgtgacagtttcaggtgtacagtgaaggaactcagtcatacatattatttttcgtgactggatattatgccttcgtggacacataccccttcttctttagcatttatctgtccttgggcattttagttgcttccagctggtggcgactgcaggtgctgctgtagtgcacgtttgggtgcacgtttcttatagaaatctggttgttttcaaatgtgctattaggatggggctgtgaaatcgatggtagctctgtttttactttttaaaaacagttccctattgttatctctggtgcctgttaagtttatataccacaggcccttttcttcatcccctctcttgcatttattgtttgtggacattttgatgatggccattttgacactgcaatgtgatcctttattgtaatttttatttccatgtctctaataatttgtgggttttgtgcatcatttcatgtgctttaaaaaaaaatagtgtgagcagtttctacctcttgatattgccttgatgaaattcagcactttgtaaggaaaattttttagaatacttacctaggagggtttttgaggacggataccttacagcccagccaccgttgggaatgtcagtcccttaaagggaaagtgttagttgctcagttgtgtgactcttggtcaccccgtggaatgtagcccacaaggatcctctgcccatggaattctccaggcaggaatattggagtggatagccagtcccttctctaggggatctaccttgacccaagtgtggaacccaggcctcctgcatttcaggcagattctttactgtcccagtcaccagggacacccagtttcctgtggtgtgtgttagttgctcagatgtgtccgactctttgcaacccatggactggatttctccagctcctctgtgcgtgaaattccccagacaagaatactggagtgggtagccattcccctctccttaacaggttgtagttggtgttgtgggcaatgtccacaaggtggcagcatttccccaagcccaactctgtactctggcaaccagagcctcagtagacatcttggtttggggttggaaattagactcatatataccaaaagcaacaccccaaaacttgtgtcttgtcgcatctttttttaaaaaaaaattcagtgtttagtgttttggggcgtgacagtgttgtataatgtcggatgtgtacagaaacatatttacatatatataactattgatcttcaagttattttccatagaggttattacagaatgttcagttgacctcccttcgtataccaggttgattacatattttaaatgtaacagtttctatgttaatacaaacttcctcatgtattttatatataatgatttctatgtgtttctctaatttactccttccccacattgttctcctttcttagtgacacttttattttctacttagtaactctttctcttggtcagttcttttcttggttatattttagatcccatgtgtaagggatatcaggtgatatgtatgttgttttgttttgtttttttttttagttaactgtacccatgtaggaggctgcacctggttttttgttttttaatcctatttaatgagtgagtcatgtaccattgtggacctggacaactgtctcctggtgcattcattctcgaaggacgctttacctgcacatctttgctgctgtaactggttatgcagtgcagctttggatgaatgttcctttttcaaattctggttttcttcagatattcccttaggcatgggactgctggattataggttgctcttattttcctttaaaggcacctgcataactgttcttaccagtttggtctcaccattaccttaggaggctgtgcttttctccaagccctttctaccagccttcttcaaatatttattgatgatggccatttagacttggtgagatcaacccttgttgtagatttgcatagctctaagaactggtaattttgtgcatcatttcatatgttctttttctttttttaacatcggtaatgaaattgtcttgtaaaattggctccttgaaagtgggccgtgtattggatttttttttttcaattaccttctttaggacgtttagtgacagcacatgtcatttacagctgtgcaatccttatgaatgttgtgtgcccagagcattgatttaaacttgctgtttgggaaaatggcctcaaggaagcaggatttcttcatgcccaactctagtaactagagaaagcagaaactagaggaagtggtgttcctgggtgttaatttgtagggaatgtgccagcagaaacaaccataagcttgtatctcaatacttgttttttttaatatatttaatttctagtttgaaatttagtaagttgttttgtaaagtgtttttttgtaggtgttcagttcagtcgctcagtcgtgtccgactctttgcgatcccatgaattgcagcacgccaggcctccctgtccatcaccaactcccggagttcactcagactcatgcccatcgagtcagtgatgccatccagccatctcatcctcggttgtccccttctcctcctgcccccaatccctcccagcatcagagtcttttccaatgagtcaactcttcacatgaggtggccaaagtactggagtttcagctttagcatcagtccttccaaagaacacccaggtctgatctccttcagtatggactggttggatctccttgcagtccaagggactctcaagagtcttctccaacaccacagttcaaaagcatcaattctttggtgctcagccttcttcacagtccaactctcacatccatacatgaccactggaaaaaccatagctttgactagacggacctttgttggcaaagtaatgtctctgcttttgagtatactatctaggttggtcataacttttcttccaaggagtaagcgtcttattatttcatggctgcagtcaccatctgcagtgattttggagccccaaaaaataaaatctgacactgtttccactgtttcctcatctatttcccatgaagtgatgggaccagatgccatgatcttagttttctgaatgttaagctttaagccaactttttcactctcctctttcactttcatcaagagtcttttgggttcctcttcgctttctgccataagggtggtgtcatctgcatatctgaggctattgatatttctcccggcaattttgattccagcttgtgctttttccagcccactgtttctcaccgaattcttttcagttctgtacgtatctactcatctttgagttcttttcttctataggttattacagagtgttgtgttgacctcccttgctcagcagcaagtccttgttgattacctattttatatatattattgtggatttgttaaccccaacctcctaatcgatatcttcccccaccattccctctggtaactctaattttgttttctaattttgtgaatctgttctctctttttcagctagtttatgggcgtgaattttcagactctactgcgaaatgatacttgtctccttttttcctgacaagtgtcattcggtataattacaacgagctccatgcattttgctgtagtcggctctgtctcatcttcctctggatcgcacactatgccattgtggaggtgtgccactgcttctttatgagttcatctgtctttgggcattttagttgcttccaggtcttggctgtttgccgtgatgctgtagttcaattgtgggtgcaagattcttttaagaattctggttgtctttgattatcctgttagcagtgggactgctggaatatatggtagctctgcttttacagtttcatcattgtgtatcgtggctgttaccatttacataccactagcaacataagtggagaaggcaatgcaccccactccagtgttcttgcctggaaaatcccacggacggaggagcctggaaggctgtagtccatggggtcgctcagggtcggacacgactgagcgacttcactttcacctttcactttcatgcattggagaaggaaatggcaacccactccagtgttcttgcctggagaatcccagggacaggggagcctggtgggctgccgtctctggggtcacacagagtcagacacggcggaagcgacttcacagaagcacaacataagaaggttccttttctccatccgcagcctagcatgtattgtttgcagacatcttgatggtggtcattctcactgccgggaggtgatccctcattatgatcttgatttgcatgtctccaataattggtgattttgtgcatcatttcatgtgctttttttttttttttttacaaaatagtgtcagtagtctctgccttttcatattgtcttgatgacactctgccctttgtaaagatttcttttagaataattactcactgaaaacttttgaggacaggtatcttgtagcccagctgcccttttgcatattaagtcccctaactaacagttttcaagttgtttttgtggaaacagcacaggaaagcagcatgtcttcaatgccaactctgcctactcttgcacacaaaggttcagtgaaagttgtgttttggggttgcacatcggtgttgccagaagcaacaccccaaagcttgagtgttgtcactgttgtgttttttagttgactgtgtaattctgctttaataaacagtgatttacagcgttctctgtgttgtatgtgtgcagaatcttttacatttgcacatatacatgtgtctgaaagtgaaagtcactcagttgtgtccaactctttgtgaccccatggactgtacagtccatggaattcttcaggccagaatactggagtgggcagccttccacttctccaggggatcttcccaacccagggatcgaacccaggtcccttgcactgcaggcggattctttaccagctgagccaccagggaagctctatcaatgtttagattcttatctcatagagattattacaggatgtttattagacttctcttggaatactgaagtccttgttgattatgtattttgtatgtaatagtttctattgttaatcccaattttctcgtttattcctacccacatctttccccttggttaatgataattttatatttgactgttgcgagtctctgtcttcggtcagttggtttcttggtattaatttttagatttcacctataagtgataccatatgatatccgtccattttttctgagtaacacatctctgtatgcttagaactaggtccgtgtgggttgcttcttcggtgttatccttctgtttcatggctgaggctcattccattgtgggcgtgtatcgcttcctctttaatgcattcatctcttgatggaaactttattggcttccaggtctttgctcttgtaactggtggataaagtgcagctttggagccatgtttctctttgaattctggttttccctggatgttcttattggcgtggggctgctggatcatacgtaactctagttttcctttaaaggcacctgcatcctgttctctaaagagaatgcacccatttcatcccacctgcgccttaggaggttttccttttttccaggtcctctttaccatggattctttgaagacttattgatgacggccattcagactttggtgatggagcccttgttgtagctttgatttgcatgtctctaaggactggtgaatttgtgcatcattttatgtgctcttttctatttcttatcagtggaaataaattgacttattgaagttgattccttgacagtcgatcagaagttaaattttttttcttttgattacctacttcaggacatttagtgacagaaggtatcatttacagccctgtagttcttgtgaatattgcatgcccataggttattgatttttgaagttgttgttttagaaagtggccacaagggggcaggatttcttcatgcccaactcttcagttcagttcagttcatttgttcagtcgtgttggactctttgagaccccatggactgcaacatgccaggcttccctgtccatcaccaactccagagcttgctcagattcatgtccatcgagtcggtgatgccatccaactatctcatcctctgtcatccccttctcttcctgtcttcaatctttcgagaatcagagtcttttccaaagagtcatttctttgcatgaggttgccaaagtattggagctacagcatcagttctttcaatgaatattcaggactgatttcatttacgattgactgtttgatctccttgcttccaagggactctcaagagtcttctccaacaccacagtttaacagcatcaattctttggccaactctagttactacagaaagcagagctttagcggtagtggtgttcctggcatgtaaattagtgtggaaggtgccagcacaaacacccctaagctcatgtctcattaattactgttttttaattagtttaatttttactttttaaaggagaaatttgttttaaaatgttgagttggctgtgtgtagagaatgtttttctgttttattatatatatatatatatatatatatatatatatatatatgttcaggttcttttttcatataggttcctacagaatgttgtgtagacctcccttgctcagctgcacgtccttgttgactacctattttatatgcattactgtggattggttaatcccacttgctaattcctcgtctcacatttcccttccggtgacaatgactttgttttctaggtttgtgaatctgtttttctattgtcaggtggttcatgggcatcagttttcagattccacagataagtgatatttgttgttgttgttttttgactgacatcactcagtaggattacacttaagtccatgtatgttgctacagtagacactgtcttgttctttatctttttttaagcattcaaactgagcatctaattttattttttttctttattttattaacattttaatttgtatttttaaccccaaatcatttgttggggtatagccgattaacaatttgtgatagtttcaagtgtacagcgaagggactaggccatacatatacatgtgtctgttcattcctttggggatggagtagcatgccatcgtggacatgtcccccttcttctttagcattcttctgtccttgggcattttaggtactccaagcaggtgactattgtaagtgcacatctgggtgcatgtttcaaaatctcgttgttttcaaatctcctgttaggattggactccgaactcaatggtagctctgtttttaccttttaaagtcagttccctaatgttatatctgtggctgtttatatatcacacaggcatttgcgagtgtccttttttctccacctaaagtaaaggtgttagttgctcagctgtgtctgactctttgccatcccgtggactgtggcccgccaggctcctctgtccatggcattctccaggcaagaatattggagtgggtaaccattcccttctccatgggaacttcctgagccaggtgtggaacccaagtctccaacattgcaggcagattcttgactgtgtgagccaacaaggaagccccgtttcctgtgtgtatgtgttagtttctgtcgtgtccaactctttgcaacacatggactgtagcccgccaggctcctctgtgcatgaaattctccagggaagagtactggtgtgtgttcagttcagtcactcagtcgtgtccaactctttgtgaccccattaatcgcagcacaccaggcctccctgtccatcaccaatgcccagagttcacccaaactcatgtccatcgagtcggtgatgccatccagccatctcatcctcggtcgtccccttttcttccttcccccaatccctcccagcatcagagtcttttccaatgagtcaactctttccatgaggtggccaaagtactggagtttcagctttagcatcattccttccaaagaaatcccaggactgatctccttcaaaatggactggttggatctccttgcagtccaagggactctcaagagtcttctccaacaccacacttcaaaagcatcaattctttggtgctcagccttcttcacagtccaactctaacatccatacatgaccactggaaaaaccatagccttgactagacggacctttgttggcaaagtaatgtctctgcttttgaatatgctgtctagattggtcataagtttccttctaaggagtaagtgtctttcaatttcatggctgcagtcaccatctgcagtgattttggagccccaaaaaataaactctgacactgtttccactgtttcctcatctatttcccatgaagtgatgggactggatgccatgatcttcgttttctgaatgttgacctttcagccaactttttcactctcctctttcatttttattaagaggcttttgagttcctcttcactttctgccataagggtggtgtcatctgcatatctgaggttattgatatttctccccccaatcttgattccagcttgtgtttcttccaggccagcatttctcatgatgtactctgcatagaagttaaataagcagggtgacaatatacagccttgacgtactccttttcctatttggaaccagtctgttgttccatgtccagttctaactgttgcttcctgacctgcatacagatttctcaagaggcaggttaggtggtctggtattcccatctctttcagaattttccacagtttattgtgatgcacacagtcaaaggctttggcatagtcagtaaagcagaaatagatgtttttctggaactctcttgctttttcgactggtgtgtgtagctactcccttaagtttaaaaaatttcaagttgctgttgcaggatatgaccacacggcggcagcatttttccgagcccactttgggtactttggcaaccagagcctcagtggacgtggtgatttgaagttagaaaataggatgaagtgtgccagaagccatcactccaaaacttgtgtcttgtgacttcttttttaaattcaatttttatgttttttgggacataacgatgcacaatgtcggatgtgtgcagaaaattttatattcacccatatacttatacctattgatcttcaaactattttccatagaggttattacagaatgttgagttgacctcccttggtatacctaggtccttgttgattatatattttatatgtaatattttctatttgttaatccaaacttccttatgtattttatatgtaatgatttctatttgttcctacagcttcctaatttaccccttgcccacatctttcccctttcttaatggtaattttattttctattttgtgactgtttctctttggtcagttgttttcttggttacttttcagaatccacctgtaactgataacatgtaatatggcttttttttttttttttgatcacccatctgagtatggatagaactgattccatgtaggttgctgtaattgttgtttttttcattgtgtttaatgggtgagtcatgtaccatggaggacctgtacaactgtctctatgcattcattctcaatggacactttgcctccaggcctttgctgtcataactggtgatgcagtgcagcttaggatgcatgttcctttttcaaatattcttcggatattcccttaggcatgggacttctggatcacaggtttctcatgttttcctttaaaggcacctgcatactgttatgtgtcaggacttttaacagtgtcatctcaccatcgccttataggctctgcttttgtccaggccctctccaccagtattttttgaagacttattgatgatgcccattcagattggaatgagctgagccctcattgcagtttggatttgcatggttcttgaaaactggcaaatttgtgcaccatttcgtgtgctcttgttttaatttaaacggtgataataaaattggcttgttgaaattggctcctttaacgtggaccatgtattgagttttcttttttgattaccttcttcaggacatttagtgacagtgggtgtcgttttacagccacgcagtccttgtgaatgctgtatgcccacagaagcattgatttttaaagctgccctctggggaaatggacacaagaaggcatgatttcttcatgcccaactctagttacaacagaaagcacagcctggtgagagtggtgttcttggatgtaaattagtgtggaatgtgccagcggaaacacccataaattgtgtctcaatacttattgtttttttaaattaatgtaattttttaatttagagagttgtttcaaaaagtgtttttggtaggtgtagagaatccttttcagttctataggtacctattcatctttgcgttattttctcatttagattattacagagtgtagaatagacctctcttgccgtacagcaggtagttttggattttttgttttatatgtaatattctatgtagtattttattctagtttatatgtattattgtggatttgctaatcccagcccgctaattggtaccttccctcacctcttcctctggtaactctaattttgttctgttgtcagttggtttatgggcgtggattttcagattccaccaagaagtgatatgtgtctttctttttccccattgatgtcgctcagtatgattaccacaagctcaggtattttgctgcagttggcatcgtgtcattcttttcttgatgagatatctgccgctgtggacatgtgccaccccttctttactcagtggccggtctctgggtatttagttgttccaggtcttggtggtttgctgtgacgctgtagtgcccactggggtgccggatcctttcagttctggtcgtcttcagatatcctgttaggagtggggctggtgaaatgcatggttgctctgtttttacagtttcatcgttctgtattgtggctgttaccatttacataccactagcaacataagacgagataccaagggaacatttcatgcaaagatgggctcgataaaggacagaaatggtatggacctaacagaagcagaagatattaagaagaggcggcaagaatacacagaagaactgtacaaaaaagatcttcacgacccggataatcacgatggtgtgatcactcatctagagccagacatcctggaatgtgaagtcaagtgggccttagaaagcatcactacgaacaaagctagtggaggtgatggaattccagttgggctgtttcaaatcctggaagatgatcctgtgaaaatgctgactcaatatgccagcaaatttggaaaactcagcagtggccacaggactggaaaaggtcagttttcattccaatcccaaagaaaggcaatgccaaagaatactcaaactaccgcacaattgcactcatctcacatgctagtaaactaatgctcaaaattctccaagccaggcttcagcaatacatgaaccatggactttcagatgttcaagctggttttagaaaaggcagaggaaccagagatcaaattgccaacatccgctagatcatggaaaaagcaagagagttccagaaaaacatctatttctgctttactgactatgccaaagcctttgactgtgtggatcacaagaaactgtggaaaattctgaaagagatgggaataccagaccacctgacctgcctattgagaaacctatatgcaggtcaggaagcaacagttagaactggacatggaacaacagactggttccaaataggaaaaggagtacgtcaagcctgtatattgtcaccctgcttatttaacttatatgcagagtacatcatgagaaacgcaggactggaggaagcacaagctggaatcaagattgccgggagaaatatcaataacctcagatatgcagatgacaccacccttatggcagaaagtgaagaggaactcaaaagcctcttgatgaaagtgaaagaggagagcgaaaaagttggctgaaaggtcaacattcagaaaacgaagatcatggcatccggtcccatcacttcatgggaaatagatggggcaacagtggaaacagtgtcagactttattttttgggctccaaaatcactgtagatggtgactgcaaccatgaaattaaaagactcttactccttggaagaaaagttatgaccaacctagatagcatattgaaaagcagagacattactttgccgactaaggtctgtctagtcaaggctatggtttttccagtagtcatgtatggatgtgagagttggactgtgaagaaggctgagcgctgaagaattgatgcttgtgaactgtggtgttggagaagactcttgagagtcccttggactgcaaggagatccaaccagtccattctgaaggagatgggtcctgggatttctttggaaggaatgatgctaaagctgaagctccagtactttggccacctcatgcgaagagctgactcattgggaaagactttgatgctgggagggattgggggcaggaggagaaggggacgaccgaggatgagatggctggatggcatcactgactcgatgggcgtgaatctgaatgaactccgggagttggtgtacagggaggcctggcatgctgcgattcacggggtcgcaaagagtcggatgcgactgagcaactgaactgaactgagcaacataagactgagaaggcaatggcaacccactcccgtactcttgcctggagaatcccagggacgggggagcctggtgggctgccatctatggggttgcacagagtcagatacgactgaagcgacttagcagcagcaacataagagggtccccttttctccgtcaacactagcactgatcctttgtgaaatattttgttggtggccactcagaccacctggaggtgatccctcattgtaatcttgatttgcatgtctcctgtaattggtgattttgtgcatcatttcatgtgcttttaaaagctaatgtcagtagtatctgcctgttgatattgtcttgatgagagtctgcccttggtaaagatttcttttagaatacttagctcctaaaattattttgaggacaggtagctggcagtccagccatccttttgaatatttgtcccctaagcaacagttttcaagttgttgtggaaaaatggccacaaggtggggcatttcttcgaagaccaactgtgtaaactcttgcaaagagagcctcagtggaagtcgtggtttagggttgttatactgaattggaatgtgccagaagcagtacctccaagctagggtctcgtcactagttctttgttttttagtttactgtatagttttgctttgatttacagtgatttatggtgttctgtgtgtacagaatctcttacatttgcacatatacatgtatctattgagcttcaaattattctctcatagagactcttagagaatgttgcgtagaccttccctggtgtatctaagttcttgttgattatgtgttttatatgtagtcgtttctattgttattctcagttgccgtatttatcccttccccacatctttccccttgattactgataattttatttttgactgttgggggtctttggtcagttgggttctcgatattgatttttagaagtgatatctatgatacctgccttttttcctgagtaacatctcttggtatgcttagaactaggccctgtgggttcccgcagttggtattatttccttctgtttcatggtcgagtctcgttccattgtgggcgtgtacctcttcctctttaatgcgttcatctctcgatggaaactttgttggcttccaggtctttgctcttgtaactggcgctgcagtgcagctttggaggcatgtatctctttgaattctggttcttctgggatattctcttaggcgagggactggggatcgtaggtagctctagttttcctctaaaggcacctgcgtcctgctctgcagagagtgcacccgcgtcatccacctgcaccttaggcgggtttcctcttctccaggtcctctccaccatgggttctttgaagacttattgatgatggccattcagactttggtgatgtgagcccttgttgtagttttgagtttgcgtgtctctaagaactggtgagtttgtgcatcattttatgtggtctttttcccccctaaacaatgataataaaatggacttcttgttgtaattggctccttgaaagtcaacgaggtgttgattttttttttttttggattgcctacttcagaacatttattaacagaaggtatttattgacagccctgtagtctttgtgaatattgcatgtccataagcattgagttatgaagttgctattttggaaaacggccaccaaggcagcaggatttcttcatgcttaactctggttaccacggaaagcggagccttgatggaactggtgttcctggcctgtaaattagcgtggaaggtgccagcacagacacccctaagcttgtgtctcatgactttgtgtgttaattttattaatctaatttttattttctaatatagaatgttttaaaatgtattgttgttttggatgtgtcgagagtatttttcagttttatatgtatctatttatcttcaggtttttttctttttaatatgggttactacagaatcttgtgtatgcctcctccctcttcaggaggtcctggttactccctgttctgtatgtggtgctgcggatttgttaatcccacctgctgatttgtccccccacgtttcccttttgggaacaatgattttgttttctagttttgtgagtctgttcctctttttcaggtggttcatgggcgtcagttttcagattccacagatcagtgacatttgtctttttttttcttttttgactgtcgtcacacagctaggcccgtgtgtgttgctgcctacaagctggtattgtctcactctttctcattactgagtaatatgccgtcgtggtcatgtaccgcttctttagcattcaactgtccttggacattttatctccttctggctcttggctactgtaagtgctgctgtagcccacctttgggtgccagtttcttttagaattctggtgtctgaatatcctgttagggtggggtctgaaatcgatggtagctctgttttcaccttttacagacggctccctgttgttatcttttctggctatagccgtttgtatgccgcgggcatctgaggaggtctcttttctccaccccaactccagcatttattgtgtgtggacattctgatgaaggccatttgactcctgcaaagtcaccccgcattgtaattttgactttcacatctctaataatttgtgattttgtgcatcatttcatgtgctttttaaaaaagtagtgcgagaggtatctatctcttgatattttcttgatgaagttcagccctttgtaaaaaaaaaaaaaattgtttttagaattcttagccctggacagttcttgaggactggtgtcttacagcccagacatccttgtgaatatgttagccctcttaaagtgaaagtgttagtctcttagttttgttccatcctgtgagaccccatgtaatatagcccgccagactcctctgatgatagaattcttcaggcaaggctattggagtgggtagccattcccttctccaggggatcttcctgacccaagtatggaaacagggtatcttccactactggccaattctttaccatctgagccaccagggaaacccagtttcctctgtgtgtgtgtgttagttgctaagccctgttggactctttctgactcagagactggggcctgccaggagcctctatccatgggattctccagaaatactggaatggttagccattcccttcttaactgttttaacgttgctgttgctggaaacggccacaaggtggcagcatttccccagtaccaatgcaaggtactgtggcaaccagagcctcagtggacattctggtttggggttggaaattaaacaggaatgtgtcagaagcaacaccccaaagcttgtgtcttgtcatttctttttctgtcagtttaatttatagttttgcttgcagaaacacgacatacagcgtggtatatattgtgctgtgctgtgcttagttgcccagtcgtgtgcaagtctgcaaccgcatggactgcagcccactaggcttctctgtccatggggattctccaggcaagtatgtgtacacagtcttttacatttgcaaatatatatatctattgactttcaaattattttctcacagaggttagaacagaatgctgcttatacctcccttgttatttgtcctggttgattatgtgttttatatgaaattgtttctatttgttaatcccaactttcttgtttaccccttccccatgtcttcccctattacaacgataactttattttctagccttgtgaatctgtttctctttggtccattggtttcttggtattaatttttagattccacgtataagtgctatcagtctttttcttcttagttactaaccccctagcatggttagaactaggtccgtgtgggttgctgtaattggtattacttcattctgttttatgaccgaatcatgttcctggtgcaagtgtagctgttcctctttatgcgttcatgtggacggacagtttgtttccagatcttagctgttgtaactggcagtgcactgcatatttgggtgcatatttctttttgaattctgattttgcctggacattcttaggcattgactgctggttcatagggagcttagttttcctttcaggcacctgcacactgttctgtttaggggctgtttccagtgtcatcacaccagcaccttggaggctttccttttctccaggccctctccaccatgcattgtttgaagactcatcgatgatgctcattcatactgtggcgggatatgccattgttgtagttttgatttgtgtgtgtctctttcaactggtgaatttgttcacccattttatgagctctttctttcttttttcaaggttggtaataaaattgacttgttgaaattggctccttgaaagtgggacatgtggagtttttgttttgatcaccttcttcaggatagttagtgacagcaggtgttatttatagctctactgtccttgtaaattttgctagcccgtcagttcagctgctcagttgtgtgcagctctttgtggccccatggactgcagcatcccaggcttccctgtccttcactatctcccagagtttgctcaaactcatgtccatcaagttggtgatgccatccaaccatctcaccctcttttgaccctttctgactcttccagtgagtcagctctttatatcaggtggccagagtaatggagtttcagattcagcatcagtccttccaatgaatattcagggttgattccctttgggattgactggtttgatctccttgctctccaagggactcaagagcctctacagcaccacagttggaaagcatcaattcttcagcactcacttttctttatggcccaactctcacatccatacatgacttactggaaaaactgtagctttgcctatatgcagctttgttggtagagtgatgtctctgctttttaatactctgtcaaagtttatcatagcatttcttccaaggagcaagcgtcgtttaatttcatggtgacagtcactgtccacagtgatttttgtagctcaagaaaataaagccagccactgtttgcattatttctcggtctatttgccgtgaagtgatgggactggataccatgatcttactggttttttgaatgttgagttttaagccatctttttcactctcctctttcactttcatcaagaggttctttagttcctctttgctttctgccatacgggtggtatcatctgtgtatctgaggttattgatatttctcctggcaatcttgattctagtttgtgcttcatccaccccagcattttgcatgatatactctgcatataagtcaaatgagcagggtgatactatacagccttgatgtactcctttcccaatttgggaccagtctattgttccatgtccagttctgttgcttcttgacctgcacacaggtttctcaggaggcaggtaaggggggctgatatttctatctcttgaagaattttccagtttgttgtcatcctcacagtcaaaggttttagcgtagtcaatgaggcagaagaagatatttttctggaactctcttgctttttccatgatccaacagatgttggcagtttgatctctggttcctctgcctgttctaaatccagcttgagcatctggaagttcacggttcacatatttctgaagcctggcttggagaattttgagcatcactttgctggtgtgtgagatgtgtgcagttgtgcagtagtcggagcattctttggcattgcctttctttgggattgggatgaagaatgatcttttttagtcctgtgaccaccgctgcgttttccaaatttcctgacacattgagtgcagcacatcatcttttagggtttgaaacagctcagctgaaattccatcacttctactaggtttttgtagtgatgcctcctaaggcccacttgaccttgcagtccgggatgtctggctctaggtgagtgatcacatcatcatgattatctgggtcatgaagatcttttttgtatagtttgtctgtgtattcttgccacctcttcttactatcttctgcttctcttgggtccatactgtttctgtcctttattttgcccatttttgcatgaaatgtcccttggtatctctgattttgttaaagagatctctagtctttctcattctactgttttcctctatttctttgcattacctcagaaagcaagccatagtggaaatggtgttctgagttgtacattagtgtgggatgtgcaattttttattaattgaatttttaaatgtaaaaagttattgtaaaatcctgcattttctgttagcatagagaatctttctcagttctctttatatcttcatctttggattcttttctcatataggtcatcacagtgttgtacaggccccacttgctccacagcaggtccttgttgattacctgttttatctgtattattgtggatttgttaatccacaccttgtaattgatacctttcccttctgtaaccctaattttgtgagtctgtttctcttttgtcagttggtttatgggcatgaatttaagcctccaccaataagcgttatttgtcttttttttcccctactgactttgttcagtataattacgagagctccttatgtgtcactgcaggtggcgttgtgtggttgtttcatggctgagcagtacgccgttgtggacgtgtaccacttcttctttctgcattcagtcagtttggatgtcttggttgcttccaggtctcggctattggaagtgggcagtgtatggtagctcgctttttaacttttaaagacagtctcatgctgtgctctgttgtggtccttaccatttgcataccgtaggcaattctagagggtccccttttcactgaccccactgtgacctttagttcgtagggatttcgatggtggtcattctgagtgctgtgagatgcttcctcatgtaatctttatttgcatgtctctaataattcctgattatgtgcatcatttcatgttccctttctttctcaaatgttgtgagttgtgttgaccatttcatatgtgttgatgaaattctgtcttcgtaaagatttcttttctaatagttactcccgggaaatttttgaggacaggtatcttacagcctgatcctccctgtgactattaagtccctttaaggacagttttcaaggtttctgttgcagaaagtgaccacaaggtgccagcatttgtttgatgccaatactgcttactctggcaaacagcctcagtggaagtcctggttggaattgtacattagactgcagtgtaccagaagcaataccctaaaagcttgggtctcgttacctcttttttttgtgtgtgtcagtttgatgtttaattttgcctggagtaacactgatacatggtgttgtatatgttgtatgtgtacacaatcttttacatttgcacatatatatatattgatctgcaaatgtttttctcatggaggttattacagaatgttgagtagacctcccttagtatacctgtgtccttgttaattatgtattttataaaaattgtttctatttgctaatcccaacttccttatttatcccttccctgtatctttcaccttgtataatgataatattatcgtgtggtttcgtgagtctgtttctctttggtcctttgggttcttggtattaatttttagattacccctataagtgctgtctgtcttcttcttagttgcccttcttagcgtggttagaactcagtcccagtgggctgctgctgctgttagttcattctgtttcacgactaagccatgctcctggtggacatgtagcagttcctcttcatgcattcacctggccagatgctttgtttccagatcttagttgttgtaactggtggcccactgcagatttgggtgcatatttctttttgaattctggttttgcctggatattctcttaggcattgactgctagttcatagggagcttagttttcctttcaggaacccgtgtattgttctgtgtaggggttgttaacagtttcatcccatgggttccttcgtaggctttcctttccttcagggcctttctatcatgtattctttgaagactcattgatgatggccattcagactggggcaaagtgagccctctttgtagttttgattggcatgtctctaagaacctggagtttgtgcaccatttcatgtggcttttttttttttttttaagtggtaattgacttgctgaaattggctccttgaatttttcgattatgtcttcaggacatttagtgacagcagatgtcatttatacctctgctctccttgtgggtattgccggcgtctaagcattgggtttggcttccctgatggtgctagtgataaagaaccctcctgtcagtgcaggagtgtaagacatgggtttgaccctgtgttgggaggatcctctggaggagggcatggcagtccactgcagaattcttgcctggagagccgcatggacagagaagcctggtgggctctgatccatagtcagagtcggacacgacctaatcagcttagcatgcagcatgcatgcatgcaagaattggttttaaagttgctgttttggaaaatggccacaagggagcaagatttcttcatgcccaactctgtttactacagaaagcagagccttagtgaaagtggtattcctgaatggtaaataaatgtggcacgtgccaggacaaacacccataagcttgtgtctcattaccttttgtttttattaatttagttttgatttagtaagttgttttgaaaatgttttgtttttgtgtgtgtagagaatttttttcagttctatatgtatatctattcgtttttgcttcttttctcatacaggttatctcagagagttgtgtagacctcccttgctctactgtaggtccctgttgattgcctattttatacatattattgtggaatgttacacaagctcttaactgattcctacccccaccttttccttttggtaatcctgatttggttttctaattttgtgagtctgtttctcctttgtcagttggttcatgggcttttccatcaattttcagctgccactgatgatactttgtcttttttatgtctaggtccatgtatgtggctgcagttggcattttctcatgttttcatcactgagtaatatgccacttggggcatgtaccacttcttctatatgcactcatctatccttggatattttgcttgtttccaaaatcttgtctattgaaaatggtgcaagattcttttagaatctggtggcctttgaatatgctcttaggagtgtgacttctgaaatatatggtagctctgtttttaccttttaaggacactttcatactgttgtctgttgtgactgttaccatttaaataccactggcgtataaaatggtccccctttctccaccctcactctagcatttattgtttgtagacattttgatgatggccattctgactgctgcaaggtgatcctgctttggaatcttggtttgcatgtctctaataattagtgattttgtgcatcacttcatgtgcttttaaaaatatagtgtcagtagtatctgacttttcttattgcttaatgaaaaactctagccttttcctaaagatttcttttggaatacttacctctggaaatttttcaggacgagtatctttataacccagccgttctggtgaatgcaagccccggaagccgtagttttcaagttgctgttgcagaaagcagacacaaggtggcagcacttcttcgccgcccggctctgcatactctggcaaacagagcctcggaaagtcctggttagatgttttaccttagagtagactgtgccagagtgtaggacttcctggtggctcagacggtaaggtgtcttgcttgcaatgcgggagacctgggttcgatttcagggctggggaaatcctctggagaagaaatggcaacccactctagtactcttccctggaaaatcccatggacagaggagtgtggtgggctacagtccacggggtcgcaaagagtcggacttgactgaacgacttcactttcactgtcagactgtgccagaagcaacaccccaaagcttgtgtcttttcacttgtctttttttttggtcagtttaatgtgtagttgtgcttagagtagcactgatatattcagtgttccatgtggtgtttgtgtacacaatcttttacacttccacatatacatatatctgttgatcttcaaattacttcctcatagagcttattgtgaaatgttgagtagagcgctcttggtatactgtgtccttgttaattatatatcttacctgaaattgtttgctaatcactacctccatattcagcccttccctgcatctttcctgtttgttaacaatgatttcattatcgactcccgtgagtctgtttggtcagtcggtttcttggtactaatttttagattccacctataggtcttatcatatgacatgtgtctttttatgctgttacctttctcagcatggttagaagcatcagtaggtccatggaggttgctgcctttggtggtgtttcattctgaggtgtgttccccagtggacctgtagcagtgcctctttatgcatttctcctcgatggacactttgtttccagtctttgctattgtacctgtgccccactgcagctttggtgcatgtttcttttcaaattctggttcttttgggttattctcttaagccagggaatattggatcattggtagctttagtctttttttttgaaagacagctgtgtactgttctgtctcggtgctgttaacagtttttcatcccaactgcaccctaggagggtgtcattttctccaggccctctccactgcggattctttgaggactccttgatgatagccattcagacttcggtcaggtgaccccccagttgtagttttgttttgcatgtctctaataactagtcatttttgtgcacaatttcatgtgctcttttcatttttttcaacagtggtaataaaagtgacttgaaattggctccttgaaagtgggccatgtgtcaaatttgtttttattaccttctttgggccatttagtaatagcagatgtcatagcctggctacccttgtgaatattgtgtgcccatcagttcagttcatttgctcagtcgtgtctaactctttgcgaccccatgaatcgcagcacgccaggcctccctgtccatcaccaactcccggagttcactcagactcgcgtccatcgagtccgtgatgccatccagccatctcatcccccgtcgtccccttctcctcctgcccctaatccctcccagcatcagagtcctttccaatgagtcaactcttcgcatgaggtggccaaagtactggagtttcagctttagcatcattttttccgaagaacacccaggacccatctcctttagaatggactgattggatctccttgcagtccataagcgttggttttaaagttgctgtttcagaaagtggccacatggcggcagtgtttctacatgccaagtggtagttactacagaaagcagagtcttaatggaagtggtgtcctgggttgtaaatttttgtgcagtgtgccagtacaacacccacaagcttgtgtcttatttatttatttattttaataatttagtttttttttatggaataaattattttaaaatgttgtgtttaatataggtgtagagaatctttgccagttcttcatgtgtctattcatcacgtattggttttgtacatggggtattacagagtgttgtgtagaccccccttgctctacagtgggtccttgtttatcacctgttttatatgtattactgtggatttcctagtatcaaccccctaattgttacttttccccatttccccctttttgggtaaccctaaatttgttttctaattttgtgagtcttttctgtttgttcacttggttcatgggcatcaattttatgatttcagcaataatggtgtttgtcttttttttttttttcctgacctactttgctcagtatgattacaacaagggccatgtacgttactgcagttagaattgtctcgttctttttcttaactaagtattatgccattgtggacacaccccacttctttatgcgtttgtctggttttggacattctgcctacttctggatcttggcttggggaagtggtgctgtagtgcacatttgggtgcaagtttcttttaaactgtgattgtctttgcttgtcctcttaggaaggggactgctgaaatgtgtctggcaactctgtttttcccattgaaaaacagtttcattctatggtctgttctggctttgacagtttatataccactggcaacgtaagcaggtccccttgctccaccttcactctagtattttctgtccatagacatttgaatgctgttctgaatgctgtgaggtgatgcctcactgtaatcttgatttgcatgtttcttatagtttgtgattgtctgcattagttcatgtacttttttaaagaaaataatgagtagtatctacattttgctattgtcttgatgaaattctgccctttgtaaagtgttttttttttttttttttttttttttttagaaaacttacttgcagcaaatttttgtaataggtatcttacagccaaactctccttgtgaatattagtccccttaaccacaggttttaaaaggcaaagaaaccagagatcaaattgccaacatctgttggattatcaaaaaagcaggagagttccagaaaaacatctacttctgctttattgactatgccaaagcctttgactgtgtggatcagaacaaactgtggaaaattcttgaagagatgagaataccagaccacctgacctgcctcatgagacatctgtatgcaggccaagaagcaacagttagaactgtacatacatggaacaacagactgcttccaaaatgggagaggagtgtgtcaaggatgtatattgtcaccctgcttatttaacttctatgcagagtacatcatgcaaaatgccaggctggatgaagcgcaagctggaatcaacactgctgggagaaatatcaataacctcagatatgcagatgacaccaccctatggcagaaagcaaagaggaactaaagagcctcttgatgaaagtgaaagaggagagtgaaaaagttggcttaaagctcaacattcagaaaacgaagatcatggcatccagtcccatcacttcatagcaaatagatggggaaacaatggaaacagtgacagactttattttggggggctcgaaaatcattgcagatggtgattgcagccatgaaattcaaacacgcttgctccttggaagaaaagttatgaccaacatagatagcatattagaaagcagagacattactttgccaacaaaggtccatctagtcaaagctatggtttttctagtagtcatgtatggatgtaagagttggactataaagaaagctgagagccaaagaattgatgcttttcaactgtggtgttggagaagactcttgagagtctcttggactgcaaggagatcaaacaagtccatcctaaagaaaatcagtcctgaattttccttggaaggattgatgctgaagctgaaattctagtactttggccacctgatgcaaagaactgactcattgaaaagaccttgatgctgggaaagactgaaggtgggaggagaaggagatgccagaggatgagatggtttgatggcatcaccaactggatggacaggagtttgagtaagctccgggagttggtgatggacagggaagcctggtgtgctgcaggccatggggttgcaaagtgtcagacacaactgagcgactgaactgaactgaactgagtcactcaatcatgtccgagtctttgcacccagggattgagcatgttaggcttccctgtccttcactgttacccaaaattttctcaaactcgtgtccgttgcatcgataatgccgtctaacccacctcatcctctgttgcccccttttcctcctgctgtcaatcattcccagcatcagagtctttttcagtgagttggctctttacatcaggtggccgtgtattggagcttcagattcattccttctaatgattattcatggttgatttcctttttagaattgactggtgtgatctccttgctttccaagagactctcaagagtcttttccagcaccagagttggaaaccgtcaattctttggtgctcagccttctttatagtccaactctcacatctgtacatgattactggattaaaaaatccatagttttgactgtatgaaccttttgtggcaaagtgacatctctgctttttgatatgctgtctaggtttattgtagcctttcttccaaggaccaggaatttttaaatttcatggcagctcaccatctgcagtaattttggagcctaagaaaataaagtctgtcactgtttccattttgccccatctacttgccatgtaaagtaattacttgctagtaaagtaatgctcaaaattttccaagccaggcttcagcagtacgtgaaccgtgaactccctgatgttcaagctggttttagaaaaggcagaggaaccagagatcaaattgccaacatccgttggatcatggaaaaagcaagagagttccagaaaaacatctatttctgctttattgactatgccaaagcctttgactgtgtggttcacaataaactgtgggaaattctgaaagagatgggaataccagaccacctgacctgcctcttgagaaatctgtatgcaggtcaggaagcaacagttagaactggacatggaacaacagactggttccaaataggaaaaggactacgtcaaggctgtatattgtcaccctgcttatttaacttctatacagagtacatcttgagaaacgctggactggaagaaacacaagctggaatcaagattgccgggagaaatatcaataacctcagatatgcagatgacaccacccttatggcagaaagtgaagaggagctaaaaagcctcttgatgaaagtgaaagaggagaatgaaaaagttggcttaaagctcaacattcagaaaacgaagatcatggcatccggtcccatcacttcatgggaaatagatggggaaacagtagaaagagtgtcagactttattttttgggctccaaaatcactgcagatggtgactgcagccatgaaataataagacgcttactccttggaagaaaagttatgaccaacctagatagtatattcaaaaccagagacattactttgccgactaaggtccgcctagtcaaggctatggtttttcctgtgtcatgtatggatgtgagagttggaatgtgaagaaggctgagcgccgaagaattgatgcttgtgaactgtggtgttggagaagattcttgagagtcccttggactgcaaggagatccaaccagtccattctgaaggagatcaaccctgggatttctttggaaggaatgatgctaaagctgaagctccagtactttggccacatcatgcgaagagttgactcattggaaaaaactctgatgctgggagggattgggggcaggaggagaaggggacgacagaggatgagatggctggatcgcatcacggactcaatggacgtgggtctgagtgaactctgggggatggtgatggacagggaggcctggcgtgctgcgattcatggggtcgcagagagttggacatgacttagcaactgaactgaacttgccatcaagtgatgggaccagatgctataatcttagttttctgaatgttgagttttaagccagctttttcactctactctttcactttcatcaagaggatctttagtgaccctttgctttctgccatagggaggtgtcatctgcatatctgaggttgttgatatttgtcctgacaatcttgatttcagcttgtgctttatctagcctggcatttcaaatgatgtactctgcgtagaagttcaataagcagggtgacagtatacagccttgacctactactttctcaatttgaaaccagtgcattgttccatttcccgttctaactcttgcttcttcacctgcatacaggtttcttaggagttaggtaacgtggtctggcattcccatctctttaagaattttccacagtttgttgtgattcacacagtcaagggttttagcttagtcaagtgaagcagatgtttttctggcatcccttgctttttctatgatccaagagatgttggcaatttgaaatgtgttcctctgccttttctaaatccagcttgtacatctggaagtctttggttcaatattgttgaatcctggatggaaggattttgagtgttaccttgctagcgtgtgagatgagtgcaattgtgtggtagtttgaacattctttggcattccctttctttgggattggaatgaaaactgaacttttccagtcctttgaccattgctgaaagtgaaagtgaagtcgctcagtcgtgtccgactctttgcgaccccatggactactgtagcctgccaggctcctctgtccatgggattctccaggcaagaatactggagtgggttgccattttcttctccaggggatcttcccaacccaggggtcgaacccaggtctcctgcattgcaggcagacgctttaacctctgagccaccagggaagctgagtttcccagatttgcttgcatattgagtgcagcactttaacagcattatcttttaggtttttgaaatagctcaactggaattctgtcaactccatgatttgtttgtagtatgattcctagggacaattgacttcatgctccagaatgtctgtctctagggagtgagcacagcattgtggttatctgggtcatgaagacccttttcttttttttaaacagttcttctgtgtattcctgccacctcttcttagtatctgttgcttctgttaggtccataaaatttctgtcccttattgtgctaagctttgcatgaaatgttcccttgatgtctctaattttcttgaagagatctccatagttttccccattctattttttttttttttgcggtttctttgcattgttcagttaagaaggctttcttgttggatcttgctattctttggcactctgcattcagatgagtatatctttccttttctcctttcccttttgcttctcttttttttcccagctatttatagggcctcctcaaacaaccgttttgccttgttgcatttcttttaagttgctgttgcagacgatggccacaaggcagcagcatttctgcacagcccagcttgacttcctctgcaaacagagcttcagtggaagttgtggtggggagtataaattagcctgtaatgtgccagctgcaacaccctgatgcttgggtctcgtcacttcttggtaatgcgtcattttgcttggagtcacacgacatcaaatgatacatgagttgtatgtgtacagaacttgtacgtttacacatatacatatatagagagagcctcattattttcccatagctgttattccacaaagtctagtagagctcctgtcatatacctgtttccttattgattatgtatgcataagtaatagtttctatttgttaatctcagcctcctaatttgtctctttcctgcatctttcccctttgttagatataattttattttctaatcttgtgagtctgttacttttgagtcaactggtttcttgatattaatttttatattctacctatagagtgggttcgatccctggctctgatccctagaagggatcctctggagaagggaatggctactcactccagtgttcttgcctggggctgcaaagaatcggacacaactgaacaactaacagtttcacataagtgatagcatatgatatctgtacttttgttctgagttacctctctcatcttgcttagaactagttccatgtaggttcccgccactggtgttatttcattccatttcacggctgagatgtgttccatagtggacgtgcagcagttcctctttgtgaactcattctcgatggacgctttgtttcgtttccaggtttttgctgttgcagctgtggccctcagcagctttagagcatgtttctttttgaattttggttttttcctgatattctcttaagcgtttgatgcagggtcataggtagctcttgtttttgcttccagaccctgcacgctcttctgtgtagagacttagcggttccatcccaccagcaccacaggaggctgtctctccctaggccctctccaccaagtgctctctgaggctcactgatgatggcctgtcagacgggtgagttgagtcctggttgtttggatttgtagaccgcgtgatttgggcattttgtgcattatcacacgggttcttttttgttttaatggttgtaagaaaatctgcttgttgatgttggctccttgaaagtggaccatatgttgaattttttttattaactttcatttgttagatatgcacttatgcaatgattgaccaaagctgttgtttgcaagcgtctgaatgtaatgggaattcttgttttgggtggtgggagtgtattctttcgtgaggaaggcgttatgagatgcgttaattgaagagacacactgggcaacatcgggccctgtcctgagccttcctttagaatggcagctgggtagaattgttcctgaggttacgtttatgttggtgttgtgacttgtgtttaacgatggattttgaagactgtttaggcagcaagggaaataggtttataggttacaggctttaggtctggttctattccctccagaatttttcctgttctttttgtcactaagcaccttcatttttcctttagctcactgtgacccaggcctacagatgaattcgggctatatctcaccctgatgctcatataacccagtgtaactaggagtttcccattggagacttaccaacctgttatttttccgggaagaaactagcttaccataggtgatttccagtgcctagtccttgcttcgtccataataccgctggggtcttaccattgcaataagggaccattttataacaaaggaagggacacgtagtggttaactttaaaactgatagctgaacagaactgtggtagatttctgtctctgcatatgtattttgtgtgtatacggttgtgaagatcatttttactcttgctagctcaaacttattaatgtatatgtacgtatgtttgggtttatttcaagtcctgccttgttctaaaaggatcaaggtaacttctcccttctttccatcccatcacatgaaatagaattagtatgtatgaaccactttgtgagtaatgcagctcatttaatgagccttgatttggaaattagaggacaggagaggacatcacaggatgtgggtcacaaagggactagaactgggaaccagctggtgtaaagttggaaagagaatcatggtgatgatggaggtgaccaagctcccacttgcttccagaggggatttaatgcttccccttcagcaaagccctgacgccgtgaagaaagaacttggcggcgtccctctgactgtcagaaatctcctttctcctcctgggctgggttactggttgtaggattgttgggatcagcgaggtggcaggcctgcaagactgctaaagattgtgagaagtgactttgtgatgatctttaaaaataatacttttattctgaaagttcaagtgcagtttaacattaatcgaagctgtcaggacaacctaaaatgtctcctctttcaagaaagctgattttcttccctcagctgaaaactgagtgattaattagcctgtcattatcaaagaagatgataatgttagtagataactgcatttcctgttaagtggattaccttctgtatcccatgtggagttcacgtatgtactttagaaatacattcatctttaaaccaagtcactgctgttaaagctgcgtggtgagattttaagctttttcttgatacttaacttggaaaagtcagctcagagcctttctgtcttaatgggcatcttaaggcaggttcttttggtgtcctgattctccaccccagttcttgccaacccctctgcccctcagcaaatgtgctgacacacagacttgtccccagcagagtcggttcctctcatccacatgtgtgcccgcgttcaggcagtccagctgacgtgtgcccggttatgaaagtcccaaacactccagttactgctccctttttctcttggttgcttttgggcattttggttacctcctctttcaccttcaccatttgaacttcagactgtaggtacctgagatgacctttccttcttcctaaaatcccgttattcctaatttataacggtttcagctcaactttaagtcccctctcagcacgttcacacagtaggtgttcttcctggcttcatcttcctgaagcagtggctcagatctggactggttgctcctgcggcctcccgctcagccgccatcctgggatctcccttaaccaccatccctcacctctcctgtgatgatttccttactttcccagatcctggattttttttttttctctcttgagttatgccttcattttggtggaacatctccttcaattgcttcacgaggaagggtttctcggcaggaatctttgagtccgtggatgtgtggaacagtaaggacctaacagaagcagaagagattaaaaagaggtggcaagaatacacagaagaactgtacacacatagaaaggtgttaacgacctggaaaactgtgatggtgtggtcactcacctagggctagacgtcgtggaggaggatgtcaggtgggcctcaggaagcattactgtgtcgaggtgatggaattccagccgagctgttcatatctgaaatcctaaaagatgatgctgttaaggtgcttcactccatatactcgcaaatttggaaaatgaagcagtggccacaggactggaaaaggtcagttttcattccaatcccaagaaagggcaatgctgaagaattcctgtacagttgtgctcatttcatgtactagcaaggttatgcccagactccttcaagctccgtttcagcagtacatgaactgaaaacagatgtacacgctgggtttcaaagaggcagaggaaccagagatcaaattgccatcatttgttggatcgtggagaaagcaagagaattccagaaaaacacttacttctgcttcattggctatatagtaaagcctttgactgtgtggactgcaacaagctgtggaaaatttttaaagagatgggaaaaccagaccaccttacctgcctcctgagaaatcagtgtacaggtcaagaagcagcagttagaaccggacatactgactggctcaaaatagggaaaagagtatggcaaggctatatattgtcaccctgtattcagagtacatcatgtaaaatgctgggctggatgaatcacaagctggaatcaagattgccacaataacctcagatatgcagataataccactttaatcacagaaattgaagaggagctaaagagccttttgatggagatgaaagaggagagtgaaaaaactggcttgaaactcaacatttaaacaactgagaatatggcatccagtcccatcccttgatggcaaaatagaaagggaaaaagtgaagcagtgatggattttattttcttgggctccaaaatcactgttgacgatgactgcagccatgaaaataaaagatgcttgctccttggaaggaaagctatggcaaacttagtgtattgaaaagcagagatatcactttgctgataaaggtatgtatggtcaaagctatggtttttccagtagtcatgtaaggatgtgagaggtggaccataaaaaaaactgaccactgaagaattgatgctttcaaattgtggtgctagagaagactcttgagagagtcccttggactgcaaggagatcagtctaatcaacccaaaaggaaatcagtccaaaaaggaaatttgaatattcctcggaaggactgatgctggagttgaaacttcaatactttggccacctgatgcgatgagccaactcattggaaaagaccctgatgctgggaaagactgaaggcaaaaggagaagagagaggcagaggatgagatgttatcatcaccaactcaatggagatgaatttgagcaaactccaggaggtagtggaggacagaggagcctggcatgctacagtccatggggtcgcagagtcagacacaacttagtgactgaacggcaacagcaatatctgaaaatgcccttattaggccctcgggtttgattgataggcctaatgtggagtttagcttgaaattaattttcccttaaaaatttgaaggcattgtgtcttccaccttcagttttgctgtcgagaatttctagtgttgtgctattcttgatctttagcttgaagcctttttttcctccgtggaagcgtgtgccagctcctttttaatcttcagttttctgaagttttacacttctccctccagagataagagttgcaacaaattttcatggctttgggggttctatagcgcaaattggattgcttcttgacttgctactgctttctttcttgggcatacttttcagtttcaaatgatttttttttcttttttctgcagcctgcttctctctttctcttgcccttgagtcttctaagaaaatgaccataaaaactttactgtgattttagtgaggtgtttggcggggggaagcagagccctccactcctctctctttgcctggaaggctacccatttgctcatcacccagctctgccgtggatttctgcctccactccatcgtggagacaaccccttgcccccagaaagactactcacaagctcttgtcctcaaaccccaccttcgtgggctctgtccgcagcatttgctcatcaagcaaaagtactcggattgattacttcttttccccccagtctaatccactagcaagacatgtgcctaaaatatagcttcaatgtatcgttgcccttaggtatctagtccagtgcctggcacacaggaggcattcactggtacatgggcagatgagtgatgtcaataggaagccaggaaaattgttgaaattgtggactctcttcacatgttctgaaagacagtctttgaaagtaaaggcagggtgactgttctagattaaaagatattttataaaggcctggttacaagtgctatacaaaattcttgattggattccattttttttttttttaacttaaagctagctagaaaggataccgggcttctcacgtggtgctagtcataaagaaccccctgccagtgcaggagacttaagagatgtgggttcaatccctgggtcgggacgatcccctggaggagagcatggcaacccactccagtattcttgcctggagaatcgcatggacagaggagcctggtgggctacagtccatgggttgtaaagagttggtcacaactgagtggacttagcacataaaggatactattgggacatttggggaaacttgatggattataggtaatgttgtatcaatggttgttatgattatgtgggaggatgtccttgtgtttggaaaatacaagttgagagcttttgggatgatgtgttatgatacctgcaacttgtttttcacatggttcaaaagaaaaaaaaaagcttatctctagaaggaagaagggagaaaaaaaagtagcacaaagttacccatgcgtgaatctagctgagtggaatgtgcgttttcattttactgttctgtctattttactgtaggtttgaaaatttttctaaataaaaaatttaaaaaatttagaaaaaaatcaacagtggagaagaatttaaggaaaagatatttcagggctatttgtaagccccaaaatgctgaaattaattttgaagcatgatgttaaatataataaagcctaaggataatatgtatgtctatctgtgtgtgtatagttaatcaaaccaagtagaattaaggcctttctggaaaagttacctctgaaaaatttggcctgaaagcctgtgactcgcccaccagggggcagtgcaggagcgccattctgtgcactgctgagcgccgtgggtttcccccacataactgtttccacaagagggcgctcttctctgcacaaaacattttcaggattcttagaccactttaatagagaatgtggatggttacactgcttcctgtttctttcttcccactccgctctgcttctgagttctgtggatttttgcctcgactcctccgcttcgtggagtgatttcacggaagtgtctgggtaagaggggtgcggatccgctctcctatgtatgcctcaaaggccaagagtgcatttgtctactcctaccccaggaattcagtctttttattacaaactgccaagtcatggtcctactgcagttcgtctttagatttcctaggatgtgttgaaattctgggaattccactcagcagttttacctctcctaaagctgtgatgtggctccttactgagtgattcagatatatatagctcagacggtaaagaatccacttgcagtgcaagagacacaggtttgatccctgagtcggaaagatcccctggagaagggaattataacccactccagtgttcttgcccagagaatcccatgaggtggttgacttagaaggactgtctttctgtgcagttaaccaagaaagatggcttagtgtaaatgttgtagaaagttacccagcagattaaatggttagcctgtggtgagtgagtgttctttcatttaacatgtactcaatgcctgcagaaccagattgcactactggactagaattaaaagccacaagtcagactccaaagctgattctaataggcaaatggggtcgagtagccccaggcaaatttagcagggcgctcagaagtagtgctgacttcagatataagcaaaagtgctctggtaggggcaagagacggcaatggcagcccactccagtactcttgcttggaaaatcccatggacagaggagcctggtaggcagtcaatggggtcgctaagagtcggacacgactgagcaagttcattttcactttttactttcgtgcattggagaaggaaatggtaacccactccagtgttcttgcctggagaatcccagggacgggggagcctggtgggctgccgtctatggggtcacacagagtcggacacgactgaagcgacttagcagcagcaggggcaagagggagggatgttacttgctctgtcttggctcaaaacattgagtcctgtctagagatcctccaaggccaaacttagcatcaggataccaccagcttgctgtgaccttccccaagtgagcgaagtgcccttcatgtgttgtcgtctgtccagttcagacctctgttatacgcgctattcgtggtggttatttgcatgctctcctctcctgaggacagaggctgattactcataggttggtgtattttctccactctggttccattctcgtccagtgcatgcctttttcccctctgggtgctccctttttccctcttttttgaagtctttttctcaaatacaatgacatagacttgctaatatcttaaaaagtaaagcaaagaaaagtaaccctcactgagtgccttttttgtgttggacacttcactgtgttaggtgtttcataagcatcttctctgttaatcttgttcctctaacaaacttggcgagcttcttcgctgttcaagtctttgcactcactgtttcctttcctgggaacctgtttttcctcaagtgctcaagaaggcggtttccttttctcataacacacgtgtagtttataggccgttcttctgtggctgagtttactaggctggtgaccccactttcctcccagtggtgggtggggtcttggggaggaactcactgaggccagcctgaggacttggacctcctccctctcgctgggtccctgcccttccagctgctcgtccagtgcatcctggtcactggatgtcttcttttagtttactaatttattataattgctctgtttcttcctcatgataactgatactttcatctagactctatttctccctagaagacgagggattcagtattttggttagttttccccttaagcatgtgctaacccatcatctttttttctttttaaattaacataattgtatttatttatttattttggccgctctgtgtggcatgcaggatcttagttccctgaccaggaatcgaacctatgccccttgcagtggaatcacagtcttaaccactggatagccagggaagtccctaacctatcatgttttaacatacagttttgttctttataatctgaaagtctagatcatacctttgtaaacagatatatacttaattaaaaaactcatccgtttttacagctctagtattaaaatggtatagccaagttctcatcttctgttatggcgcttcccaggtggcgcagtcgtagagtcaagagatgcgcgttcaatccctagttcaggaagattccctggagtaggagatgccagcccactccagtgttcttgcctggagaatccccatggacagaggagcctagtgggctgcagcccgtgggtcacaaagagtcggacacgcctgagcacatgagtgtcttctgttatgcctctcttctatttccaaccttcaaggctcaatttaagtcctaagtcctctgaggttttctgcacctttagtacctaacatcaatctttcctgctctcagtacctatacttcagtttggccattaatctaaagaatcttatttgttatttaattgctttgtctgtctgtgtcttatgtgactgatgagatggttagatgccagttgatggtggcaatgtgttcttaatttttgcagtgttgaaaaagagtcactttaaaggacttttttgaagcaaaatattttaaatatatttttcctaatggagttttacgtattttcttaaacacagtataagaattattcatctggtttaggttttctgaaaagcattttctttgactataggatgattatttttctgtatttttagtattcattttattctcagtattcattgaagaagactaatgtgttcaggtataatgctccaaggaagtgtttcagaaaagaaagaatattaattatttcctgtagcttatctataaaaagccattttggaaagtacattcattttaattttttattgggactttgcggttgatttttacagttgctgtattaaagtcatttttagttttctacagaaaatgtataaaggtttatttgataaaatatcaatattttaatagctataattgtctaagcattcctaattatgtgttgagctttgagcttcttaccagagctgcagtttcctggcaaagtttaaacatcagtctccaatcagttaggttaatctctgtataatataattaaattcatctgacctggttactgggtacattttaaatatcagactgctaatcatgacaccacgacgaatatttcaattttaaagttgaccttttagaatcagcctttctttaatctgccagttgtacttaacagaaatatttcttttaaaaagtaacctgacttaattcatgtatttaatgagaaaaaacccaaagttattataaaatgtgtataaggcaagctgtcttaaaaaaactaatgacatttctttttctttatagagatacttcctagttgggagcaatcatgcagaaacaaaataccgtgttttgaaaattgatagaacagaaccaaaagatttggttatcattgatgacagggtaagtatcttgacaacctgaatacagacagaaacctttgtattccttgtttaatggatatgaaatatccttatagcttctagtgatgtatacttttttttaaatcatacatctaaaaatgacagtttttcatggttggctagaatttttaatctctaatctggtttctaaaattactgaagtcagaaagtttgccagaattacactttgcccttcattttgattttttatgaagcaaacactttggataagataatgaatatattttcttaaaggggtaccattttaaggatctgatataactctcaatattgcagccaccgaagagattatttcttcttcttctttgatatgaagctccttgaagtcaaaaaggacttctctactgcagacttgttattatactgctaaaagtgattggtagggtcacttctgatgacttgctagagaaatgttaagctgctattatccacatgtcatattattcagagttgggacttaattcaggtggcacaaaaatatgaggcttttagtcaaaagagaaatatactaaggtggaattgaaccattaattttaactctcaggtgagagcagctaacactttgtgttgaagttcctgtctgaatatttctgaatctgtgtggattcctggtttttcaaaggtatcaatagctgtagtttggaactcattttcactaagctctttggaaaactaatttctatggtataataattttggatatgttgtattttgtgacttctcttactcttgggtatcatggtcctccttcacccacacacataccatctggctatatttattaatatgatgtaatgatacttggctttacttgggggtacgagtggctgattggggatctctttgggaatcttataaaagctatgggccttctcacaaaaatacacgtatgcatgtataaccaaaactttgcatacagttttaaggagtttatagatttcttgaaacttgtctgtagattcctcatacctctgaatctctgatccagaagataaggttttggtataccttttttaagtacagcaatgtgtgatccagtaaccacccttaattaactgctaatgttaaaaaatttgttggctttttagaattgtagcttagtcctgcacttttatatacttctctgtgaaatagctaatgatgtaaagctgtaggaaacttttaattttcagaggtaaataaataatctaaaaatcaaacacaatcttacagattaatttgcttatttctagcatgtatatactcaacaagaagtgcgagaacttcttgggcgcttggatctaggaaacaggacaaagatgggacagaaaggctcctctgggttatttcgagctgtttcagcttttggcgttgtaggtaagaaagatgcctccctctttcaacctcttttttttaccccccatatgtagactacttgaagatagtttgcaaggctcatacttatataggtttgtaaatgtgacccaccttctgggtctttggttatttaaaaatgaatcatctatcaaccaggtatcaaacagccattatataatatctgctatatgcccaggactgtgctcagattcatataggatatgaacaaatgtagcgatggtttagacctctaaggagtctggcttgtcaagaaatgaaaaagtgaaaattggcttggacttgtaaacatcagctggaaaaacggatacaggtaaaaccagcttttaaattagaggagtttctctcaaggacacactgcagtgtaaagtgtcacaagccccttctctgagtgacaactggtttcttactctcagagaaactttgttctctaaaatcacagtcggaaactttgctctttaaaagtgtgtcagtgagagaaaacatccccctgtcgcctggatgatctaagtcattttgacgcagagaggcagcctcggttggcaaggagagcgtggagcttcagataagggctttcgggacgcagccgactgcagctctattcactttattgctttctaggaaatgagaccccgagtctgcttcacattccagacctgatgtgtatctctttacattcagtcttgctctggtttgagcctcttcatttaaattttacctaatctctttcccaaatcctataatagcgcctttacttattcatgaacaagcatagaaatggccttggcctttaaaggagtccatggtccagcttgtgggcttttgggagatgccccgcagtgcctctggtgcgttgtccctcatgacagtgggtcagaaaacctatctttgctcctggattggtcccagggagtcttaggatgattggattggacgggggtggcacggaggggtggggggacaaaacccagggcccaggaaacaactccaggactggaatttggatcccagttgtgtagtcaatagtaaatgctggagattacataagaggtagacttcttagacctggagtggccaggaaagagttcctggagaagataagattcaggctggaccctggaggagaagcaagctgtggatggatgtggggaatggaggggagagctccaggaggggtgacggcagaagcaccagcatgaagatgcccacgggtcctggaatgctggcaggcggttggtgaggccagatcactggggccttggaagccaggcagagggcagttgggtttcagcttccttgttggcatagccatatttcaagtcttttattccacccccccaacacaaaattatctttctgcttcttaaacccgctgaactgtctgtaatagttactgagtggtgtctgtagatgttaacaaaattaatatggactgacctgtgctacatagtttcataatcttaggttcatttttctgattagcactctctatttggtgcatgtgtgcttgttgagacttggattatgcctattctgctgtgtttgaagtttgtttttctcagtgcgctctcaaagcccttcatgtggaatccctttaggtctgttttgtgtcttaggcggctgccagggaagggtgagagtggttggtatggttagtttcttctgcataggactggcgccttctgtgtaccttcttcttagtcttgacaattcccttgaggtttcatgtttaatggataacatgtgcatgttagtgtatgtcaggtgagttcatgtgtttcaattccatatattccatacatgttaaattccactctaagtgttacttaactcttagtcaaagaaaaaaaatctagaaataaaaaaagtgtcttaaatacattaggcttaatcagataaaaactcatttctttaaatgctaacactttattacaacttttgaaaaatgtaaatttcctaaggtatatgtaatattgaatgcctaattagtcagagttaaatattcaaaattgaatcttgcttgctaattaagtataatgagttgaagatcagttgtgggtgtgtgtgctaaattacttcggtcgtgtctgactctttgcgacctatgggctatagccacccaggctcctctgtccatggggttctccaggcaagaatactggagtgggttgccacgccctcctccaggggatcttcccgacccagggattgaagctgggtctcttctgtctcctgcactggcaggcgggttctttaccactagcgccacctgggaagcccgttgaactagattttaaaatagctgcccttgggtgttttggagttgtgttgggcagtttgctttttacattaagtggcctctaggtgctctcctgggctttgcaggtggtactagtggtaaagaacccgcctgccaatgcaggggatgtaggagagctgggttcgatccctgggttgggaagatccctgggaggagggcgtggcaaccccctccagtattcgtgcctggagaatcccatggaccaaggagcctgatgggctacagcccataggtcgcaaagaggtggacacgactgaagtgacttagcacgcatgcacgcatgcagatggtgtactgtgttactttaatggtactttgatcattcttcactgttctgggcatctttgcttttagcaatattccttgcctcattttaaatttattgataactaagcttgtaaaaccatagctttatcaatggcagcccacttcagtactcttgcctggaaaatcccatggatggaggagcctggtgggctgcagtccatggggttgcaaagagtcggacacgactgagcgacttcactttcccttttcactttcatgcattggagaaggaaatggcaacccactccagtgttcttgcctggagaatcccagggatgggggagcctggtgggctgccgtctatggggtcgcacagagtcggacacgactgaagcgatttagcagcagcaaccaagtttatagccaaataaatattcattttatacacagctattaataaactttggaggaggactgaagatattgctatgtttctcttaggtggcattcttagatattgtggtacatttctatcgcaatttgaggcccctttgagactctccttggatggtgaagtgactataaggttgacttgccagtaaagtgacacggtaatatactaagtaaacatttatcacttttgtggacatgcactttatttattctaattcaaccatgcttagaatgtttgaagagtaaataaggacttaataaaaggctatgatttatctagtattggatagactaatgagggctactgaaatagaaaaatgcaaattaagggcaactgaaatagcaaaacacaaaatacttaaccttggaaatagaagtagtctgattgtcagaataagacacgtgaaaggacttgaatggttgtcttctgttctgcggctgaagtattttctctctcaattttttcagcatgcacaatttgtgaatagtatttttgttggactgttttgaactgttaccatggttaatctaattcacagtctataagaatctaaagctatgcttctcagttgtctacagtaaaggaccagtcttttttccagcaatgtgtcaagaccaacacaaaagcctactgggcgtaacttgtcatcatcagcttggagcacatgtgactcaccacataagttcctaatctccaaactagtcttgtctgttcaaggcaggttcgttgatgatgagctctgatgttcctgaacccttcctttcagtttgtttgcatttcttttcttggactgctgctgaaagctcacggaccatctctggtccctagacatggattgagcctgccctgtagctgtggtgcccatttatgacttgttcctttgtggtttgacagccaggaggtttgggagaccaccagataggtcgtgagcatcactcacccagtttttctttttgttgtttttaagctcctgcaaatctgcagggtcagaaaatccatcagtgggtgccaggtgctgggggtgggaagaggggatggacatcagaggagcctgagggggtgtttttggagtgatgggaatattatgttgacctcagcagtggttgcaagactgtgtgaaaatgaaaagcgttagtcgctctcacccagttttaatgtggtcctgggacatttgggtggaggcctgtaatccttacttctctcggtgctctgaccatccagctcctttggatatatgtcctttttctgcctgtgtcaccgtgagaggatacgcttgtaagctactggtaggctgaaggggagtggtagagtgtcttcatagtagaccaagcgatgggcttggttgttctttaaagcagcacccttagaaacagatggcagagtcaagagaaagggaaaatggcaaggcacttgggcctcgactcgtgaggggatgatagagttggtgttagggtgtcactttggtcccttgtggtttttgatatgtctctgtcagagtgcagagaggctctgaagatagtgaccagctgacaaggtgaccgaggaggatactgccctcttccctgctggtgagcttgtgggatcctctccagcccccagaactctacaccactccatcctctcacgctgcccctttttatttactttgtttggtgtccatcacaaatgacacagccttttctacttggagaaaaagaagtcacttttgcatgatgactgttgtctaggcttctgggaagaacttggggaaattggtctgggatcagaagtgcatagaatgaagatgaaaaaacttgtcctggtttttcacgtgttaaaatgatgatgaggctgacttttgacagaggtctgtgccagactgaagccttttaactgttggctaaatttgatgggaacctttaaaaaaaaaagagtgacatttccaattggtagtaaaaagaaaataatctcataatatgcaaaaagcacttacgctggtagagagtgttcttttgtacagtatatttactttcttaaaaatataaagggatatgtaggatgaaatagtctagaattgaaaacataaaattcaattggaatgcaggttgggggaaattattacacagaggtttttttccttatgtaaaaaatacatagcaagaacaaaaggaaaactgatttgtcttggaaatatttattacttaaactcaattagattccctttttgggtgtttatgctgcttccaggacccttgattttgtaggttttggccttcttaaaggataactgcttcctaatttgcttttaatgacattgacattaagctttatttcctattttatgtcctttagctttagtcagggaattttgggctagtctacaagtgaaagtagccaaacatgacatgaaactcagtcatgtttgactctttgtgaccctatggactgtagcccaccaggctcctatgtccgtggaattctccataatactggggagtgcattgccatttccctctagtggggaggagcacaaatgaacgtttttaaaaaaatgtgctttgtgggtctccaaaatattttaatagcagtaatgtggttcgttaaaatccttatggtatctttctcttaagtattttggcttatttatattagtacgttcaattactaatctcaagaataacacggcacagactatgggtatttgccaattctagagcaaaaatttatagccccaagattctccctcagactttatagagtgcaacactccagagagagagaaagagggcaagtacaacacgcgcacacaagaaagttagttttaaaaaacattaggctgtatacgtaaggtccttggttgagtttttctttcagggctttgaataagttacgccatagccttctggcctccattgtttctggtaggaagtcaactgtgtgtgaccgtttctgactcccgcagtgagtgagctggggtgacaggatccggtatctgtactgggtgggatagagcctcactctgcaagtaggagccgggtagaagaaaggagcccccggtttcaggtgtgcttgcctggaataaagaatttgcagcacagagctggagggggtgagaaacgctggtggcctgcaccccctgagcagaggccggggccctagactgagagctggggaggggagcgggacgcctgctgggagtagacacccatcacactgaattgggagaagggcgtaggagggaagcaagctgtggttcagatgccacagactggctggtctttccacgatctagatttttttgaataaatgtttctccatttgctgtatgccattaggagaatttccagaaactgtcagtgttttgtttttatgattttcaccagtcaatggcgagagggtctgctgagctcctcacatagctggttcagaagtgtgcccctctgcctccccccagccaccaagagaattagttttaacccccaaagcaaaagttgtgggagccagaacatttttaccccaagactgtatggtaactaatgtgtagttgggaatttagtgttactgaaccttaacacatacggtcttcctataatcaaattgttcagagtgatatttttaagtgagataaatatttctagagaataattctaaaacagctgaaaatttatatggttgtaaatcagagaaataataaagcaggaaatatgtcagagtctttttgccttttaaatatgtatctgaaagcattgctaaatgtaggaggtgtatttatctttctgttttgttgttgttgtgtaggttttgtcaggtttttagaaggctattatattgtgttaataaccaaaaggaggaagatggcagatgttggaggtcatgcaatatataagattgaagatacaaatatgatctatatacccaatgattctgtacggattagtcatcctgatgaagctaggtatgtactggtgcgaactgctgtttttgtatctatagaccaattggaaagcaaaatatagtcaatagattataaatcttaaaatgtaaatactggctcagaatgctacagcttttgttcaagagctattgaagacccatggtaattgatttgggcaagaatcaataatggctgctaaagccattaagtgagaggttattgttgacctactgtacttcatgaatatctcaatgtactgtactttgtgaatattttttattatttacaaagagaaaaaaatgacaaacatacttaaccaaatggtcaaacttggcatcaccagtaaggagacaaaactgacattatttgcctcttaatatgaagcagtggaaaggacaccaatagcctgcgtagtttccttactaaaattatttaaattgaatctaagcatgataaaaatatttaaattggataataaaataatcagacaaatccatatgtgggacttcctgtaagacagctggcccagacccttcaggaatgtcagtgtcgtgaaatacaggaagagctagagggttagattttagaataaccatgacaagtgcagcacttgaatttctgttggatcctggattgaaatatgtgcacagtgtgtacacacacaggcacagagctgtaaaggactttactggaatggttttatataaactatacactagggggtattggatcagtgttaaattttgggtgtatagtgacattgtggttatttaggagattgtccttgttcataatagatacataatattaagataaataatatttaggactgtcatcatgtctggttcttactgtaaatggtttagaaaaataaaatgtacttgtgtatttaaagagagaggatgtatgtatgtataaggagaaatatttaacagtgaattcaggtgaaggacatactgctattcattatactatttccccccaccccaatttttctatgcatttgaaagcttcaaaaagttgtttggggaaattattggaacctggggcgtatggggaaagactgttaataaataataaattgatagagaaaatgctagaattggtttgatattataaaggctcaaaatggaacaaagttagcatgtttataagtttttagggaaaatagcagcttaggttttaattacactttgtacgtttatagtgttgttctagaacatgaaccagaatttaaaggtgatgtggttttcttgcttaaaaccttgttagatagtggttttctgaaactttgtgacactatccttgatgtttggaagtggggtaaaaaacaattttgtttcggacaagagtaagagtttaccagataaagttgaattttgtcttatattaactgaaaacaattatatcttatgtagtttgagataaaattgacatataccactgtgtaagtttaatatgttcagcataatgatttgacttatatatattgtgaaatgatgaccacaatgtagttagcatccatcatctcataaagacacaataaaaagaagaacattttttttcctgtgatgagaacttttaggatctactctcttaactttcatatatattatagcagcagtaactgtagtcatcatattgttaactatagtaatcatttttttaaggtatctacgaatattccagaatgtggacctatccagcaatttttactttaggtaagtttgagcttatttttactctgtcagtctcttaaatgtttatattatttcctacagggtaaaaagagaatcagagaacacagtagtactttgattattctttttttaaaaaaatagccaaatcttttcatctgaaacaatataaatacaagtgttcttccttttaaaaatctaatttttgaaattttgaatggataaattaaatggtaattattcttactatgcaaaatcttttcattatgattttaaagaaatgcttttattttgtatttttttttaagtttcaagatatttatacttctgaatttttcaatattgtcatcatatctgaaacaggaaattttaaaattcctgcatcctttattcaaatgagaatggcaataataatttaaaattatacactgatcttttattttgtacagaagagcaaattagagattgaagaaattaaattacttactcctataggactggcaagaagcactctattaaaagtaattattgccagttctcaaatacacattttcatctagcacaccaaacagaaaatgtcacaaggtactaaatctagagattagcacataaacacacagttgttgaattaattaaaggcaaaactctaaaacattaacaaaacaaatattgaaaatcctgtccatttctgcaaattttttaaaatttttattggcatatagttgatctaccatattgtatgtgtttctgctgtacagcagcgcgagtcagctgtatggggggaggggatatatgtatctactcttttttttaaggttctttttccatataggccattacagagaattggtcacagatatagcaaacaaacttaagttgctaaggttaagtgaggagagaaataaattaggagattggaatggacatgcacacactattatatgtaaaatagacaactaataaggacttactgtatagcacagggatctctactcaatacactgtaatggcttattttgtaattttgaattacaaaaattaaatctgcattgtctatatagagggaggtgggagggggattcagggttgggggggacacatgtatacctgtggttggttcatgtcaatgaatggcaagaagcatcacaatattgtaaagtaattatcctccaattaaataacatttttaaaagtttatatatagagttgtaaccatttcacagttttcagttaacagtctagtaaaaattaggtaaaaataaactcaaaatagggagaacttttgcagtaccaacatattgttgttggcattgtaaattaataattttcctggagaggaatgaagcatcaagtatgtatgaaaatatatctgaagaaaataaatcaggagggaaaatattagtccctgtttgtaaaggcactagctgtacagatagcttctctatcacggcccaaacaagcaaaccaaccactgcagggacaacccaaatatggtgaattgaaaaataagcaagtgaattatagcagagcatcctgagagagcgttataccatcactgaagtgaccactatgtaggctaggtatacagcaagttattgggctgcatggaaaattctgtcacttacaatgtccaaagtaaaatgtagaacacacaattgcatatatcaatggacttgggtcataggactaagaagaggacccagagtgttgtagctgttggcattatgtactgttagggtgctttgcattattttaagtttatttttaaactcttaatatagttaaacatttatttatttatgaaataaagaaaagcatgtactatgtagagtggattatgtcttcatgatgtgaaactgaagaaagttaattaatttagcaatagtatagtgaagggcttctaaagaaataattttcacttccacaaatgtttactgaaagtgtatttccattgtagttgtctccatcatttgcttttcagccattattgctgaattgtttatagtctttctgaggtactactgaagctcagtggagctgagctgttaggggtgatctgcattctcatactgagttcttctcaagttattccacaagtaaaaaaatatgaggttaaagactttaaaaaaggttatattacattcttaaggttcagctaggataaatcagttgtcttaaataggaaaagttgattgttaaaagtaaaagcccagtttctcaccctgcccccagctttattgagatattaatggcatctataagtttaagtcatacaatgtcatggttagatacatggacgtagtacagaatgattaccgcagcgttggttaacaacttcatcccaaaacatagttgtgattttgtgtgtgtgtactgataacacttgatttactcccttaacacatttcaagcacataattcagtactgttaattacagttactgtgctatgcattagataaccagatcttatttatcttatggctaagagtttgtactctttgaccgatagttctccatttcccccagccactggcaactaccattttttaaatataccctacattttatttatctgttcctttgttaatttattaatctgttcatttgtggttgttgccacatctgggtattttgataaattctgtagtgagcatgggggtgcagatagctctttgagatggtgatcttttttcttttggatatataaccagaaatgggatttctggatcaaatggtagttctgtttttaatttttaaggaactgctattttattttccataatggctacaccaatttatgttcccaccagcagtgcaaagagttctattttctctacatccttgccaatcctgccgtttcttgttttaataatagccattctaataggtatgaagtgacatctcattgttgtcttgatttgcatttcccaatgtggtggtgagcatcttttcatgcattttttggctatttgtatgtcttctttggggaaatgtctattcaagtcgtttgcccattttaaaattggattatttgtttgtggttgagttgtatgagttccttatgtgttttggctgtcagcccattaacagttagatggtttgcaagtattttctcccattcagaaagttgcctttttattttgctcgctctttctctgtgcttttattttgatgtttcatttgtttgtttctgcttttgttgcttacacttttggtgtcatgtccaaaaataatatttgtgaagaccaatgtcaaggagcttttccctgtgttttcttttattagtttatagtttcaggtcttacatttaagtctttaatccactttgagtgaatttttgtcagtggtgtaagacaggggtccagtttcattcttctgcaggtgggttgtccagttttcctaacacgtttattgaagagactatcctttctccatttgtcttttggaaaacgggttgtcagtcactcagttgtgtccaattctttgagaccccatggactgtagcccgccaggctacactgttcatggaattctccaggcaagaatactggaataggtggccattcctttctccaggggatctttccaacccagggatcaaacccgggtctcctgcattgtactgcaggtggattctttactgtctgagccaccagggaagcccatccttcctcccctcatcgctttggctccctggtcaaatattagttgactgtatctgagtggttttatttcagggctctcaattctgttccattgctgtaggtgtcttttttttttttaatcttggtaacatgctgttttgttgctataactttgtaatgaagtttgaaatcaggaagtttgatgcctccagctttgttcttctttcttaagggtgctttgactattaggagtcttctgtggttccatacaaattttagaattgtttttttctattcctgtggaaaatggaattttgatacagattgtattgaatctgtagatggctttgggtagtatggttacttacacagtgttaattcttctgtttcacgaacactgggtttctcttgtggctcagatagtaaagaatccatctggaatgcagaagatctcagttcgatccctgggttgggaagatcccctggagaagggaaaggctacccactctggtattctggcctggagaattccatggactatatagtccatggagtcacaaagagttggacacaactgagcaactcctactcactctgtgaacactggatatctttccatttatttgtgtcttattcatttattttattcatgtcttttaattttcagtatacagatcttttacctctttggttaagtttattcctaaggtttttttatgctcttgtatatgggattgagaaaccaacttcttaatacagtttttatctctctgagatcagatgctaataaaattaatggctctatcaaacaaatgtggtacatttaaatttaacagagtaaataaaaatcaatttcagattatattaataaactaaagaagaaataataatgtgtgagaatctctgaagttgtaaccattttaaagtatgacaataatattttcaaatttgtataacttaagaaattctagatactgtctgaaattctgtgctaaaaatatatagcctaagatacttataaaagttgctgattttgtgcaaattttatttgcacagactgttataatttttttaatgacgtgcttctcaaacatgtttcactctagtggcttgtgttatttgcttattcttattttattactaaataagttatggtgccaccattagtaattaataaaattattttcattcataggtaaactagagtacagaccttgtataatactactagagtagatattatagcatttttaatagtccattcagatacatataaaagtatgactttgttatacaagactatgaagttagattaatttcagtgtgaagcacaacgtgcatatgcaaatcagtgaatgtaggttactaacattttattgtgtttttctagttatgcaaatgcctaagtcatgtaatgatttttaaatttccaattatattcatgatttactatgtttaaggtgcttatttgaacaacattgcttctgttgttggtgctaactaattcagttcataattaggtgctaactaatttagttcataggttttaattccttctgggagccaagattatgaaatatgttttgcttttctaattcttattaagctttcccttctcagttacagctatgatttgtcccactcacttcaatataatctcacagtcttgcgaatgcccctggagatgttaaagtcagaaaccacccagactcgccaggagagtttcgacatctttgaagatgaaggattgattacacagggtggaaacggtaggtggttttcagtacatccaatatatgttaatatgacatctatgaaacggcatctcattaaattcactcacatttctttcacatttctcctttcctatttgctgtttgtcctttcatgaagttgcttcagatatatgaattcatataaacaaattcatttttatagagatcatggtggtgctttagtcgctaagttgcatctgactcttgcaactccatggattgtagcctgccaggctccactgtccatgggattctccaggcaaaaatacctgagtggcttgtcatttccttctccaggggatcttcaattcctgacctaggaattgaacccgggtctcctgcattgcagacagattgtttactgcctgagctacgagggaagtccagagatcatgtatcaccaaattgatttcatttgtgggcaagccagaaaattgtatctgatgttttctagcaaaatttcatgcaccttttatagaatacattcaactttagtctttggctggagaattttctttttaaatattgaagaatacataccaccacctatttttcttcatagagaccaattgtgtatgagttgaattgtagaaaaaagttaccctgggttgcctgttgcagcctagacatttatgtatcatatctctaatactcataaaaaactactcagtaggtgtaatgctgctttcaaataaataaaggctaagtaggaggccgagacctagaggtcaagatcacaaggccagtgtccagaggaacccttgtggaagatcagaggctgttctgactttgactggtctcagcctgacccaccagtccctcctacagcctgcttctgtcaggactgttgtgaggttactgcaggacctgtgtgtgactagcctagggtgaccctggggatctgggactaaccagccacacagcagaatgggtacctttatccctagatttagggattggtctagcactctaaggccagagacattgccagagtgaatgttgtgaaggcattgcttcagatgtaaagtcaagacagtttagctgaattggccttactgtggaaacaaaaagtcagtagtgtctttgggtcccttcctcagtgccacttctgtcacagtgatgaagatgtgggtgcagaggtcgaaggtaagttccagaaggtttgtccttgcaggacactcaggaagaggctgtgctctgttagccttttgccagaagttctggtccactctaagaagactgagacttacttaaactgaatgccatctcagttaattgcctttgactcttgttcatttattagattgactatcacttgaactaaagcaaaaccctgtgcactctccctgccccaaaacgtctagatcacagaaatttgctatggtccatctgaattgtaatctgtgcccctcgaggcaggtggagggtaagataatgtgtacttgaatatttgtcacatcattccttctaaatactgtgcttagtaatagaaaagctaaaagcattagtaagtatgcattgtgtgtcatctcccatttgaatctgaatatccgtactgagatctgaattaagattccaaaagctacctaactttttactatcagtcgagcagttctacttgatagatatgaataaactgtgtattaggtttttatgactgccgtaagaaatttccacaaactcagtgacttaaaactatacacatttattatcttacagaagtcaaagtccaaaagagatcttggtggactagagttagagtgttggtaaggctccatttctttcttgagaccctaaggaaaaagccatttccttgccctttccatcttcaaagccagcaatggctggcggaggagtgcccacatgacatcactctgacacactcactgctgttcccctctttcacacacaatgcccatgtggttacagtgggccctcttggacaattcagaagagtctgcccatcttaattagcaaccttaattccatctgcagctttaatttctgattagcaaccttaattccatctgcagctttaatttctcattgccatgtgacataacttactcatgggttctggtgattagaacgtagatattttttctatggggaagggacgctactactacacaggggcaaactgataggaaagagaaagcgagggcaaaagtggtctgcgtaggtagaaaaggaaaataatacattttttaaaaagtctctaatgtgtcaggcagcatgttagtcactttgcatatattatattttttaaaaatctgaattatatctcggaggtgagtggtatcatcattttacagtttagaaaattgaggttctgagatgttatgtaacttgccaaaggtcacagagctggtaagtgacaaagacaggactcctatccattattcatgctcaatgtaatgtcattgaaggggcagagaaggcttactttttataaataaaaccaaagggcatttgtcacagtggatataaacactcttaacatacatgttttgaggagaaaaatagtattgattgtctctaagcataactgttataatcttttaacccattatctttttacttatttcttattttgtactttatataagttttgtaaaacttattgatatttagtaaattaatctggatatcctgaaatgatgcttgatgaaattaattttgtcatatcaaaaaagcttgatataataataactaccacttatggaattatgagtaagacacgagacttgttctgagcatttcatgtgcgttatcaacttgcctttacaacagtcacacggaaggggcacacatgagcaaatggggcactgaaataagtgacccgcttggccacacctgtcaccctgctggcgaggcagagctcagatgtggacccagcactgcgacaccagagccgtgctcccagtcactgctcctgctgtctgtcagcctcattcgtgtatttgtacgtgtgtgtccttattttcccagttgtttgcttttctctaggttaaaaactttcacagatcagaaaaatgtgttttttctttacctttgtacagaatcagcacagtgttctgagcaatgagatgagttatatccactgaaaacagcagtggtatttatcagacgttttgaaatcaaaaaacaaaagtttgagagcttaaaaatgaattgaatgtccaccaatttccttatcttcctgataccaactcttattttttcaggtgtatttgggatctctagtgagccttacatgaagtacgtgtggaacggtgaacttctagatataattaaaaatactgtccatcgtgactggctgctatacattattcatggattctgtgggcagtcaagtatccttttttaaaacattaagatacatattatttatgctataacagttcgtagaaagctgtatatgaattataagatcattacaattatctgtgcaccctgcagatagattacaatgacgcattctgggtggttgaaatacaaagagaaatgcagatatattatgtctgctgctgctgctgctgctaagtcgcttcagtcgtgtctgactctgtgcgaccccatagacggcagcccatcaggctcccctgtccagacaggtaaataacaagaaaatgctctgggcacagaaagtgctgtaggtagtaaatgtcattcttacctaagagcaggagcagaatcgctaacaggaggggaggatggggccaggctcataggaagagttttttttttttcataggaagagttgaacttggcttgacttgatcaagaagcaggccttggcagtgagactgtggattgggggagcaccgtgagtgtagagatggaaaagtttatgggagtgtacttgtggtttgtgtataaaatgcctgggaggtgcaatggggtaggaaggagatgagttagtggggagtcagactgccaatcaccagattactttggtggtcagatgaaggactttgggtttggtgctagaatttttgaaagtttttttcaagagggtaacatacaaattagtactgaggaagcttgggtgggtaaccattttcaaagtgtgttggtcactccattgtgtcccactatttgtgaccctgtggactgtagccctccaggctcctattctccaggcaagactggagaggattgccatttcctcctgcagcatatcttcccaacccagggatcaaacctgggtctcctgcgttgctggtagattctttaccatctgatccaccctagaccaagagacatgcattaggacaaggttgcagtggttcaggagtaatgtaatgaagatctggattgggaagagtcataatagattaaatagacatagattgagcttggtgttaagctggtaaatcaatcttataaatatcatttgtcgttttatttgatttctaggtatattggatgtgttcttatgaggcttcagaaggcaatgtttactttttagaagtggtgttaagttttttcctgccccttttagagatcctgaagaacatttgtgcacctagcatgctttctggttgacagtcttcctcgtgtcttaggtttgttaaaaacttagagggaacactttaaaggagaggtggttttgagaccactgagtggatggatgtgattaaccaataatgtgctttcttgtaccagaacattgacaggagtggagtcagggagtcaaagggtagagttggagaggttggccttggagaagacctgatttgcctcctttgtggcaaatgaaggtgaggagaggctagatgaagatgcagaggacttttggaatgaatttggtgagatttatgtgttacatgtaaaatggcttgttaccttatactcattttcaaccagtgagtggtattatctgcttgatcattcactgaataatgagatttgaccccgaattactatatatttttccaaaagtagaatcaacctggaaaaaccacagggtttccaccaccaaggactctaaagtgaaggtgctacagtttctaagggcagcttctaaaaagtaattctaaactgtcttttatttcttaagagctagctcaggcctggcatgtattaagtacaataaatggttgtttctttaaagtagtaaatagcaccatagattataattttaaagctcattagttggactgatgaatccagtcttccagttaacaagcatttaatgaattctggaatctatatgatggtaacagtcattgctgtttattgaacgtttgctataagccaggcacacattgcacacagtacctaacccagtcttcccaaccacctaataaaattggttactttttttttttttttttttgcacttacaccattttacagaagatgaaactgaggttcagaaagctaactgaggtgacaatattaattgaaactttattttggttaaacagttcccagtgttcagttttgcagttaggtgacaaatttgggtgctctcacggtattactactaactccattccctcagaattagctgttgcttcataatttaagcaccctgttaatggagaggtgctcagtttgataggtgtatggtctctgaagaacgaagagggattagttgtacctcttacattcttacctggctgcaaggagggaccacaggtcttcccttgaccaataaccctacatctggttaccatttcctctgaaattcatggaaaccactctttagtgaggttcagttttgccttaatacctgcatactttgaaagagcagttagacccagtgctgttgtgtttcttgggtggagctttttggtgttccttaacctactggacaaaatatatttaacgtagaatgattattttggttgggtgtgatggtcatgagtgctaaacagctttaactagatttcttagagctgttgatctatggacgacctgtgtatgtcactttaatagctagaagatccagtaagttcgctgggacccgttttctcaaaagaggtgcaaactgtgaggtaagattgctgctggcaatttaactttttatttcagctctggtgacagataaagcaaagtggagttttagaaggtggactgtcttagttcgggacattatcaagagaataatgaatcctctagagtctctgaaacttgtgaggaatatgactaacgtacaaatgttctgaaaaatcagctatcttagcattatgcaatgccttagggacttatgaaatgtctaatgttttggaggatgagccatttctgtaatagattttaaaatgcagtacatatttagtggagagactaaaatagcaaagcaccttcacccaaggaataaatggaggggagcgctctttggaaaagcatccttgatgagaaaactgagtaaagcaaggcctggaaaccctttactcacttccccctgctttagtttggcccaagacagactccttccgctcatccctagaaaaaaaccaacatattcatctactgttctgcctttggtcatgtagcatgcattgagtgtttcgtctctttctgcaacagacaactggagtcttacacagatgtgtgatcgagtagatagactgagcgagacattgggttttgatcctgccttaatatagcaacctttgttcttaaaatcatgtcaacaatgaacatagttataactgtcgctttaagaaaaaaagatgtacccatctgaatgcagagttccagagaatagcaaggagaaataagaaagccttcctcagcgatcattgcaaagaaataggggaaaacaatagaatgggaaaaactagagatctcttcaagaaaattagagataccaagggagcatttcatgcagagataggcacaataaaggacagaaatggtatggacctaacagaagcagaagatattaggaagaggtggcaagaatacacagaagaactatacaaaagaggtcttaatgacccagaaaaccacagtggtgtgatcactcagctagagccagacatcttagagtgtgaaatcaagtaggccttaagaagcattactatgaacaaaattagtgaaggtgatggaattcgagctgagctatttcaaatcttaaaagatgatgctgttaaagtgctgcactcaatatgccagcaaattaagtaaactcagtggtggccccaggactgaaaaagatcagttttcatcccagttgcaaagaacattcaaactgctgtacaattgcactcatttcacatgatagcaaagtaatgctcaaaatgctccaagcaaggcttcagcagtacatgaactaagaacttccagatgttcaagctggatttagaaaaggcagtgaaacagagatcaaattgccaacatcctttggatcatagaaaaagcaagagaattccaggaaaacatctacttaggcttcattgactatgctgaagcctttgattgtgtgaatcacaacaaactggaaaattgttaaagagatgggaataccagacctctttacctgcctcctatgaaacctgtattcaggtcaagaagcaacagttagaaccggatatggaacaacagactggttccaaactgggaaaggagtacatcaaagctgtatattgtcaccctgcttatttaacttatatgcagagtacatcatgcaaaatgccgggctggatgaagcacaagctgaaatcaagattgtgggagaaatatcaataaccacagatatgcagatgacaccatccttatggcagaaagcaaagaggaattaaagagtctcttgatgaaagtgaaagaggagagtgaaaaagcttgcttaaaactcaatagtcaaaacactaagatcatggcatctggtcccatcacttcatggcaaatagatggggaaacaatgaaaacagtgatagactttattttcttgggttccaaaatcattgcatatggtgactgtagccatgaaattaagagatgcttgctccttagaagaaaagctatgacaaatctagatagtgtgctaaaaagcagagacgttattttgccaagaaaagtccgtataatcaaagctatggtttttccagtagtcatgtatggatgtgatatttgggctattaagaaaagctgagcgccgaagaattgatgcttttgaactgtggtgttggagaagactcttgagagtcccctggactgcaaggagattaagccagtcaatcccaaaggaaatcagtcctgcatattcattggaagactaatgctgaggctgaaactctagtagtttggccacctgatgtgaagaagtgactcgttggaaaagaccctgatgctgggaaagattgaaggcaggagcagaaggggacaacagaggatgagatggttggatgacatcgccaactcaatggacatgagtttgtgcaagctccgggagctggtgatggacagggaagcctggtgagctgcagtccttggagtcacaaagagtctgatacgactgagcaactggacaagaacagagttttgcagctctgttatgtagttttggatatatcaagggtaattaaacaggcacgttattaatgcctctaaaattatcctttgttatatcctcgtatactttataagtaaagctgtgtcaaggtttttttttcttctgtccatcaggcattttatttgaatcttactttttgtcctttcattcctccttggtcttcagaattgaatttttatatttcactggtcttactaatctcctgtaatatcttgtaattgttttccttttctctccttctctgcactctattacctgtattattagctatttaatttgatttttccctcatctgttctctgctatttttaattgccttcctttattgcatcttaatgattttccttttttaatatgtgcatcaaatattgatcagcacttacctcttttaaaatatcctaagaataggaattggggtggggtgccatcgcctaagaataggaattatattttcattctgtacttgacattttttccatgaaaaaaattctgagaatataaaacacctgtaaatgcacctttctttccagggtgatgttgcaaatgaagtggaaactgaacaaatactctgcgatgcttctgtcatgtcttttactgcaggaagttattcttcttatgtacaagttagaggatcagttcccttatactggtcacaggacatttcaactatgatgcctaagccacctattacatgtgagtggaacagtcttttcaatagtaactctcctttacccacattagagagtaaattgctgcccacagaaatttcatacaagcatggagttttagtactgaaaagtagataatttagaatcaggactactgatattttttatgcaacaactttatatacatttatttttagttttggccactagaaaattatttatattttaaaatatgtaaatataattaattatattcagaaatgaaagaatcatttgaattcaataaatatatgaagaatgatacacttaagaggaatttgagacatgaaagtaccagaggatcaattgagttacatttctataaacattataaagtgaaacaagaccctgtgctgcttttattcttgctgtataattttcattctggtactgatttgttttttcttcccagtggatcaggcagatccatttgcccacgtggctgcccttcactttgaccagatgcttcagaggtttggctcgcccatcatcgtcttgaatttagtgaaggtatgacatgctctctgtttggttatgaaattcgatcacactggacaacatgaaggggcttaactagcctgctttaaaggaggagagggttgtgggttgatcgtgctgtgatgactcactgtgtctgaactgtttgaaccactgtcctttggcctcagagtccacgtgacctcttccctgggtaagttcagagactgtggtgggttttctaggaaagagagaaatgagcatgtctgtcttctaatttcctggggtgagctaggtatgggtgaaattctgcctcagtttccaggacatctgggagaaggaagcatggagatcaaacacccacaggctagccttgatagagtaacttaccttgacaatccagaagatccgctgggcaagataatatgtggtgataggatctaaggactaaattcagaaattggggtgcagttgtggctcaggaatcggtggacagagtggtgacctggtctcataattctgtgcttccatgtcagagtacaccgtctggtcagcatgtcttgtgtatatgagcaggcagccaggtcagagcctggcgtggagggtaggagaccaggtaggaaattgtatctgtgtctgttgcagccagatgaaatggaggaatctcattctgtggctaggaaaaccctgagtgtgaaaagcgagtgttttgcttattatgtctatggcaggtggccaacaccttctagtatctgagattattccgacaagttggttataaatatttgttgttgttgttcagtcatgtctgactctttgtgactccatggactgcagcacaccaggcttcccagtctttcactatctcccatagtttgctcaaactcaggtctgttgagtcagtgatagcattcaatcatctctcctctgtcacccccttctctgtcttcagtctttcccagcatcagggtcttgtccaaaagtcagctcttcatatcaggtggccaaagtattggagcttcaggttcagtccttccaatgaatattcaggactgatttccttcaggattgactggcttgatctcctttctgtcctagggactctcaagagtcttcttcaacaccacagttcaaaagcatcaacttttcagcgctcagcattctttatggtccaattctcacatctatacatgattactggaaaaaccatagctttgagtattcagacctttgtcagcaaagtgatgtctctgctttttaatacactttctaggtttgtcataacttttcttccaaggaacaagcatcttttaattttatggctgatgtcactgtctgcagtgattttgaagcccccaaagattaagtctgtcactgtttccattttttccccatttatttgccaagaagcagtaaagcatctgtctacaatgtatgagacccgggttcgagccctgagttgggaaaatcccctggagaaggaaatggcaatccactccagtactattgcctggaaaatcccatggacagaggagcctggtaggctacagtctatggggtcgcaaagagtcggacatgactgagcgacttcactctctcactctctcaatggaaccagatgccatgatcttagtgtttagactgttgagttttaagtcagctttttcactttcgtctttcaccttcatcaagaggctctttagttcttctttactttctgccattagggtggtgtcttttgcatatctgaggttttgatatttctcctggccatcttgattacagcttgagcttcattcagcctggcattttgcatgatgtattttgcatagactttaaataagcaggatgacaatatacagcctttacgtactcctttcctagtttgaaattggttctaactgttgcttcttaacctacatacatgtttcttaggaggcaggcagggtgatgtggcattcccatctctttaatattttccacagtttgttgtgacccacacagtcaaaggctttggcatagtcaataaagcagagtagatatttttctggaattccttatttttcctgtgatcttcagatgttggcaatttgatctctggttcctgtgccttttctaaatccagcttttacatttgaaaggtctaggttcaggtactgttgaaacctagcttgaaggattttgagcattaccttactaacatgtaaaatgagtacaattgtgtggtagtttgaacattctttggcatttttcttctttgggtttggaatgaaaactgaccttttccagtcctgtgggtactgctggattttccaaatttgttggcatattgagtgcagcactttaacagcatcatcttttaggatttgaaataactcagctggaattccatcacctccactagctttgttcatagtaatgcctcctaaggcctgcttgactttgcactccgggatgtctggctctaggtgagtgatcacaccatcatggttttccgggtcattaataatttttttgtacagctcttctgtgtgttttatcatctcttcttaatatcttctgcttctgttttattcatggtttctgtcctttattgtgcccatctttgcataaaatgttcccttggtatctctaattttcttgagatactggtctttcctattctgttgttttcctttatttcattgttcacttaagactttcatatctctccttgctattcttggaaacgctgcactcagatgggtatatctttctttttctcctttgcctttcacttctcttctcttctcagctctttgtaaggcctcctcagacaaccattttgccttttttgcatttctttctcttggtgatggttttggtcaccacctcctatacaatcttatgtccatagttttgtccatagttctttaggcactctatcagatctaatcccttgaatctatttgtcacttctactgtaagtgatttgatttaagtcatccttgaatggcccagtggttttccctactttcttcaagtctgaatgttgcaataaggagctcatgatctgagtcctagtcagctcccagtcttgtttttgctgactaaatgacctggataactgagatcattaattataataagcataattcaatttaattagaaaccaaggaatcctatgccattgaagccactgtttaacagttttgaagatttctcttgtgccaaggcaatcataaaaacagtccctgccttctctgggctcacagtcttaacaggagacggtaaagtgaggcagaggtaccaagacagggttacgatgctgggagagcttatagcgggagagaagtcttcctgaagaagtgatgagtcagtgcaatgcctctgaacgaagaactctttacaagaccaagaggaaagagagcagcaggcacaaaggccctgggacaggagggcataaggtgcatttgaggaagaagaggcctctctgactgggtctcagagaattgcaaggaggagagcctgttgtgagaagagactggagaggtagttacgccagacttatagagccttgtagggtgtgttaatgagtcaggtcttatcctgactttccaaaaccatcaaaggttttgtagagttgagaagatgttgatcagatttctgttttgagaagattatcctgatctcagtggattggtacagactaaagttgatgttggaagaccccataggctgttataattatccagaaaaggggtaactggccgcagctggggtggcatggcagaggtggggaggagtgcacacaggcagtagagccagtgatgagctgggtctgagatgagggagagggaggggtgagacctgactcccaggtccctggcccactcaggtgaatgggtggcgatgtcaggcactgagccagggaacacagactgtctgtgagggaaggcagtgagtgcggtttgaatgtgttgaggtttgagatggatggagtcctgtcaaaggagatggtaagtaggtggtcgctgtatgagatggaagctcaggagagaggtctgggctgagatgtgatatgatggcccatctgagtcctgtcgatatttgaagacatgggtgtggagaggatgcccaaccgagggtaccaagagagaagagtggcgagcctctggtcttgacttgagaacctccagctcctgatggccaggtagaacaggctgaatctgtaaaggcatcagaggagggacaaatgggaaagtaggaggtaaaccaggtgaatgctgtgctctgacagctaagaggaggcatgtttcatggggaagaaagcaagcagttgaccgtggcaaaggctgctggcgggccaggtaagatgaaaacggaaaatattctcattcatgttcccagcaccagggcactgagtgacctggactgagctgcaggaggactttttcccgcagttcagttcagtcgctcagtcgtgtccaactctttgcgaccccatggactgcaacacgcaaggcttccctgtccatcaccaactcctggaccttactcaagctcatgtccatcgagtcggtgatgccatccaaccatctcatcctctgttgttaccttcgtctgccttcagtcttgcccattgtcagggtcctttccagtgagtcaggtctttgcatcagggggccaaagtattggagcttcagcctcagcatcagtccttccaatgaatattcgggactgatttcccttaggatggactggctggatcctcacctagtgagaaatgtggaagagttggtgttttcatctggttgttgtttcttgaagagatcatgatgggttttaaagtgtttgggaaggatctatttgagatccttaaggaggggagagaatataggaaaaagaagggatggtcaggggcatcatgtatttgagaggaaaggaatctgaaacctggagggaggacttattttaatgggaggacagaatcataagggtatgtgtgtgtgtgtgtgtcagaggaggaaggtgatgaggaggggagccgtggacagtgaggcaggaagctttagtgcatgaattcaaaggtgtgtgtgtgtgtgtgtgtgagtcagaggaggaaggtggtgaggaagggagccgtggacagtgaggcaggaagctttagtgcatgaattcaaaggagcagggggtgtgtgtgtgttagaggaggaaggtggtgaggaagggagccgtggacagtgaggcaggaagctttagtgcatgaattcaaaggtgtgtgtgtgtgtgtgtgagtcagaggaggaaggtggtgaggaagggagccgtggacagtgaggcaggaagctttagtgcatgaattcaaaggagcagggtgtgtgtgtgttagaggaggaaggtggtgaggaggggagccgtggacagtgaggcaggaagctttagttcttcctttgtcactctttggcttaggaaattattggtctccctcaattagatgatgactgccaacacccaaaactcctgtaatattatatataatataataataatcagggattgactttgtaaaataaatcaagtattaaatacatcactttttagacttttgttcacatcagttcagaaatttcatctctcttgctgtcaactcagagtaatataagacaatagctggatgacccataacgtcagcctgatatcacacggtagctataagaaacaagaaaattcaagaagcaaaactctactaacaagaaccttcatgaacaattttctaataaatgtataggcaataagatattgtttgtatagaaataaattattgctgaagtactaaattaaaaagttatcactagaatataaatgtccatctaagttagtgaattttcttcatatattacagagtccttgtagtatagttaaaagctatggttaaatggagattcatgatgtatgaaataaactatttctctattaagtatgcaggttcaaaatataatatcagatacatgtggttataaagtgttcctgcccagatttctcaagtgaacatttacttcttaatatttaaatgccagtcaacagattttaaaattattgttgttcattatttcattgtcataaaaatcctgacaataatgagaaaatactttggagattaagttgctgttttgtagaatagaaaaaatgtttgattgtttttgtcatcagttactttattcataggatagaagaagatatgtattcagttcacttggaagaagtccatattaactagtcaaagtgtgtctgtgtgtgtgtgtagatatcaagggatagtcactccttgttctgcctctgtatgaagggtcgaaaatgcaatacctttccttgattttcctctttggccctgtgtgtggactgtctcctccctaccccttcccctccgtgtgtaagtctgagacactgcttgacaaaaatttcgcagcaatccttacactgtcagggctgctgctcagggttaataggaagccagccaagggcctgatgtcattatccatcagaggactttaatctgggggccttggatggctactgggaggatctctgaaccctttgaaatgatgtacaaagtcacttgcatatgtaaaactttcatctggttgttaaatgagtctgtgacccaaaggcagtcgactaaacaattcagtaacgaatccactatgggcagactgcataaagcatgctctttgcatagagatgatcccaagttgatgaaataaccttacttgtgcatctccttaaatgtcagatttgacataagaaattcacaaaccttttgtttctctagttggtttaaaatacttttgagaaaaattccaagtatgtaatttaattttgtcagatgtaaaaataagctaatgtttgttcattgaaaactgatttatcactggtcttaatcaacttgaattcctccatttgacatatacagttatgcaaaatagatatgttttctttcatttccttggtgattatctaattaaattcatgacagttgaaaagtaaccagcatggttgaaaacagcatagacctatcctgatgccagtaatagtccgtattgctgagttactttttatttgcatgtttgtttctgagttaagtcctgatcagaataataatacaaatggtctgttttgtattaatatttaccatgcgtcagatgctctgataagaaattacgatgtttcatctcctttaaacctcacattaatcctttaagggaggtgctgctgttacccatcttatagatgaggaattcagaaggcagagaatgagctccaagctcacagctgagtaataacacaccagccctgctgtgaatgggagaacgtgtctccccttgaatgggagacagtgtggtctctccggagctacagccggcgggagaggaggtggaccgctaagatgtagtcccattcgcgcctctcagcctcagtgcattcagccacagtgtaaaaggggaaggcaaggctgccttggctacctccaggggatcttatgagagtcatgtttaaaagcatatgaaggctatgaaaacgttctccgctctgccagtttggggattatccatccaagcccggttgatttctgtctggtccttagctggctggggcttgggggccctctcttctggtctttggggattctcctttgccacagtggggtgtggagggtgtaggacaggcctgtgtagggtgagctggacttgctgggactgcaggaggttacgaggaagaaatctggtctccttgagtatttagtgctcattatctgttgatcgtaattcagtggcatatttatttcttagcatttattttaattttaataaggtaggtttctttttttcatatttagcacttcatctttttgttttgccttagtggcaaagttacatttaaagtctgttcctccaatttaaggcagtttgaacactgacgatgtttaatttttggaaaaggaaagagaaaaaaggaagcatgaaagaattctgagcgaagagcttgtagctgctgtgacctacctcaaccagtttttgcctcccgagcacacgattatttatattccgtgggacatggccaagtacaccaaaaggtaagcagatgtcttgtctggttaggtttccctcttcttgtgatgtagaatagcaggaagcgacctcccccgtaaagtgactcttattttcctttgtggagctgcttgaggggctgtttaactgctggtgtataattagagggcttaaattaattgatcaaactctctctgcccaccgtttttgccatttgcaaattctctttgaagcatcccagtgacttcagaacacctctcctcagctgcttttcctcaaaggtgttagtttcaccttttctttctatttcattctatctccctgtttaattcctttctcagatgccactttcagacgttctcactcgtgggtgaaccagcactaactcctgaccgtttatagtaaatccagaccccttggtgtaatgtgaaagccccaacatctggttggttccagaatataataactccttctttattcccagtgctattctgctcctgcaaaagctaactggcaggttatgtctccagtgtagcagccgaagtccaattctggaccctttgctcctatgtttcctctccctccagtcctcctccctacctcccagggtgctttcccacctctctcactgtcaagttcccattccaagattccaaactcgtctcttccaaggagctctcattaaccttgcattgtcctttgactcatttgctgggcgtcctacaaacactaggttcacatcaaggtctctctttctcgttttcttaatgtcactgtattgttttgcacttgactcattatacttttctctgaatcattttacatagttagatacatgcacgtgcacacacacacacgcacacacacactctctctctctctctctcccccccccgcccccagagtataagccttgttactggttggtgccgttcatagtaatttatttcccagtgttttcttcccaaacagccgcactgagcattgtgctctctgcacattttatcactgcgtgttgacttcactgactccactcttggggagtgaaagtctttggaaaaagctcttgctggaagatgccatgtgccaagtttaaggcttgccaacagttgctattgagttacaggcccttcttgtgccaaatcttgctagttattgagtacaccttgcattctagaaattaattcttacaatgtccctattgagtacagaccagaggtttaaaaaattacattcccaagtatcattactgtagccttggctttgcgtataaacgtaggtgcatgttaagagtcgggcccttctcacttctcttactcttcctccttgctctcagcaagctgtgtaatgttctagatcgcctgaacgtgatcgcagaaagtgtggtgaagaaaacaggcttctttgtaaaccgccccgattcttactgtagcattctgcggccagatgaaaagtacgtatggtgttttaaaacctaaaagatatctagacgttagctcttatagacaaaaaatattctagacatgagcagtttgtactccttggaagatagatgactttattcctttgaggagacgacaccctgcccatgtgtctgtggaatgaatgttcatgagggtgggagattctcctggcagctacataccttgagatggaagccacagaatctcttgcttgttagaataaatgttatataaggtatttctgtaaaataaaactttctgtaatgaattctgtgtttcagtaataaataggagcaggaaaacttttcttatgcacccgtctatggattagtatttatactaacattttaatgaaatttgtcactgtattagttatttgctcacagatctttcttcattggggcttccttggtggctgaaacagtaaagaatctgcttgcaggagacccgggtttgatccctgggtcaggaagatcccctggagaaggaaatggcaatccactccagtattcttgcctggaaaatctcgtggatagaggagcctggtgggctacagtccatggggtcccaaagagtcagaccaatctatactaagattttaacaaaatttatcactgtattatagtcatttgctgacaagtctttcttcattactactttgtgagcttcttcagatcaagcatctgtgcttaatttatctttaaagaaccaatattatgtatttccaggtttttattttcagttaacaaagttaactataatgataaagaaaaagcatgcaaaaagcaaaaaagaaaacacctaaccaattattaatgtacatctttgcaagtaatccttctgttatagtttgaatttcagggcacctgtgaccagggtccccaggactcctcccaggctcggtgatttcctaagagaactcaggggtcgcagtgtattgttgtcctcttggctgtgatttattatgaacaagcaaaacaaggcaaaattagccaagagagaaagcacatgggacaaagtccagaggaaatgaggtactcgcttgcagagtcctctcctgctagagtcacacggagcatgttcaatttccccagcaacttgtgacagccagtgtgaagtgttgccaaccaggggagacgaatgaagacttggtgccagggtttttactggaagtggtcccgcaggcagctccgcctggcagctaccaaaatttcaggctcccagaaggaaaggctgttcagcaaaccacattgcttctacaaacagcttaggcaccatgagccatgcttgtctgttctggaaatagtggaaattaaagttcccagcgccagccaaggggcagccttgtaagctggccttcctgaggatagcagtcaggcctgctgtgttaactctttttctgcactgcgccttcttttaaataattaaaagattaatgtcattacatagtacttagaatatttccccatgccttcattggtgaaggcatggagaaaacatgtgggaaggaaaataataaagaagtttgtagaaacaacgaaaggactgtagcaaagctccatgaaggaaagctgaaggaaatagaacttcccaaagtcgaagggagaaggagcaggcctggtagattgtattataaagttgacctgcaattattattcatgtctatagaaaccaaacaggaaatgggcttaaattaaagcaagagactttggatgaatgtgggtgacaaaatgctagtgtgcggggctggagcaggttaagatgctcctttcctggcctccctttgagggaagcatgggtagcattccatctctgttatttgcaaattcacttacccaagaaagtaaactgaatcaacggattattcgggggtgttcagcccaattactttgattcttaataaagagctggtaccaaatatgaatatagattatgttattaaatattttaaaattaaagcatgtatttttaaacacaggtggaatgaactaggaggatacgtgattcccactggtcgcctgcaggtatagatgacattgtgttaatagtgaacaaaatctgtatccactgtgtgtgatgttttctgaaagcaaccatggagagagatacttcttattgaatgcaacgttattaatcatttgagaacaagttttaatgccttgcagctagtgtttaacacttggaaaggatgtgtggctgaaacagtaatggcccatagatttttggggggacttcccagatagctcagttggtaaagagtttgccgcagtgcaggagaccctggttcaattcctgagttgagaagacccactggagaagagataggctacccactccagtattcttggacttcccttgtggctcagctagtaaagaatccacctgcaatgtgggagacctgggttcgatccctgggttgggaagatcccgtggagaaggaaaaggctacccactccagtattctggcctggagaattccatggactgtatagtccatggggtcacaaagaggcagacacaactgagcaactttcactttcatagattttttttcatataatatcaaattattggaaatagaaacataagcagaaatgtgtaaagaataaattagaaggactttggaaaatgagcgagataatcactatatatattaattatgctttaagaatgaaatggcctcagccactaaatattttggtttgtacagtaaaggagatagaccagcaggaaaagcacatatttaactaattggtacatgtggaaaatgttagctatttgttttatcttgttaaactaaagaaaaattcaaatatagactagaaggtataatgatgctattggagcaatattgtgaatagcaaatataaccttctataatgaaaaaaatgcttcattatttgttcaggaataacaccctacttgtagcttgtcttcttaaagaaatcttgagtaggatggaagtagttctggtgactgaataatgattgaccggtgtttctcttagactggtgttcttcgaaccaactgtgtggactgtttggatcgcaccaacacagcacagtttatggtggggaagtgtgctctggcttatcagctgtactccttgggcttaattgacaaaccgaatctacaatttgatacagatgcagttaggtaagccttatttgtttgcctttcaagtgctggtaatgacagaaagcaaacttgcttaatcataaaggacttttatgaacttatttccccttttggcttctcaaaaattatgttgttcaaagatgttatttaaatttggtaacatctctttctattaaagccttatgtgttgttgccgtggttttgttttcctattcatgttaattatcaaaaaaacactgtgtactttagataaatccaaactagtgagtttctttaaaaaaaaaaaactcaggctgtgttaggaaaaaaagtaatatgcctttatatattttgaattaaacaggtaagatagataaaagattggttcttcagtaagaaatactgttatttcactgtccattgggtccgtgacagtgcatgaagtttcttgaaatgcagtggtcactgttatcagtcctctgagatagtcataaaggctctgtccaaaagagtgctcagcttacaaatggccagatctcagccatcactgcattaaaaaaccttaagaggcacttgaagaaacgtaagtttcaaacatgtatttctaggaaagaatatgatttgatgtgataagagcttgtcctttattccaaaggcaattcagagagaacagaaaattctgtcatgggaggtaaattgagctggcaggctgcagaaagttaggagtctttttaagagagtagaaccaccttggcttgggtagattatgctttttggtctccctgctttttttttcccccttagagttttctgtgattttgttgcttattggaccattactataaaatgtaatacattttgcatatgtatttatcttccaagatgttgaagagtctacttgaaaagaaaggctcggaggaattcatgtaggaaaagacttgttttgaatctgtagctaagtgaataaggtatataaatacttcggatgaaattctttagtgtttgtgtgttttacttgggcttcttaggttgtttgaggaactctatgaagaccatggggataccctgtcccttcagtatggtggttcccaacttgttcatcgtgtaaaaacctacagaaagatagcaccgtggacccaacactcaaaagacatcatgcagactctatctcgatattacagcaatgctttttcaggtaattctggagttatatgcatttttgagacttatcctgatgcacatttttctcttttacatatccctgtttttaaagctaattggaaaagtaatgtcaaagttaaatattttaaaagtttaaataaaacagaatctgtcacttaggaggtaaatatgcagtaaataaatgaataaactttgtattttaagtagggcactttggccacctgtaactggagcttttgtatacttcacagtactgtgattccttggcttctgcctcattcctagtttctgcttgtaatgaaggtgaaagtgaaagtcacttagtcatgtctgattctttgtgaccccatggactatacagcccatggaagtctctccagaatactggagtgggtagcctttgccttctccaggggatcttcccaacccagggatcgaacccaggtctcctgcattgcaggcggattctttaccagctgagccagcagggaagccctggtaatacatagatcaatttaagagtgttgaataactatttttaaatagagttcaccattttaacagttgtctaacaatgtgaatatcactgattcttttaaatgtcagctagaaatgagaagtaacattagcactaagttttagtcttttgtcattttatgacttgggagtactaacagcaacaggtagttaaaagggcactttttctgcctccattctgatgtcactcaccaaagtgattgtgagacaggtcccgtcacagaattttttttttaaatgtatttatttattttttattttactttacaattctgtattggttttgccatacattgacatgaatccaccacgggggtacatgcgttcccaaacatgaacccccctcccacccccctccccacaacatctctctgggtcatccccgccgtcacagattttttaaaggaagagctcaggttgattttgtgagtcttggacccttaaactagattaaagacaaaaacatttacaaaatgtagagaagagaggtcagcaaagagattctttgaatttttgctgcgcagtgactgtcccccagcccttctcctttacctccagcctggagagaactggactcagggcaggcttaacgtagtgttctctcgttggagggaccccgtggagctgttggcttcgggctgctgtgtagggaagctgaagcagagggacgggctgaggagcgggctgccatgttgggaatggccccctctcctagagttggttaggccaaaggatcattaggcctaccaggtgaccagagggaggccccgtgggggagggtgctgggatggcattggcctaggtcctggccagaaggaccatatcagtgggaaccaggaggtgattgatcactggcttcccaaggagggagtagcaggaaaatgcctgatgtgagaagcctgtgctcacgccaagggaactgcaggtgtctccagcgctgggaacctcaggagagtacatgaaaccatccacaaaagagtcagccttcagtcttttccatgcccagagaggatgcagaggtggtttgctatacttctgtccaggcatattcatttcctgtgctatctaacaaattactgaaaaattgagagcttaaagcaacatatattcattatctcacgatttctgtgggtcagaattccagacccagtttagccaggtcctctgcagagggtctcaccaagctgtagtggagatgtcagtcagactgtggtctcatctggaggcctgattcggggaggacctgcttccctgctcatgtgctgtgttgggggaattcagttctttgtggacttgttccttgtcgggatcatggcagcttgcgtcttcatcactggcatgggaaagggtctctagaataagtcttctggcaagacagtcttacataacataatgtaatcgtggggtgacatgccatcactttgccatataccattgctcagaagcaaattgtggtcccacccatacacgagcagaatctgtgacagtttcctaaggctgctgcaacaaaatactacgaactaggtgatgtaaaacaacagaaacttatctcacagttcagaggtagaagtccagtgtcaagttgtcagcagagccaagttcactgtgaagtccacagaggagaatgcgtctccccagctgtgaggttttgccagcagtcctcggcgatccttggcttgcagctgtcttgcttccatggtcgcatggtcttcttcctctgtgggtctaggtctgtgtcaagttcccctcttcctgtaaggacaccagtcctactggattagcgtgcatgcagactcagtcacttcagttgtgtccgactctttgcgacatggggtgtagcccgccagcctcctctgtccatgggattttccaggtaaggatactggggtgggttgccatttccttctccaggggatgcctgacccgggggtcaaacctgggtctctcacgtctcctgcgttggcaggcccattctttaccactagtgccacctgcaaagccctgattggattggggtctaccctaattcagtatggcattatctaacttgattcaggcttcccaggtggcctaatggtgaagaatccgcctacgaatgccggaaacgcaggagacctgggtttgaatcctgggtcagaaagatcctttggaggaggaaatagcaacccattccagtatttttgcttggaaaatcccatggacagaggagcctggtgggctacagtccatggggtcacaaagaatcgaatgcaactgagcacatataacttgattatgtctgaaaagaccctaatttcaaataagattacattagtggatattggggtttagggcttcagtatatctttttagagagaaacagttcactacacaacacaggatatctatcacactaaagcatgaacagcaggaagtgaggagcatggcggtcactttggagtcgagatcaagtaagaccatccctgtttccacgctgcagaggggttggaagctcgttggcagcctggtgggtgtggggggatgtgcgggacagacctagaggttctgtgtggtctggccccgcctaccttgccattctgccattctgccattcatgccatccccttcccccatcacagctctccagacacacagaccttctcactctttcctgactgggttaggcttcctctgccagaggctcttgctgtgccccttggaacactggaacataagactgcagtcttctgagcctttcggctcactctgctttcaccttctcaaggaaggtactccagtttttgttcttgtagcattctgcacctttgcagcacctggcacagttgcacttaaatccttaactgtgctattagttgggttgtgtgtccctgtatcccccactgtgagacccaagagctcatgagcatcttatttactgctggttcactatggtgtccctgctgccttgctcatggcatatgaactgtttatggactgaattaataaatgcatgagttaattcattacctatgccctccccagcttccccttttccctgaattcagaaatcaacagggctaagtatatcagcctaataacgtgtagcttatcagtaatgctcttagactgctcaaatcatgtctttcgaattcactgagaattatggctgttatacagctggtaagctcaatgcgtaacaaaaaccacaaagccactatagacctttagagtgtttggatattactctgtatgcatgactccttgagctggatttaggaactttacaatcaaagttattaatctgaacaaaaatcaagaattaggaaagtcaaatttagaaattcaggtcagtggtgtaagtttaaatgctagatttctaaagcaaaaatattgaagtactcccatcatcctttattacacttactgctgtcgttcccaataaagatattaatatgtattgatgtattccaagtggctacaacattattgcaagtgattattataaatagctaaaaacactaaaaataacgtggtttcacttggttttgtaaattagaatggttttaaggtagtctctctaaaggcagtctcattggctatgcttcattattgtactggtttcctaggacttctgtaacaaagcactacaagcttggtggcttaaaacaacagaaatgtgctgtttcacagctttggaggctttaagttggaaatcaagtgtcagcagggctgtgctccctctgaaggctccgggggaggttccttacttgcttcttatcttctgatggattgctgccgatccttggcttgcaattgaaactgtgtgctttcatttctggctctggtgtcacacgccattctcctctcgtgctgtgtctccgtggcgttctccctgtgtgcttgtgtctcttcttatgaagacaccggggcctgccccattccagtgtggctgtatcttaacaggattacatctgcaaagacttaatttgcaaatagggtcatattcacaggtcctggggcttaagacttttaatatcccttttgtggggaacacaattcagcttgaagagctatgtaatcatgtgccaacaagtacattacctctgggtatgtgttgaacaaggtttaaaattgccctgaggaaagggtcgtccagtcttctgtcctctcctgttcagggttgttcctgaattgggagtcattatgatccaaccagtgcattctaaaggagatcagtcctgggtgttcattggaaggactgatgctaaagctgaaactccaatactttggccacgaagagttgactctttggaaaagactgatgctgggagggattgggggcagaaggagaaggggacgacagaggatgagatggctggatggcatcactgactcaatggatgtgagtttgaataaactccgggagttggtgatggacagagaggcctggcgtgctgtgattcatggggtcgcaaagagtcggacacgactgagtgactgaactgaactgattgacacttaaggaccaagtcatgtgtttttcagtaagattagagcacaaagagtgaatgtgtggctgtgtgcgattaaaaatgaaaggagaacaattaaaagacagaaggtggtcataaataagtaacgtgcacacgatggaaaggtaaagcaaaattgtgcacaactgaaaggaactatcatgaagagaattaatttatgaataatatggctaaaaccgccttatttattttgagaagcatggtgccattggggtgtacaacttatttttaaattacaatggatattatataatggtaatatattaatagaaccattttctttaggcacgcaagattgtgaatcagtctctccatcttatgtctctgaggtagacaggaaggttcttgaaattaggttgttaagaattttatccttggttcatatagacagatgaatactatgtgggtaacccacctgactccctttcaggttcattttaaaaacttttttgttttcatgtattatttcatgtattattattttctttctaagaaacatcctttggttctcttataactggctacataagcagttgtaggacatcaataagaaaagaacaagtacctaggtattctctttggatgttagaaagaagtttataattgttaattccttgtcaagctctaattttcttttatatttgtgtgtaggtaaacctgaatatttttttctgaagcttattgaattgaaatcctattttaaggaaaaaaatataagatacctgcacagttaataatagaacagctgtatatacataatatacacacgtatatatacatatatatgtgtgtgtgtttagttgctcagtcatgtccatctctgtgaccccatagactgtagcccaccaggctcctctgtccatgagatttcccaggcaagaatactggaatgggttgccatttccttctcccgggggtcttcccgacccaggcactgaacccctgttcatctgctcactgccgtgtgcggtcagtttctcccctctgcagcctcatttccacgagcatagaggcacaccttgtgttttccatctaatctttccttctattcttaaccacacccactgctaacaaaagctctgctctcctgaagcaaaacctcttggaagcgttatctgcacaccgattccctctctcatatcctgttctctccacctgcttcactgagcctttgccctgtcatgcccctaaacccgtgcttatcacaatcactcacaatcacccacaatctcccactgctaagccaggggctcctcttctgtgctcatcttgctcagctgtttggcagcttgtatcacagtggagcactccctctttcttgaaactcacttctgtgctgtctctctcagtctcactggtgacttctcctgccctatttctaaactgtcctctttctacacttttacctaaggggtatctcacccagattttaaatactatacgtttgacactcaaatatatatctcttccccgactcctccactgaactccagacttgtctaaatgcctaccttgcaggcgtttcctcctgaatattgtgttagttttctacaggtgccataaccaattatcacaaactcagtggcttaaaacaacacctgtttattatgtcccagtgtttgtggttcagaagtctgggaatagcattacccagctgtgttctctgcttaggctctcacctggctgaagttcaaatgagagcaatgaagtcagagtgtgggctctgatctggaggcctccaggctcattcaggttgctggcagaaccccaggtggttctcggactgctgtcctcacgtgctgttggctggggccaattctcgggtttgagaggctgcttaccttccttggcttgtggtccactccatcttcaaagccagcaatggtgcatcaacccttgtgcctcaaaactgtctgctttcctcttctgcccttaaaggattcttatgattccagtggccgatccaggtaagacacgataattcttaatcattgattagtcatttcagttacatctacaaagttgcttttgccatttaagatgaaatatgcatgagaaactatggagggaaggtcatgaggccaagtttcttcctaccacggatatctgagaagaatctcaaactaatcgtttccagattttgttctctactttttttcttttttcacctctgctcccattgtttagttcagaatcctaggaatcatccttaatttcttcattctccttatcctccctggtctcatctctcagcaaacctggttggctccacctccagagtatatcccaaatccttctgctgtgtttcctcctcactgttgccgggctggttgagacagctggtggctctgaacagctgccgtggctcctgattcctccctcggcctcccctcttctgttctcgctcttcacgacagccacagggatcctttcgagagttatatcactcccgactctgaaatcccttccagggcttctcatcgcatttaaggtcagactctttgccatgaccttcgaggctgtgtgtggtctgcctcactgtccccagtcctgctctgtctttgccccctgccctccagcccgccgctcccccctccaccttcgtgctgttcctgacattgtgcagcctccacctgcttccctgaccacccgacctgtgtccctcttctctctcatcactctcatgtcactcttattttttcaaagaactaacatcctctgaaagtaccctgtaccttatttacttgagtattatttttgcttcccactgtggaatgtaagtcccataaaagccagaatcagttatgtatagaccatatccctagtgtgggacatagtaggctcttggatgaatgaatggtggtttcttttttttttttgtagttatgaaggtaatatatgctaattataaaaagtataaaataactcacaaataaatcatataatcctcacctttcagaaagtaagttgttcatatttagcagaacatgatccttctagttactgtacaggtaatgtatatctgcttttgccttttagataatgtgagtaatcattatgaccctaaatattcttttacaacttaatttttggtagccttgtggcagtctgttctttagaagcaccatagtgaggttacctgtttttattgtgcatttatgtttcttttaaacgaacatattttttgcatgttttttatcttatgaaaatttcagaagcatatttattaggtcagagtatagatattttcaggatctttaaaaacatatatgtatatatatagccagatagccttaacgaaaggatgtagcaatcggttctcagaggagtataggtgtgcccattctggaaagtatttgccagctttccaaactccttattgctaaattcagactcaaattgaagaaactagggaaaaccactagaccattcaggtatgacctaaatcaaatccgttatgattatacagtggaagtgagaaatacatttaagggcctagatctgatagatagattgcctgatgaactatggaatgaggttcctgacattgtacaggagacagggatcaagaccatccccatggaaaagaaatgcaaaaaagcaaaatggctgtctggggaggccttacaaatagctgtgaaaagaagagaggtgaaaagcaaaggagaaaaggaaagatataagcatctgaatgcagagttccagagaatagcaagaagagataagaaagccttcttcagcgatcaatgcaaagaaatagagaaaaacagcagaatgggaaagactagagatctcttcaagaaaattagacaccaagggaacatttcatgcaaagatgggcttgataaaggacagaaatggtatggacctaacagaagcagaagatattaagaagaggtggcaagaatacacagaagaactgtacaaaaaagatcttcacgacccagataatcatgatggtgtcatcactagagccagacatcctggaatgtgaagtcaagtgggccttagaaagcatcactacgaacaaagctagtggaggtgatggaattccagttgagctgtttcaaatcctgaaagatgatgctgtgaaagtgctgcactcaatatgccaacaaatttggaaaacacagcagtggccacaggactggaaaaggtgttttcattccaatcccaaagaaaggcaatgccaaagaatgctcaaactgctgcacaattgcactcatctcacatgctagtaaagtaatgctcaaaattctccaagccagccttcaagcaatacatgaatcgtgaacttccagatgttcgagctggttttagaaaaggcagaggaaccagagatcaaattgccaacatccgctggatcatggaaaaagcaagagagttccaaaaaaacatctgtttctgctttattgactatgccaaagcctttgactgtgtggatcacaataaactgtggaaaattctgagagagatgggaataccagaccacctgacctgcctcttgagaaatccgtatgcaggtcaggaagcaacagttagaactggacatggaacaacagactggttccaaacaggaaaaggagtgcatcaaggctgtatattgtcaccctgcttatttaacttctatgcagagtacatcatgagaaacactggacgggaagaaacacaagctgatacaagattgccgggagaaatatcaatcacctcagatatgcagatgacaccacccttatggcagaaagtgaagaggaactaaaaagcctcttgatgaaagtggaagtggagagtgaaaaagttggcttaaagctcaacattcagaaaacaaagatgatggcatctggtcccatcacttcatgggaaatagatggggaaacagtggaaacagtgtcagactttattttcgggggctccaaaatcactgcagatggtgattgcagccatgaaatgaaaagacacttactccttggaagaaaagttatgaccaacctagatagcatattcaaaagcagagacatttccttgctgactaaggtctgtctagtcaaggctgtggtttttcctgtggtcatgtatggatgtgagagttagactgtgaagaaggctgagcgccgaagaattgatgcttttgaactgtggtgttggagaagacacttgagagtcccttggactgcaaggagatccaaccagtccattctgaaggagatcagccctgggatttctttggaaggaatgatgctaaagctgaaactccagtactttggccatctcatgtgaagagttgactcattggaaaagaccctgatgctgggaggggtgggggcaggaggagaaggggacgacccaggatgagatggctggatggcatcactgacttgatggacgtgagcctgagtgaactccgggagttggtgatggacagggaggcctggcgtgctgcgattcatggggtcgcaaagagtcagacacgactgagcgactgaaccaaactgaactgaactgaactcccagcttaataagcagaaaacggtttgcattgttttcagtttgcgtcgtttatcgaataatagtaaagttgagtttttataatgtttaccgtctatttgtttcctttaaaataaataaatttatatttttaaaaattgcatgtttttctgttagggtgttgatctttgtccttctgacatttagttgggatttatttcaacatacagtaggaggtagtagtccaagtcactgtctgctcctcaccctggttaaatagtactgtttatcaaatagcatcccattccattactgatttcagaggccactttatcgtggacttaatttaatattaggtcaacgaatgttctagtttgcaaataaacatttttggctaattaaaagaactgttatcttcaagcctgacctattgtaataccctgcattagcgattaaccatttggatggagtttgaaaggtgcctattcctttttcctttaaagcacacttgaatataaaagtaggtagttattttgccctcttgttatctgcaactgcagagaacctacctattttaagcttttgtcttggtccaaagtactgctgtcttccagagggcgaaaacctcatctgcagtcaaaagtaaccaggaaaagattccgaggctcattagggctggccttagattccaagcttagtaggtgacagtaaataccatagatacattgtaagctaaagtaacagcagtacattcaagaagtctccattatgatcctttgaaggcatatctgttatttggttaggtttctcaatcttacattttatcatgcttggctaaaaattaaaggacttactattaggtttaattagggataaaagaaactccttgaaaacgtggctgaaaagtggaaagcttcattagatagaattaagatattttgaggtactgcatagtgtgaattattaagtgccattaaggctactgaagaatcataaagaatataattactataaaagcagtatgtttactttcatattgtgttaagagggtgcaaattggagtggtaatgtatgcatcatttaatacttgatgttttctctcaacaaatagaaaaaaggctccaagtatactcatcatataaacacatccctttcaaatattacttgtagcataaaaggtgagcactgttttaatggaatgcttcctgtcaaaatatataactagaacccatgtttaatgtaccagatttcatttattgcttctgccaaaatgaccaaatagcccaaggagaacagtgttgctaatttcagatttttctgtgttcactatagctgttggaagaaaattgattttatgatgatgttatcctgtttcaaaagcagtcatttctattggctttttggttctgtgctcaatttcagaaagagattattatttatattgtggatgtctgcccctaacttgaatatgcaagggctcagagaccagaatggaaagaatgaaggttgcttgggagggggctgtgcaggacgggaagtatggctcatgagaccacttcagtgcttatcgtttttaccaaaatacatttgagaaaaagaggagagacagcatgcgtgtgtatctctgtgtgtgtgtgtgtgtgtgtgtggtcagtttggttagtttctagtctgttttgaaaaggtaattttggagaggttgaatggttagtgatgctgttttccgtgtgcacactctgccttcattatcaaacacagctgtaggggaaacaaaatgttgtaaacattgtctctcctaaagaaatagagtatcttttcatggattaaaagcagaagcttggaaactgacttgttcaaggatgtgcaacagaatatgggtaggaatcggggccactttatttgtctgacttctgtctttgccataaagtgaagatgttctttgtttcaggtaaactaacaaatggtgagaatgtttttattctaaaaatacaatcactaaggtaactagggcagttcttaaagactttttaagaatgtctcaaaattcaagaagcagtttacgttcactgtcctctatgttatgagatgtatagagtaaaaaggaaacattttgaaataagattttaattttcaaaatcttggtgggtgttttagatgttgtgtatgacttttacagcataaatgctattattttcagaggtgtgttctgtgacattccagatgtacccttaatcctcctaagaaagcattcccctgggttgtttatgtgagtaatagagttcctgaattatgtgtttttgctttttagatgctgacagacaagattccattaatctcttcttgggagttttccatcccactgaagggaaacctcatctctgggaactccctacagatttttatttgcatcataaaaataccatgagacttttaccaacaagaagaaggtatttttcttcctggtctactatgttaaactcagctttgatgttattttgaatatgagagaactttctttttgagaaatgattatataggctaaagtagtcagccttgctacatgtttgccaggaggaatttagtattgttgatgtcctgatagttcagttcagtcgttcagttgtgtcagactctttgcgaccccatgagctgcagcatgccaggcctccctgtccatcaccaattcctggagtttacccaaactcatgtccactgagtcggtgatgccatccaaccatctcatcctccatcgtccccttttccttctgccctcaatctttcctagcatcagggtcttttcaaatgctctctgcatcaggtggccaaagtattggagtttcagcttcaacactgggaaattgtcattaacaaatgcagttgttttgccttttcataagatacaaagtttcagagctttatcattgaactgttaagttgaagctccactggagcaaaccagtaacataacttttgagtgcttcctgcaaatgtggggtgataaagaactcttaacatgtaaggaatcatctttggtttttaagtgtggtgtctaggcagcctcgctttggaattgcaatgtcctttcctccaggaagcacagggaactcttggtgacactggggaggacaggaatctagagccaaggtgctcgtggcaggtgccactcccaccagccctgttgctcagtctgggccttcttgagtcattcactgtatgggctattatgatgacagttaaattgggagcagtagtccccaaatatggagaaggcgacggcaccccactccagtgttcttgcccggagaatcccatggatggaggagcctggaaggctgcagtccatggggtcacgaagagtcagacacgactgagtgacttcactttcacttttcactctcatgcattggagaaggaaatggcaacccactgcagtgttcttgcctggagaatcccagggataggggagcctggtgagctgctgtctatggggtcgcaccgagttggacatgactgaagcgacttagcagcagcagcagtccccaaataaatgaactatttcctgaggattggataagactccctgtgtagcacaggccgcagggtcaggggacttgagttggtgtctctgcagccgtgtgaccttgggctagttatttaacccctctaagtctcatttccctcccctgcacaatgtaagtgacaggacacacattacagagtcattgtaagggcttaatgagaggactctttagcattgttaattgaagagtcatgttgtaataatgggcaacatttttcacatatgagacttgagcctggtcccttctgctcagagccctgtgatgtcaagtctgctcctaaggctctcctctcacagcatccatatgatctagccctcattttgttcaacagtgcttcacaaacactacagggttcattgccggtctgtgcaaattgtgtggacagaccacaaacaactggtgaattagcaagtgctaatgttacagatgttaccaaattctctattacttcaggaacaattcaaatattaagaaaatgtcagagtttatatgtttctcagttttattcctttaagtacattttcttggaataaccagcttaatgcttaaccttactttccctataaatgaaatagtgctgacttttccactatattaataaatgattgccatgaatttttgctgacaagaagtctggagctaattatgtttatttgatgagagataagtgtaaatacctatatttagctttgttgatgcaattgactatgggtaaatatggttttctgaaactttatattatcttaaagtattgaagctattaagatacaactcagggaataagcaaaactggattttctgttgctgaaattagctagtaaattacaagcataagttaaacctagagttacataactgaagcaggcggtgttggtgcttatttgtggaaataaaaggaagctgatgttacattctcatttttaaaattaaaaaaaaaggaaactaagttgcagagaaaatgtgtcttgactgaggttatgcagctgattagacagcacagtaagtgaatgaactaaacacctcccactgagaataaacttttatcagagtaggtactgtggctctcacagttgacttggtctccttgttttttctctagaatgtgaaaattccaaatattgatttttggcatcaacaactgatactaataagactaggataaatttcagtactttattttggcctttctagtcacccgatactagttactttgatgacggttaaatacttacgctgattctcagaagaattagccagaggcaataaccagactggagcatggacactagggtagagctgagttggattttctgcaggtgtgtgaccttagatgtgtttctaaacctctggaaatcttgttttcccaactatagaaaggaaatgactacacacacctcacaggtcactttaaggattaaataaaatatgaatgggaagtacttcctattgggtctgacacatgatccacacagtctggaagcagccaagctctggagggactgcctgcagttaatacctgtctgaccggaagcaagacatataatcactgcaattctcagtttccacatcagtaaaatagagatagtgatagtgtctgacctgtaggtttttctgagaatcagatgagatcatataaatccttagcacatagtagtccaacagatattagtattgttattttctttaaaacgactacatttcttagttgtaatatttgttaaaaatcatatagaatgaccattaattctggaaacttagataatattattttatcacttattttttgttgttcagtccctaaattgtgtgcagctatttgtgatcccatggactgcagccctccaggcttcttgcccttcactatctcccagagtttactcaaattcatgtctgttgagtcagtgatgccatccaaccatctcattctctgttgtcccttcttgtcctgccctcaatctttcccagaatcagggtcttttccaatgagtcggctctttgcatcaggtagccaaggtattggagcttcagtgtcagtccttccaatgaatattcagggttgaatgcctttaggattggctgctttaacctctttgctgtccaagggactctcaagaaccttctccagcaccacagttcaaaagcatcaattcttcggtgctcagccttctttatggtccaattctcacatctgtacatgactactggaaaaaaagaaaaacataactttgacaatacagactttagtcggcaaagtgatgtctctgctttttaatacgctgactaggtttgtcatagctttctttcaaggagtgagcatcttttaatttcacggctgcagtcactgtttgcagtgattttagagctcaggaaaatgaactctgccactatttccattttctccccatctatttgccatgaagtgatgggatgggaccagatgccatgatcttagttttttgaatgttgagttttaagctagccttttcactctcctctttcaccttcatcaagaggctcttgagttcctcttcactttcggccattagggtggtatcatctgcatatctgaggttgttgatatttctcccagaaatcttgattgcagcttgtgattcatctactccagcatttcacatggtgtaccctgtatacaagttaaatgagcagtgtgacaatatacagccttgatgaactcctttcccaattttgaaccagttcattgttccacatcccattctaactgttgcctcttgacctgcacacaggtttctcaggaggtaggtaaggtggtttggttttcccactgctttaagaattttccacaatttgttgtcatccacacaatcaaagcagaagtagtgtttttctggaattctcttgctttttctatgatcccacagatgttggcaattagatctctggttcctcagccttttctaaatccagcttgtacgtctggaagttcttggttcacgtactactgaagcctcgcttgaaggatttgaacattaccttgctaccatgtgaaatgagtgcaattatacagtaatttgaacattctctggcattgcccttctttgagattagaatgaaaactgaccttttccagtcttgtgaccattgcttagttttccatatttgctggcatgttgagtgcagcactttcacagcatcatcttttaggatttgatataactcagctggaattccatcacctctactatctttgtccatagtaatgcttcctaaggcccacttgacttcatatgctgtgatgtctggctctaggtgagtgaccataccatcgtagttattcagatgattaagatctattttataacgtactattagtgaacactttattatgtatgtctgtgtttccaaactttgtgaccatctgtattttacactgtttaccaatgatttattctgaaacagtatttttataaaatgataagggaagaggggataaactaactttgcctggaattcatccaaaccagttctctcgagataactaattttgtggctcaaaatcccatgtttatgaatctgttcaaaactgctgattgaagctttgttctgaatagtactggagtgggttgccatttccttctccagaggatcttcccaacccagggatcgaacctggggctcctgcattgtagtcagatgctttaccatctgagccgccagggaagtctgaaataggttagtatgtcatatatcatctcagatgccatttttgaatcagtgttaataaagtcaccagggtatttttaggcattatacattaattgtctctttgactcagagttgggagatttcctagcactatcttctgtctgatatatgagttccctctgtgtcttcccaggtggggctcagctgtactgtgcttgactggcgttggtttgtcaaccagcacctgtcaggttgagaggtagtcgttttcggacagttcactcacatcattctttctcatatcatgctgagatccgtttgtctgtaattttacctactaatcttagtttaaccccctgagaccttaagaacacagttttctcattcacttgatggtcttttaaatatttgaagacaggttcacacattctcaaagtctcttctccaggttttctggaggctttcttctgtattccagtttatgtcagtgctctttttaaactgtggaattcaaacctgggtccaatagtagtctgattttggtctaatttgtgccaagtgttgtgggaccattggtaccatcattccccttgtcctgggtaatctgttttttttttatcatgaggtacaaagttacattgactgttagcagcaatgctgttgtaatgttaattctctgggcttcctattcactggaactcccaagtctttttaacatgccctatcaccttatggcagaaagtgaagaggaactaaagagcctcttgatgaaagtgaaagaggagagtgaaaaagttggcttaaagctcaacattcagaaaactaagatcatagcatctggtcccatcacttcatgggaaatagatggggaaaccgtggaaacagtgtcagactttattttcgggggctccaaaatcactgcagatggtgattgcagccatgaaattaaaagacgcttactccttggaagaaaagttatgaccaacctagatagcatattaaaaagcagagacattacttttccaacaaaggtccgtctagtcaaggctatggtttttcctgtggtcatgtatggatgtgagagttggactgtgaagaaagctgagtgccgaagaattgatgcttttgaactgtggtgttggagaagactcttgagagtcccttggacagcaaggagatccaaccagtccattctgaaggagatcagccctgggatttctttggaaggaatgatgctaaagctgaaactccaatactttggccacttcatgcaaagagttgactcattggaaaagactctgatgctgggagggattgggggcaggaggagaaggggatgacagaggatgagatggctggatggcatcaccaactcgatggatgtgagtttgagggaactccgggagatggtgatggacagggaggcctggcgtgctgcaattcatggggttgcaaagagtctgacatgactgagcgattgaactgaactaaactgattgccatgccttatctctgccatcttgtcttgcctgtgtatgctttgcctgcttccagaaaaaaaaagtaaacacgtatcctatttattagctatttcctctggcttcgtatcttcttcagaattaatcagttggctgtcttgatcctaatgtaagtcattgttgaaatagggtgagtaagagtccttaaacagaataaggtagatagcagagccctgtgggtgccacccaacagctccctctaccttgacactgttatgtgatttttggttggaatcatttcaacagctgtaactaaccatgctgtcaacacttgactgtcctgtcatcctgcccacatgtctctgtcttgttcacatatatcagttgctttgctcagatccatatatgttatttcagagagctcccaagtttactagtggagttaaagagccttttaaaatcttcctgacctttctatgtgagccagtggaattgagcacgcttaatactggagagtgaaaaagagaaaagaagctgacttactaggtgttcatgcagaggcggaagtggcacccacctgccatcgcctgtcctctgatacctggtccggaagcagatttctgtcccggcgcaggggctcttcccctgggtgattgtgctggttggggaggtgatgcctccccgtcctgtgctcagtcctctcagatgctctcctcctccatccatctcagcccagcttcctcagagcaggtatttctttgggcttctttccttctgagacccacttagaagagttggactttaaaaaaaagttatttacttttaattgaaggataacttctttacaatattgtgttgatttgtgccatacatcaacatgaatcagccataggtatacatatgtctcctccctcttgaaccctcctcaaacctcccaccccttcccacccctctaggttgccacagagtcccagtttgagctccctggatcatatagcaaattcctattggtcatctgttttacaaatggtaatagtgaatatgtttccatgctactctttccattcatcccaccctctccttcctccccacagcccgtgtccataaagcttttcttctatgtctgcatctccatggctgctctgcaagtaggttcatcagtaccatcttcctagtaccatcctccatacataggtgttaatatacaatatttgtttttctaacgtacttgactctgtataatacactctagcttcatccacttcattagaactgactgaatgcattcctttttatggctaacattccactatatctgtgtaccacaaattccttatccattcatctgttgatggacatctaggttgcttccatgtcctagctattgtaaatattgctgcagtgaacattggggtacgtgtgtctttttcagttttgggttcctcagggtatatgcctagtagtggggactgtatagtatgctgggtcatatagtagttttttttttctcatttttaaaggaagctctgtactgtcttccatagtggttgtataagtctccattcccaccaacagtacaagagggttcccttttcttcacaccctctccaggatttattgtttgtggattttttatgatggccattctgactggtgtgaggtgatatctcattgcagtttgatttgcattaagaaggggacaacagaggatgagatggctggatggcatcactgactcgatggacgtgagtctgagtgaacttcgggagttggtgatggacagggaggcctggcgtgctgcgattcatggggtcgcaaagagtcggacacgactgagcgactgaactgaactgaataatgagcaatgttgagcatcttttcatgtgtttattagtcatctaagagacacgggttcaatccctgggtcaggaagattccctggagaagggcgtgacaacacgcttcagtattcttgcttagagaatcacatggacaggtgagcctggcagcctacagtccatagggtcacaaagagttggacacaactgaagtgacttagcacgttagtcatctgtgtatcttctttggagaaatgtctgtttaagtcttttgcccacttttaaaaaaaatttattttttaattgaaggaaattgctttacagaattttgctgttttctgccaaatatcaacatgaatcagccataggtatacctatgtcccctccttcttgaacctccctcccattctctccccattccacccctctaggctgatactgagtcctatttgagttacctgagtcatacagcaaaactgactatctattttacgtgtggtaatgtaaatttccatgttactgtctctatacatctcacgctcttcttcctccccaccaagccatgtccttaagtttgtttcctatgtctgtttctccattgctgacctgcaaataaactcatcagtaccatctttctagattccatgtatatgcattgctgctgctgctgctaagtcgcttcagtcatgtctgactctgtgagaccccatagatggcagcccaccaggctcccccatccctgggattctccagcaaaaacactggagtgggttgccatttccttctccaatgcatgaaagtgaaaagtgaaagtgaagtcgctcagtcatgtctgactctttgcgaccccatggactgcagcccaccaggctcctcagtccatgggattttccaggcaagagtactggagtgggttacaatatttatcttctctttctgacttacttcactctgtatcatagactctaggttcacccacctgattagaactgactcaaatgcattcctttttatagctgaataacccattgtatatatgtaccacagctcctttatccattcatctgtcaatggacatgtaggttgcttccatgttctagctatcatgagtgtgctgcagtgaacactggggtatttgtatcttttttgattttgatttcctcaagatatatgcccagtagtgggattgctgggtcacgtggtggttttattcctagttttttaaggaatctccataccatcttccatagttgcccacattttgattgggctgtttttctggtattgaattttatgagctgtttgtatattttggaaattaatcatttgtcaattgtttcagttgctgttattttcttacattctgaaggttgtcttttcaccttgtttatagtttcctttgcagtgcaaaagcttttaaattaaattaggtcccacctgtttatttttatttccattactctgggaagtgggtcatagaggatcttgctgttatttatgttatacagtattctgcctatgttctcctctaagagttttataatttctggtcttacatttaggtctttaatccattttgagtttatctttgtgtatggtattaggaagtgttctaatttcattcttttaacatagctatccagttctcctagcaccatttattgaagagactgtctctttcccattgtttgcctctattgtccaagataaggtgcccataggtgtgtgggtttatttctgggctttttatcttgttccattggtctatatttccatttttgtgccaggacaatactgtcttgatgactctagcttttttgaaaagtattgttaagctttattttgcataagtatacagtttagtaatatttttaaaaaatttatggcctgatctcttaatttgctcttaattctttttctttacatggtgtattctgagtgaaaacatgttctttataatgttttcttctttttcctaagtaacctttttttagtaatttatttatatgtgcactgataccttctctgctttcctcctctgccaattctatctgtcttcattagaatttatgcctgtgcttgctcgtgggtgagttctttctctctctaacacacatgctgctgctgctgctgctaagtcgcttcagtcgtgtccgactctgtgcgaccccatagacggcagcccaccaggctcctccatccctgggattctccaggcaagaacactggagtgggttgccatttctttctccagtgcatgaaagtgaaaagagaaagtgaagttgctcagtcgtgtccaactcttcgcagccctatggactgcagcctaccaggctcctccgtccatggaattttccaggcaagagtactggagtggggtgccgtcgccttctccgctctaacacacatcagttcagttcagtttagtcgctcagtcatgtcagactctttgcgaccccatgaatcatagcacaccaggcctccctgtccatcaccaactcccagagttcactcagactcacgtccatcgagtcagtgatgccatccagccatctcatcctctgtcgtccccttttcctcctgcccccagtccctcccagtatcagagtcttacaccctcttagcctggtgtggcttatttttatgaatagatgtggattcatagaagtcactggtcatcttaggttactcccatctctagtaaatacttgatttgctatcttccctgcattgacattacactcattgctgcgtagtttttggagtctttcaccctctcgcttttgaacatcaagactgcatttgcccatttcctgtgtcagttctgctctttaaaaagagtattgagcacagctctaccaggacacctgagtgctcccagagatgctgtgctgtctccttctgcctcttgggctgtgcacagttccctcttatcttgtgtatttctctttccagcatgaaactgtgctggtgaagataggaacaatactgtagctctactttctctttattttcaacatggcatttctaaagcgtagaagagtgtttgacacacagtaagtgcttaataaatggtgaaagtctgaatgaattctttgtaagcagcagacttatcccttttctgtttttttgttttttgtttttttccccttgctttaacgccttgctattcaaaaagtagtctaaggaccagcccctttgatatcaccaggagcttgtcttaaatgcagaatctcaggccccacctactgaatcagaatctaccttttaacaggattttcaagtgtatgctgcttttgagaagcactgctctaaagcataacttcagtctcaagcaaaactttaggagcctttcctgttatcccagtactaaccaccccccaccatagttcgtttgtctagctaacacattttatctagtgaattgtagaaaaccaacatttacatctggcccattttaatccttttttttttaaatagttacacttactggtggacaccagaggtaataaaacatttaccactgccttatgatgaaggtaggtacgctgtttctcctttagtttttatgccaacctatttggaaattattattaaatgatcttgaagcattcatttcatataacattttattagaaagaaatgaatgacaattcagtgttatgttactgttataatagataggagattatgacatcttagctttttttaaagggtagagattgtattatacttattttgtctaaataggccaataccttgtattgtgtcttaccagttatcaggtatgtcactcagatgtttagtggatatattatttcatcatttaaaattagtagttgatatattcctacatatttagggggaatgaggaggaagtgaggacccattcacaaggagaaataaaaactctccctatatctaagcagtgaaaaaaggtacagagaaatgtataaaactatattttagtcactgaagattaaattatatattaatctgttagaaaggcaggaaagtttttacattcaaagaataccttcagatgtattttaacatattagaacaatgtttccaagtttaaataattgatcagtttgaaatagagtttattcttgattctattattgattcttccaaccatggacaagccagttttctcaattgtgaaaggatgcgatgatctattgccagtctggaacactccagttgaagattccatctaatcacatttgactaccctgtttttggatggtatggtggaggccataaagtaagaagattgcaaatgagttcttcacagattattaattagcttttaaaaagcatttgttaaccttgaaattctgagcaaaatcataaatcatactgcatggtaatccaagtctatgccccaaccagtaacgctgaagaagctgaaattgaacggttctatgaagacctacaagaccttttagaactaacacccaaaaaagatgtccttttcattataggggactgcagtgcaaaagaggaagtcaggaaacacctggattaacaggcaaatttggccttggaatacagaatgaagcagggcaaagactaatagagttttgccaggaaaatgcactggtcatagcaaacactgtcttccaacaacacaagagaagactctacatatggatatcaccagatggtcaacaccgaaatcagattgattatattctttgcagccaaagatggagaagctctatacagtcagcaaaacaagactgggagctgactgtggctcagatcgtgaactccttattgccaaattcagacttaaattcaagaaagtagggaaaaccactagaccattcaggtatgacataaatcaaatcccttatgattacacagtagaagtgagaaatagatataaaggactagatctgatagagtgcctgatgaactatggacggaggttcgtgacattgtacaggagacagggatcaagaccatccccatgggaaagaaacgcaaaaaagaaaaatggctgtctgaagaggccttacaaatagctgtgaaaagaagagaagcgaaaagcaaaggagaaaaggaaagatacaagcatctgaatgcagagttccaaagaatagcaagaagagataagaaaggcttcctcattgatcaatgcaaagaaatagagaaaaacagcagaatgggaaagactagagatctctccaagaaaattagagataccaagggaacatttcatgcaaagatgggctcaataaaggaaagaaatggtatggacctcacagaagcagaagatattaagaagtggcaagaatacacagaagaactgtacagaaaagatcttcatgacccagataatcacgatgatgtgctcactcacctagagccagacatcctggaatgtgaagtcaagtgggccttagaaagcatcactacgaacaaagctagtggaggtgatggaattccagttgagctatttcaaatcctgaaagatgatgctgtgaaagtgctgcactcaatttgccagcaaatttggaaaactcagcagtggccacaggactggaaaaggtctgttttcattccaatcccaaagaaaggcaatgccaaagaatgctcaaactactgcacaattgcactcatctcacacactagtaaagtaatgctcaaaattctccaagccaggcttcatcaatacgtgaactgtgaacttccagatgttcgagctggttttagaaaaggcagaggaaccagagatcaaattgccaacatccactggatcatcaaaaaagaaagagagttccagaaaaacatctatgtctgctttattgactatgccaaagcctttgactgtgtggatcacaataaactgtggaaaattctgagagagatgggaataccagaccacctgatctgcctcttgagaaacctgtatgcaggtcaggaagcaacagttagaactggacatggaacaacagactggttccaaataggagaaggagtatgtcaaggctgtatattgtcaccctgcttatttaacttctatgcagagtacatcatgagaaacgctgggctggaagaatcacaagctggaatcaagattgccaggagaaatatcaataacctcagatatgcagatgacaccacccttatggcagaaagtgaagaggaactaaaaagcctcttgatgaaagtggaagtggagagtgaaaaagttggcttaaagctcaacattcagaaaatgaagatcatggcatctggtcccatcacttcatgggaaatagatggagaaacagtggaaacagtgtcagactttattttggggggctccaaaatcactgcagatggtgactgcagccatgaaatgaaaagacgcttactccttggaagaaaagttatgaccaacctagatagcatatttaaaagcagagacattactttgccaacaaaggtccgtctagtcaaggctatggtttttccagtggtcatgtatggatgtgagagttggactgtgaagagagccgagcgctgaagaatcgatgcttttgaactgtggtgttggagaagactcttgagagtcccttggactgcaaggagatccaaccagtccattctgaaggagatcagccctgggatttctttggaaggactgatgctgaagctgaaactccagtactttggccacctcatgggaagagttgactgattggaaaagactctgatgctgggagggattgggggcaggaggagaaggggatgacagaggatgagatggctggatggcatcaccgacttgatggatgtgagtctgagggaactccgggagttggtgatggacagggaggcctcgcgtgctgtgactcattggatcacaaagagtctgacacgactgagcaactgaagtgaactgaagaagattcagttgttttgggaaaaaagataggaattcaacaacctaatgttgcccataataaagaggatttgaaatataatagaaaatttaataaaacagctgtatcatttttatctctagggcagagggtgtttatttaagagaaaaaacgaatttaaagaattgaatgatttgatttcttcaataattcctcactcccaccccagcttccagtagcctccgcctccttagcgattgtcttgctcagctttgccatgcatattctgtgcacatgtctggtttcagttccaagtgtgtaagtgccagaggcacgatctgagcctcgttcaatgcactctctgtgaacacagttgacatgacaaaaatgtttataagatgtaatctgaagacttttaagagtaacaggcagtatctctcttagttatctgtgctgcgaacttaaagaagttagtagtgaagaaatttcacaaatatgaagaggagattgacatccacaatgagttctttcgaccatacgagctgagtagctttgatgacaccttttgcttggctatgacgagttcagcacggtatgttgtgaattctctgaaactggaagcactggggaactgtgattttcctagtttgtttagctatgtcttcgtttactcttctgcatggctgctgcaggtggttgtccaacctctgaaattccttctgcagttgggagcccattactcaggaggcagtccttctattgttggacagctctccatcctggcctgtcacctttgaacatacttcatttttctgtctcttttggactttaatggggccttttaggaaaatgatgggtctagattaagaaaattaggctccgaaaatcagtttttgaccgttatgatttatactgaagtttgcatttttgtatttactttttgtgtttcacattttcttcaaatgtgatatatgtgtgcctaaacttaatatagtacatggtgaaacatatttcatggtttgtttcctagaagtcactctacattttgctttggtttcagatagaaagtttggaatttttacttgcttgattttcagttatacttgctaaagtttagcagttttaactgtgaggttattgtcattttcctttgggttatacataaattttagtgagtagcaaattctcaaatatgtcatccataaatcatgaggatcaactgagtagttcaaaaagaaaaactaaaccacttacatttgaatggaacattttcaaactgttaagtaggcatttttagtcagattcaatattactttcttttccttcaaaaaatgtaatattgagtcacatgcttggagcagtatccttgccagaagttatgagtcttatctgcataaatcatgtaaccattgcttctttggcatctattacggagtttcgtctggcttcagcagtaatagtaaggtagcccctgtatcatgaggaagtagcttcagcttatcacagtaagtggtaaattaacagtttctatttaaagtgttccagtgttataatgaattaactccagactaatgagacagatgttgatacttcaattcataccaccgtgtttttgataattgtgtctgcctccttaggtgctatagtgtaataaaaacattgtccataaaaccgagcagcttagtgtcttgccctcagttttatgagtttaattttacttgaaaatgaatcatgatatacaaccagagatgaatcttaatagtaattcagataccaattctgctccagaaaacaaaatcttgaattcaaaatcgttgggcctcttaatcagagaaaattcacagtgaagactgctaacactgaagttactgagtgccattaattcatgggatcttatggcccagatcacctaaactcccttgagtatttcacttagaatatatatacctctgaaggctaagaaggaacaggataagaatgtgaatagagagggaagctgataccatctggatggacagtgatttacatggaattttttcccctttcttcagtgacttcatgcctaagaccgttggtattgatccaagtccgtttactgtacgtaagccagatgaaaccggaaaatcagtattggggtaagatttacatgtagaataaaattttaaagatacacataaaataatatagcacttgcaatataactttcacccagaactaataacttcaagtcatatagtttacagcacagtacatacagtgcatccatgggcgtgctaagtcacttcagtcgtgtctgactctttgtggtcccatggacgccaggctcctccacccgtgggattctccaggcacgagtactggagtgggttgccatttcctcctcgagggaatctttctgacccagggatagaacctgcgcctcttatgtctcctgcattggcaggtgggttctttaccactagcaccacctgggaagcccactgcatctgtacagatagcttatttatagcactggggttattaaaacatgtttgacactgaaagtagaatttatgggaatttcagcaacacagtacattttacttaaattagatatttcgtagatggcataaagttaggtagcagatgttatgtatgtcatttaataactccacatcctctgtttcccacaacataaaagacttaggtaaaaatgtatactcgttgtgtttatttttgctggtacccagaggaaacattaaagcaaatgctcagacagaggacttaatagattttctgtgtgttactttaacattgtgtgggcgacgactgttattttattgtatacagtagtacgaggaagagaacaaaccatgtgtaaatctttatgctttgagactggaatgaaacgtgtcctagtgtgtgtatctctgttattgctgttgacctgagtgatccagtgatgagaattctcctaggccctggccagactgtggattctgagtcctaattgtatttgggagtgtgtacagggtcttaattggattctaactacatgtgtgatttatacaatgagatatatactgatattactatttcccagatacactacttaatgtggcttaaatatgtgtcttggaccaggtgttatgaggaatttaaaagaaggaacatcctcaggacatttaggatttaaagagttcctgggacaaatacataaatgaccatttatattagtgtatagttttgaaatgtatcaactttaatttttagtttcataaagtcagaaatgaatttattttctctaatatctaatccatggttagatagtattacatatctcttttctagaaaatgtagaatattatatttcaagtcccttgcagagaattttttcaagtaagaatattaaatatattaaatatttttcataaaatccaaaaatattaccatacatttttttaattaagaaaaaaacagtattctgactactctcaaatttggcactgaaataaaagcaaataatgtatacttttttctgtttcccctcatccactctctattattagaagacatcgtcagcaaacatagttatttactacttaaattgttttaaaacagtttaaaattatagtttatgttcatcagttgctcattactttggtacaagtagtcagctgccactgtgattgataaaaaaattcataggaaggccagaaatacacatggatttggctatcgaccctttcttgatgcttctacaacttataggtaatttcactaatatctcaaacatgacagtcttctattgtactataaattttgaaaatcctgatttcagttaccaaaagggaagacacagtagccaagcggtagaaaggcttttctgcacactgcaagtacatacttgcttattttctgaattcatagcaaagcttaaattcatagaaggtcaggacatgtacatgataaaacattaaacttttcccttcagcacaacttgaatccagacgctagcttctcacagtcatttgcttaacacgtctccaggactaaggctttgggacagggtgatacacggtgagcactgagggttcagtttacagatgcttcacatccgtattcatctttttaaagaaataagagcaacagagaagaagctgtgttacagcggaaaacagccgccagtgccccgccgccgcccagcgaggaggctgtgtccagcagctcggaagacgactccgggaccgaccgagaggaggagggctccgtgtcgcagcgctccactccagtgaagatgaccgacctgggcgacagtgccaaagtgacagaggtgagggacccaggagaggctgctgtccagtgaggctctggacaagcagctccagaatcccgctttcagctgaaaggctgagagcgaggaagagtcacgtcacttccctccaccattctcatgtgcggtgttggaggtgctgcagggatgaatacatttggcaaagatattactgaaaatggtttctgaaatcggtatttttgcttccacgtgtaatagtaaatttcttgtcacttcagaattcttaaagtgaatcctgtccctctttgagcaacccatccacttgaggtccatttgttcccttgcttagcacattacgggaatgcagggtttgcacctgggcctcacaatctctgcctaatcccagtgggaatttcatcctgttgaatttgatatggatagtacattgagggaaaacaaaaggcaagtgaacaatagaaaaatcaaatttagctttaggggaactggatttctagaaagagccagaagtcatttgaggtagacatggcaaataaaatgtaatgatatgggaactaaatctgttattccgggcattggcaaagtgcagcctattggccaaagcagcttgctgccatttttttctaagtaaagtttaatttacaaccagccataccaatttgtttatatgttatctatggttgttttcaccctgtaacagcagaattacgctgctgtgccagagataatgtgacccaaagaacctaaagtatttactgcctgacccttcacagaaaatgtttgccaactcttgcattatacaaaagcaattagtaattaccaactagttttttatctaaaataaactattttagtgaaaatgaaatacagtttttaaaaaatcattaacttagaaatttaatgaatacgttgaaacattgtgatggtttttatgggaaaattcacagggtcattttcttcatttttagaaattattaatgtgctagatgtctaagaagtcttcctgattcccttattttttgaccccagaatgtagtccagcccatgaaagaggtgtatggaataaacctctcagatagcctctcagaagaagatctttccatatatttaaggtaaggtattttcaagagaaattaaggacaaatgcaaatgtattataataacttacatctaatattacttttaaaattgaaagtagtcaaccatacagaaggaattgaattccatttggaatagtagcatttaggtcagattctgaaacaacttatatttggagttaaaaaccctacttactgcctgagactcttgggcccctgaatgataaaagtttatgatacttacacatattttcactgcccaaatataaactgcaaactgaagttcaaatgcatttctgcactcctgcattaacaaattctcaagatcaagtaccttcttacaaaatgaacttgggatattgacagttgaggactttgtattcaatttagcttggggtgggtggagggggtggatgtggcactgtgggagtggtgactgaggaggaaaaaggaagcaatgatgtaaaggtaccaattcagagtgttatagacttttattaggaagacctagctaaaaggtggagatctaccaaaaggtatccataaaatcacgtacataaaaatgtgtctgtgtgtgtttgcagagaatactaatagttatcagattctctaaagaattcctcacccccaaatcctcaaaaacctaaggattaaacacccatttaaacaccccctcaacctagtattaatatatgtattaataattcacaattatttcaaatgaacatgtaagtttggcttatgtaaaatgtaatatacatgattactagtctttaggtctttttttaaggagggtatttgttttgcagaatccactgaactgattatttttcactctcgacttcaaattagtaagatctgctgtagaatatgtaaaatatagaaatatatagcatttcttaactgcaaaagcactggtatgactgcgtatcactgtcctactggaagtcaactgagtcattcagaactcagccacaccctcctcactcctggacacacagtacattcatcacagctgtcacactctgtcactcaactcaaagagtagttgaagtagacctctgtaagcaacatggtctagaagaatgaattatctggagttagtgactaatatgactctacttactgcagagagcataagtatacatgtcagtgatgttcacttgctgaagatgaaagctggacgagactaagctaatttaaaagtttttcattgcactgtaatgatttaataattggtagtttctgaagcacttttcctgacctttaaaaaacctaataaaaactacaggctgcatccctgagggtcagatggatgcatggagcacaggccacaccttggatgggtgtacttgagaaatatcaggggccctttgctataggcatcctctcaccttgttgagcgggcctggggcctgctatggcccttagctacaagtccagtttagtgtggtggaggcttctctgaggaggcatggtgggccagtgaagctcagcaggtggtctcctcaggcccctgtccctgttgaaagtacccttagtagtggctggtgttcacctggggattcttgtggtcctgaggaaccaagtccttgtcctgggatcttagcagcatccttgcttcaggagctgggtctctagcctgatctgccatttctttgtctcttgtctcacccaagcaccatccctctccccttgtttccctctgcttcctgctgcggtcaccctcagatccgcctcaggaacatttcggctcaggttctataccaagttagagtaaacagaatgcaacaaagtaaacgttttctttcatttttatagccatggttatgacctaaactgtaagcattttcccctcctctattcccataaacccactttaacatcaggcatcttgtgtcacatggggccctcttgtgtgcttttctgatgaagtatgtcattcgaacaccggtacagtttgtgtcatctgctgaatttgtggcaggtagttcctttagcttacttttttttacacattataatttgtagatttgtgcagctggggcagagtcaacataaagaagacaagagcagccagcagttctgttccaggtgcccagatggagttataaaattgtaagtactagattagaccttgtaaaaataatctttgtattcatgcctttaagattttgtaagagaaatattgtgaccaaattagtataagcactaaagcatctcctcctggtatcctgttggaggagaactgggaatctatgggcatgcggaagaggctggcagcctgacctgtgcttgaaatgcgccctttagaaatgggattgaagttgctgggggattcccaccagtgggtagggccaggatgaaaaaaacagatctgaccctggggacaagctcctcaagttcactgccagacccctgagggcaggagtggtttttcttttctagcatggtatcttcaccagttcttttaacttgctgtttagtaaattaaataaacactctgacactttaggggttttttaccttgagcgagtaattttaagtcctgtgtggctcagtttctttatctgcaaatgtgataataattcctgcttcatgggagggtagtgacactttcactgagataatgcatacaaagtgcttagatccatgtctgaaatatgttctcattacgttgtgatcatcaccatcgtcacactcttctttgtatttatcattgttctctgcttctggggaccaaacaaagcggaggttgtgaccaggagtagctccctgatgccgtgtgctcagctgagtttcttttatgaaaatgggtcactgtggtgattaagtgaggtggaatatgtaatgtgtctagatcagtgtctggcatagagttgacatttagtaaatgttctcttcccttttcttagtccaactttatcagttagtttaatcaccattgatactgattccctgacttctgtctgtactatatctgtgtgttcctgattgttaagagactactgtagtgatccaggcaaagactggtggcttagagagtagtggctgggagaattttggaaatgagatgaatctaggaaatgtttgggaagtaaaatagagagtagttggatatggaaaaaaggccttaccaaggatggtcgttaggttttttggtttgtgccgtaggtttgattgattgatccattcatccatttacttagcaaataggtacttaatacctattaggacctgccacttatcaaggtaaaggcactgtaggagaaccccacttatcaaggtaaaggcactgtaggagaaccccacttgcctttcaagggggaccagagtggccatgtttaggaagcagttgaatcaactgatctgaactcagaaaagaggctctgggattgtgaatgcatactgatgataactgaagccactggtcaaagatgacaccacttaagagaataacagactgagaagatctacgcgtgagtcttaagggggtctgggtttaacactggcttctctgtccatgggattttccaggcaagagtactggagtggggtgccattgccttctccagagaagagacatagagatggctagtcagagaaggggaaggaaaaccaagattattttatcacagcctccaaaaggtctatttatcccttctttctctactctgtcacgatttttttttctctttttaaaaacataagagctcattaacttatagacaggttttccttcttaggtctagttagcatacggaagtatgagctctcaaatgagctgatatcagaggtggccaaagagggaaaagtgtttaaatgtgttggtaaagtaagagactctgttatcaaattgtattatttgaattgattcttccatttaaatagtatagcacaatttaggaggagcagatactgaagggaatatagcatacaaaataaaagaaaaacatctccccatttctttcaacattgtgtctaccttgatctgtaactggtcttgctgataagttatttttaaattctttttcttacagtatttagtatttgcttttctgagtcttagcacagatttaaaaaaaaaacatgtgaatctcgaattttgttaaccttttccacttaattagtaaagaatctaacatgagtatctttgcacagcatcttcagcaggataacaaagagcttggtaggctttgtattatgttgtcatggcaactgctcaagagtgttgttttttggtgtgtgtgtgtgtgcatgtggcgtgtgcacttgctttaaattgaaaccctataactaggttcttaaaatgtcagctactcaattttagatttttaaagctgtgccagaaccaagagaaattagatttatgtgagatggtccaaatcctcatcttgttatggttcaggttctagtatattttaaaatatagcaagtttttttaagtttatgtacatttgtgtctactgatttctggataattcataatctttatcagtttgtcttgaaattatgaggcaaacaagtactctttttctaaataaggtatgtaacaaccaatataaaatatattgacagtgatcaactggcaaggagccagtagaccaggagctcctgaagcagaggtatggaaaactggagggaggagctggacatggtcacccgtgctcttgcgggacatttcttaggagcggatcttaaaccccaaactggtcagtgtctgcactgtcagcccaaacactcacagttatatcctctttgagcgtgaccctccctttgactcatgccattccctcagtgtgtgggtgctgattagggaaaaacgacatcaggccacacttcctgagcagtgtgtgatgggcactgttctatgtaccttaacctgtatcaactcaattctcacaataactctaggaagtaggtcttaactatcatcttcattttacagatggggaaaccccacagagaagttatataacttgcccaaggtcaaacagcaactgacattcaaacccagacgaactggctgtccatcactgagctgtagatgcctagtgttaccaactgcttttataaccacagaggtaaaaatactgggttattagtgtgaacagcctttattttgatcctctgacatgatctggcttataggtggctccagaggcaaacatagtgtctctgccctgttgagcttgaactttttttttttatataatatccaaagagaatatgcctttattcttttcctgatcccgagcatattgtcttaaatgtagacttgcttcctgggcaggcacactttgcttgattcataacatggtatggaggttaagacgttctgggaacagtgttactgctctttagggttattgccatcctaagttgtaagttcccctgctgcctcttgaattgtagctaaattgagtgctctgtaaacgtctgttgaaatgtgctgactctcactcccgcctccattactatccgagcatgcgcgggggcgccgtgagcatctctcatggcccacctcatccatccttgatcacttgttagttcttcccctattctgcttcctgctcataaaccctctgccctctcctgtttgtttccctactaccttctaatagaggaaaagagtgaacacatcaagggtttagcacttttttcctctctgtcctgcttccacttgcacctgtgaccagatgcagagtgagacaggcctgcagggaagaacttgctgagcccgggcaggtggggcactgtattcaggaccaccctgccctcattgtacattcccagttctcagcactttttaactaagcaatatatgccaatcagtggaggttaagaagaacatgaacatgtgtattattagtgcctactattccatggctcacttattccaggtgtatgtctcacttgtttaagcatttgtctctaagaaatggttcacaatgtaatacgtagagtttggtaaaaactgtctaatttaggatccttccaatggcggatgagctaaataactgtttactgtattaggaccataggttgaatttatttgctaagaacatctcacaataaacagcatctgctgaccttagagggaatgcccctgggttccagctttgcctaggggatcctctcactcatcagaggatgctcttatacagagtcagggcatgttttcacacccatgaagtgagcatgacactaggctgtgcttagctcaactttgttgactttccatggtgtcactttcaatgctgtgtctctatacacatgtcactccagggttcccacgccaccattgattgcatctagtcctctgcagataatactctcatctccgctgcaggctaaaaaagtgtttaatgggccactcttgttatcttttccaaacacccaggggtgcagtctttaaaggtttaaggatgagagcagctgggaagcagtgatcaatgattagcagctagtttgctccatgggagggagatgatggcgacagcagctcctcagcccaaggaaactaggctgtgacctttcctctaaccccagaaactaccccagaagtctttctttctctttgactctggcctttatttttctctctttaaccctctctggcttttttatatatacttttctaattatctctttctgcttccccctaaccccctgtttattttacctctctctctttctccctcttttttcctttgccatcccctctccaacccctctggtatttttaactctgtttagtttttaaaatacagtagtctctccaaaacacaaatctctttcctgtattttaggatagtgcttttcagattgtaattctagactcattagtgggctatgaaattaatttagtaggcttccatacaacaaaatgaaaagaaactgaactgagtccagtgaaaggctctagtgcatggcacaggggttaagtcttgtttcatgaaattttatttctatacataaatatagcattgtgtaccaatctgccatgcaaaatgcatttctcactgtggataacagtcacagattgagtttatatgaatgcaccttttctgagaccaaatgaattataaatcttaactctgttcccattatccaggcacttaatgaatgtttgttgtttgaatgaaaatgcgtgaataatttctgtttggaatagacaagagagagatcaggaagaaaagggatcagaaagaggtgtaagaggtttctgtggtgtatccaaagtgggtaaagtaaatgcaggctttggaaaatacactctcattacttacaatgagttgagcactgagatgaccatgcaaaggaaggaggtagtaggaagctccagctgaaagtcaaaatgaaaagctattagatgtataaaggaaagacagaaaagtgaatgtctctttgtttgaatattatctataatagtacctgcattctgaatattatctattatagcacctacatactatgttaaacaagaaaatttaatggaacagggtaaattttttgaacctttcagagaaggctaccctgaaaggtttctagcatataagaagcaataaatggaaatttaattgtaggtaattgtgtaattaatttaatgtagctaaaataactttgatattttaaaaatttagtatattgactattttattttggtgactacaaagcataccatttatggaaattctgcaggttcacatgaggccttgagtctccaccctgccaatataggtttttcttattttccaagaacctagctagtgattctataaggtaagatatacttgtgtgtgtgctctgttgtgtctgactctctgcgaccccgtggactgtagcccgccaggctcctctatccatggaattttccaggaaagaatactgaagtgagttgccttttcctcctccaggggatcctcctgatccagggaccaaacctgcatctcctgcattgttaggtatattctttaccactgtgccacctgggaagcccaaggcatacttctgtaatacagtaaggcattataggcactatatgccaggttaggtatatgtacattaatacacagttgagtgagagagagagagagagtctctgcttctgagggtttccctggtgtcaggaaattccaggtggtgggaggtgctgtgaagaggaagctgtgggagtgcaaagaagaatacaaatcagattcctgggcaggcttcacccaggctacattttaagggaaaatggagttatctggttgaagaaggcagagagggcaaaagttcaagaccacacaccacttttggacacccatacagaattcagtgtctaatgcaagaggattttcagtgaggaggccagagacacagaccaacaggaacagtcagaaagagatgctaggtgagagagagtgactcttgtcctagaagcctgttttaatcagggatgtggtaaaagttactgtggaaatagcatggagaatggattggaggccaagagagaaacagcacatctattagaaaccccagggcaagaaagtgattggagcctgcgtttggctgctgaaataaagggatttattttgtaagggtagattctgcaggacatggtacaatttggtaactaattaggtgtgaggaatgtgttagaggcaggagggttctacctatgttgaccagatctggtcaccagaattggaaatacaaatccaagtctgggacaatgataggatccggtgattgtctggagctccgggggatggtgagggacagggaagacgggcatgctgcagcccttggggtggaaaagagtccacacgactgaacaactgaacaacagcaagaggttttacagagattcaatgattttgtgggtgtttttttctgctcttgattttaaaagaaagtaagttaaattttgtatctttctttgatggggtccaagttaaatagattattatatgtgctttttaaatgttttggagattcatggtcctattaaagggggggatccttcaattactgataaaaatgaagaatttaggggggttaaatgtattgttagcccttagaatacttatttttttcacatgaacaagcaggttaatcctgagggaacagatctgcatatctatggccacgtgaagagtattactcattggttttcttagctctgcataaggaatcacattttgtaactgtttaaccttttgttattttggtagtttaccaaattaccatcaattctgtgggtggaaggtgagtgggatggttttgggcagatggagtggttactgagccttgtgccatgtcactgtgccttcctaacagcctttccttttggcacaatgacgatgtgagcccaggtatgatgtattcattgcccttgtcttctctgagcttctgcaagaagtctttccagctaagataaaattttggttccaatacaagaaaaaagcatttcaattttatatttaaatatagatctgtcatcatatgtgtgactcagaaccctttggggcttttacacatgattttaaaaataaagtacaaatcccattaagtcctaatttgtgtttagaatccacagataggcatcaatagtcttaatgttggatcagtaattttctgtgtttagcattttgatattatttttcttattgtttatgaagaaatttaagaaatactaccattatgttttcaaaattaaaggtccattcattttataaccatccttctgtcatccctcccaatttaatgggaacagaaagtccttgaattaaaaaaaaaaaaagctgtggtatttttaatctgaaattaatttaaaactcttaagttacttgagtgcaaggcttacctgcctttgtgtctgcagttcatagcataatacctagtgtgcagtaagcattaaataaattaggaatgagtaatattcggtagtttaacttctttaaggaatgtcatgcaatatttaggtgtgatggaaaaaaaaaaagaaatgtcagggttaacaaattgaagcagatggcaagacaaatgataaatatttgttagctttcatttcactatagtatatttccagttttagatataacaacacagggttcttggcagttgtctcatgattgtctcaactgacaaaccattgatgttcttattaattcatatgttagtaggatcatgattttcctttaaaatttttttcagctttattaagatagaattgacatataatatgtgtaagttaaaggtgtacaatgtaataatttgatgtatgcatatactgcaaaatgattaccataataaggttagttaatgcaaccatcacttcacatagtaacagttgtacatgtgtgtgtgtatatgtggtgagaacgtttaaaaatttactcttagcaacttttaaatgtacaaaacagtattattaactatagtcaccatgctgtatattacatctccagaagttactttataactaggagtttgtacctttgactaccttcatccatttcccctgtccctcagcccctgcctctggcagccaccaatctgtttggggttttttggagggtagagttgtttaagattccacatactagtgagatcatatggtatttgtctgatgacttcacttagcaaattgccctcaaattccatccatttaacataaggcaagacttccttttttatatatagctgaataatattcctttgtgtttatatgtaacacatctttatctattcatgcattgatggacactgaggttgctttcccatcttgacagctgtcgctaatgctgcaatgaacagggggtgcatatatctttttgagttagtgttttttgttttcttcagataaatagccagaattgtgattgctggatcatatggtagttctatttttaattattaggggaacctttgtattgttttccatagtggctgtaccagttcatgttcccactgtaatgaacaagtgttcccttttctccatgttcttgctagcacttgtcatctctcctttttgataatattctaataactgcgaggtgagctcatcatggttttggttttcatttcaccgatgaaccttttcactttgctgttggccatttatgccttctttgggaaaacatctattcacattctttgcccatattttagttggattgtttttgttctgtggagtggtttgagttcctatatattttggctgttaaccccttatcagatacattgtttacaaatattttcttccagtccgtaggttgcctcttcgtgatcactttttactctacagaaactttttagttggatttagccccacttatttttgcttttgttgcttgtatttttgttgtcctatccataacatcattgacaagaccgatatcaagatattgataccaatatcaagtgttgtattaagaaaatgatggtttcaggtctaaatccagttcttattttgtgtgtggcgtaaggaagaggtccattttcactttttttggatgtgaatatccagttttcccagcattatttattgagattattttttctccattgagtattcttggctccctggtcaaatactattcagacatgtatgcataggccaatagaacagaattgagagctcagtaataaacctatgtgtcagtttttatgccagtattgtttatttctttctggattgctttggctgtttggggtcttttgtacattcttaaagctcaagtgagcttcttgcaggcagcatttcattggatcttcttctttattcacccactgtatctctgactagagaattcaatccatttacatttaaagaaattattcataggcaaggtcttactattgccattttgttcataattttctgttttgtagatcttttgctccttgcttcctcttttgatattttcctctgtgattggatgactttttataccaatatactcagactcctttactcagtcttttttgtgaccactacagattttttttcctatggttccatgaaacttacataaaatgtatttgtaatattctatttttaaggtgataataacttcagcagcatacagaaactttgtacttttatatctaccccaccatccattgtgttttaggttactgatgataccattcacatctttttattatatacagcaagtcccctacattcaaatgagttctgttccaagagcacattcataagtccaatttgttcataagtccaacagagttagcctagaatatccaagtaacacagtagggtatgtagtactgtactgtactaggtttataatacttttcacacaaatacataaacacaaaaaagaaaacatttttaatcttatagtacaatacagtaccttgaagagtatagtagtatcagctatatcaccaccgcttttacacttgcttctggacatcctgggcttgaaataaagatagtgtactacttactgtattctgtacagtactgtacaataaagtagacaaaaacacaactacttgtagaggatacatgacatgacagtgtacaccagacacgtgaactaacttacatgattggacatgcaaatgtacattcacatctttgaaagtctgggacttactgtgcccaataacaaattattctaattatggttgtttttaatacgtcttaacatttaaagtagagttgcatgcaaattatgcaccaccaatacaatgttagagaatctaactctgaccatgtgtttactattaccagtgagatttacacattcataggtttttgcaatgttaaattagcatccttttttttttccactgcccaccaagttccctggccagacagggctaccagcacagctctgcagaaggaaagagcctctggctgcaatctctgatgagctatagctgcaaagaggaatgtgttctgccaatatctgagtgatggttactgtaaacctggccccccttctccatgtctgagtctccatggtcgagccccacagatttccccagtgatccctgtgaggggagacccaagtggactttctgggaagcaccctacagtgctaggggagctgaatttttactttgggttccttcttctcccccttcccctgcgccccccaaaagctataggcccaggggccatttcatgtggccctgtaactatccagagaatgggcaatgcagttggagtgtagaccttcttcttacctttgtaatgctttcctttttggtctctgtgggtccaagggggtgcccccacctcaccccctgggttctggaattttcacaatggtaacttgtttaagtacctatcttgtgagggggaggactttggggacaacctaccttgacatcttgatccatgattttctaattttcagttcagattgctgaagctaaagaatcccttgatcaacatgcctagagtcaaatcatgatttcttgatttccatttgcctgttgtttccaaatacgagaaactctgaaagttttgccttgtttttatatttaacttactcttagaatcttacaattaaaaaaaaattatggcagtttgatctcagttgcaaagaaggaaactttttacattgaaaaaaaatcttccctcgcaaacccacttccatttacttgcaaaaactgtataagatggtttacatccgttggtaaagggtcacagtttctattctgtatgtgtgatgtcatcaaaacactaattaagtcccaaaatatctgaataaaatatatcctgttcctcatgcagaaaaaaagaggccttgagactatcttgactttcttaaccattttgttttactatttaaaattgtgttagaagttcattacttaatgtcaaaataaagtcaattagtgctttttaagcattgtacatcaaagtaatgcctctttaaatataaaactcttagacttatttcaaaggatgaatagctaaattagtagttcctttatcatgtggttggaaaatagggaagtaaattgactaaatagagttagtatgttcagatacatttactttcagtaatagagctagggaaaaaaattctgatcatctcagaaacatcagtacatatttagtagatagaaaaagagcaaaatataactaggtatgtttcggggaactctaaataaaattatatttgaagcttctgaaaccaataactttatcctttacaatctattctactcattattactcttacttgcccaaagattttgcttttacttggtttgaatggttttaacacatatcattgaacataccagtaggtattaactcttaattgcattttctcaggctgtaacgaaatcagttactggttttatatgtcatgtaaatgatacagttaaattgaatttattgtttactagtttattatttcattttagcatttaatttctgtttttacatatggaatcttggatatttcccaacagtctcatcaggagaaaatcagctgatgtcatctgaactctttgcatatttctttcctcccaaaacctgtctgtaatgacttcaagagactcaaaaatacagtcggagttgtgaggaagggtgcaagacagcgtactcagaatgttccatttgtgcacacatgcctttagcatattaggaccataacgtttggggactgggagatgtttagagatcactggactcagtcctctgattttctaagaaaacaaggcctgcagaggatctgcagttcattcagttatagaattcttaaatgatgaatttggaactcgaacttcatttctttgggacttaaagccaaagtccaaaaacgtgaaatcctgagccaggcagctggaatttctccaacccatgcttctattgggtgcatctaaaagtggaggagcctcccacaggcagcatggacagtaacaaatagggacaactagcacctcgaaaccaaagcaagttataaaaagcttaaagcagtgaggctcacatgtggtctgcaaactcctagggagtcctccagcccccgctgagtcaagtccttctctggcctggctcctaaaatgaatgtacttttatccccagccaggccttcaggattggagtggccatgagggaagggtcaaggggtgtgtgtgtgtctgtgtgtatgtgtgtgtaagagtgagaggcaggtaggctagttccacttaatttttagtgcttcatcaaggaattacgtaagtatcaactcttgaatgcatgtctttttaatatgctttgtggcaaaatgggagatgcacataaaagaattctgttgtacatcaaaatatggagattgcctcaaggaaaagcacatatgagagctgaacccattgctcttttcatggaacactaattaaaataatgactgagagacaaactgtgagtattcagacttgagtatttggcagataggttttcaaaaatgaatacagtaagcctgtcacttcaagaaaaacaattgaaagtacttattaccagtgataaagttagatatttcaagccaaaaatcagaattttggaaaacttgtatccatcatcatgagcaatacttaaaagatttttctggtgagatgagattggtaacgatcttaaccaatgtgattttacttttttaatgttgtataatgaaatgtcttaccacttggaggatcttcataataatgttgtataatgaaatgtcttaccacttggaggatcttcataactcagtcaatattattgaaatgaccaatgcatgcttttaaaaaaatatcatccatggataagaaaacttattccaaatgtaagatggaccagtggagtctaacacattattgactggagacatattaatacatcttttgttacccaaatgttactgaccagaggcgttatcaatccatttttagagactgatatattattaactgtatcaccatgcaaagttgttaaagcttaaaattaatcaagagttcattatacatcttatgattgtcattgttcacattttgctccattaggtttttaaatttatttttaattgaaggatagttgctttacagtattgtgttggtttctaccaagcatcaacatgcatcagccataggtttacccatgtcctccattaggtttttattccaacattgtttatattataaatgcaagttttttaatataaatttatttattttcattggaggctaattactttacaatattgtattggttttgtcatacatcaacatgaatccaccacaggtatacatgtgttccccttcctgaatccccctcccacctccctccccgtaccatccctctgggtcgtctcagtgcaccagccccaagcatccagtatcatgcatcgaacctggactggcgattcgtttcttatatgatattatacatgtttcaatgccattctcccaaatcatcccaccctctccctctcccacagagtccaaaagactgttctatacatctgtgtctctcttgctttctcgcatacagggttatcgttaccatctttctaaattccacatatatgcgttagtatactgtattggtgtttttctttctggcttacttcactctgtataataggctccagtttcatccacctcattagaactgattcaaatgtaatctttttaatggctgagtaatactccattgtgtatatgtaccacagctttcttatccattcatctgctgatggacatccaggttgtttccaagtcctggctattataaacagtgctgcaatgaacattggggtacacgtatctctttcaattctggttttctcagtgtgtatgcccagcagtgggattgctgggtcataaggcagctctatttccagttttttaaggaatctctacactgttctccatagtttagctgtactagtttgcattcccaccaacagtgtaagagggttcccttttctccacaccctctccagcatttattgcttgtagacttttggcttgcagccattctgacgagtgtgaaatggtacctcattgtggtcttgatttgcatttctctgataatgagtgatgttgagcatcttttcatgtgtttgttagccatctgtatgtcttctttggagaaatgtctatttagttctttggcccatttctttttattgagtcgtttatttttctggaattgagctgcaggagttgcttgtatatttttaagattagttgtttgtcagttgcgttatttgttattattttttcccattttgaaggctgtcttttcaccttgcttatagtttcctttgttgtgctgaagcttttaagtttaattaggtcccatttgtttatttttgcttttatttccagtattctgggaggtggatcatagaggatcctgctgtgatgtatgtcggagagtgttttgcctatgttctcctctaggagttttatagtttctggtcttatgtttagatctttaatccattttgagtttatttttgtgtatggcgttagaatgtgttctagtttcattcttttacaagtggttgaccagttttcccagcaccacttgttaaagagatttgtctttaatccattgtatattcttgcctcctttgtcaaaaataaggtgtctataggtgcgtggatttacctctgagctttctattttgttccattgagttttttaaccataaaattttcaaaaatgatgcattgtgaaattttgagtgaagactttttcagtgaattttatgcagattctttctttggctgtccaagcgacatatatactagtgtcttagaagatgacagttcttcggaatatagttctgatacagacagtatgaatattaaaccaataaaaagacaaaaaaccttagtgattgattctgatatggaaagtgaaaatgaaactcacagtgatggagaatgctattttggttctagaaaactttatagctgtgtcagtgtaaagtaactattggatgtaataaccaacaaagtgttaggaaaatactaaggttaatttttggtaataactttttcaagtcggttgcttctcaaacaaacttgtatcaccaacagaatgaaaaaccatataaaaagtataaggctttaaaatggactgatataaccagtggtgacatgaaaaagtttcttagattaataattttgatgggacaaataaagccaccctggaaagaatattggtcgactgattccttatttgatatttgaaagatttatgatgagaaggtttgaacaaataatgacattactttaatggtaactcagaaactctacttcctggagacagaatttcaacagtctaacctcttttggattattttctaccaaaatttcaatcaatatatatatacccaaataagagctatcacttgatgaggcagtgataaagtggagaggatcaaaaaacctataatcctggaaaagttacaaaacatggaattttggtcaggaagtttagtgaaagtgaaaactggatatatatacaaccttgagattcacacaggtataagaaagaaactaggaaacagtattattggtcctacaaccttatcttggttcttggcactatatttaccaagacaattattatattacaacagtgtatccatctgaaatattgttgaaaactaaaaccagagtctgtgggactaaaagagagaatcatgtttctacaaaccaattgaaggagaaatctaaaaatctacagagaagagaaatgacatttttacagaaggcagaagtgattgttcttatatggaaagacgaggctagtctgcatggtgacagctatccatgatacttccatagcatctataagaacggaagacaggaggactggccatcacataactaagcccacttgtatattacagtttaataaatatatgaaagaagttgactgatctgatcaatacccggcaaactacaatatcttctggaaaactcaaaaatggtataaaaaagtgggtttctatttgagtaattgtggtttattcaatgcatttaaaatttactgtagccttaatgcacagaataaaatgagtttttgttagcagtaactagagaatgggtaactgaccattctggtgactgtagtcccacacctagtctctcttgtggcatttctaaaaaaaactcctgacaaagacctaccttgtcaactaccagatgaaatcaatgaacatatcctagaggaaatagtacttataggactaaaagaacaaaatgctgccagaaagtttagagtctgttctgccagggaaaagtgcagtgcaacacagtatatttgtaatagatgttctattctcctgcacagaagtgcctgctatactgcctgtcacactctaaagaaatattagaatgctttagtaagacatgtagagtttcaaataactacattaagtgcaaaagaagttgctgatatttactcaaacacaggtgtttcattattatttatataacaaatcattggccacaggcattagtttctgcaaaaatcccctgatcaataatgtgttaagatcaaagtatgtgaaaagttcattgatatgattttagattctagattgcaactaacctttaagaaacttgtcaagttttggtgtagtatcaaagaaaaatattctcagttatctggaaagactgttaaaacccttcttttccaattacattgagttcagatgttcctcatatgtacatttcaaccaaaacaatgtattatgaccaattcagctagaagcacatgtgagaattcaattgtcttgttataccaaacattaaattaaaagatgcttgctccttggaagaaaagtattgacaaacctagacaacatattaaaaagcagagacattactatgcctacaaaggtctgtatagtcaaagctatggtttttccagtagtcatgtacagatgtgagaactggacaataaaaaaggctgagcactgaagaactgatgtctttgaactgtagtgctggaggagactcttgagagatcaaaccagtaaatcctaaaggaaatcaaccctgaatattcattggaaggactgaagctgaagccccaatactttgaccacctgatgcgaagaactgactcattggaaaagaccctgatgctgggaaagattgaaggcaggaagagaaggggacaacagaggatgagatggttggatggcatcaccgactcaatggatgtgagtttgagaaagctccaggaaatggtgagggacagggaagcttggtgtgttgcagtccatggggtcacaaagaatcagacaggactgagcgactgaacaataccaaacgctgaagagatttcctaacatgtaaagcactgcttccttttaaattttgttttattttggaaaatagtatttattaggtttcttattattcttaaatgaagtaatagaaatttaaaatttctcatacagtaataatcaataaatatagcccaatacatcaaagcttaggggaggtcctcaatgtttttaagaatataaagggatcctgagactaaaaaggtataagatagattaaaaagacatagaatttatgtcaatattagcaccaaggcaacactacattatagccttgccagctgaatgatattcctgactgtttgaagaaatattcatttttctatagttttttattgtttaagaaattaaggaagcatatagaaacctttaaaaggaaactgtcaaattgtttgaacctcttaggatactttcagctctgagtaacagaatatctgacttacctggtttaaataagataatttatctttctgtttcactgaaagactacagatggggcagcctccagagctgctgatgtagaagcacccagattctttccatttttctgctctcccatcttcagactggcagcaagatggctgcagcaggtccaagtacgagtcagacaaagtagtgtacgagggaggagagggatgttttccctgtgactcctcctcaggaacaaggagtcagaatctgcccagtggacttcttctcgggcctcaatggccagcattgggtcacatgccagtccctaaacttgtcactgccagggtccatgggcttactgtgactggtgtaaaataaccagttgggggacatgaatataaggaagttatccacaatgacttagttattaaaaacaataacaagaaaatgcttttgtacttactcagttaactggaaatgttcacaggtgcccagtaagacaggcagtgtgaacccgtggagaggatgctaagcctgagaatcaggagccctggggcctggtcccacagctggcactgttgaggtatgggtccatctctgtcaggaccctgctccctctgtaacatgagggcttaaactagagcactggttctgatgacttctgattcattggtttctttattcactcactccttcattcaatggcttttttcacagaactagaacaaaaagttttttaaatttgtgtggaagcacaaaagaccccaaatagttgaaagcaatcctgataaagaaaaatggagctggaagaatcaggcttcctgattgcagactatattacaaagctggttatggtactagcataaaaacagaaatatagatcaatgaaacaggatagaaagcctggaaataaacccacacacacctctggccaattaatctgtggcacaggaggcaagaatatacaatggaggaaagatagtctcttcaataagtggttctgggaaaactggagagctacatgtaagagaatgaaactagaatatttcctaacaccatatacaaaaataaactcaaaatggatcaaagacctagatgtaaggttggacactataaatctagagaaaaacataggctgaaatgtgggacctaattaaacttaaaatcttctctacagcaaaggaaaccataaacaaaaggacagccctcagaatgggagaaaatatttgcaaagaaagcaatgacaaggtattatcctcccaaatatacatcagcttatgcagctctatatcaaaagcaacaacaaccaacccaataaaaaaatgagcagatctaaatagacagttctcctaagaagacatatagtggtccaaacagcacatgaaaaggtgttcaacatcacgagttatcagagacatgcaaatcaaaactacagtgaggtattacctcagaccagtcagaatggccatcattataaggtctaaagcaataggtattggagaaggtgtggagaaaagggaacccttctacactgttagtgggaatgtaaattggtacaatcactatggagaaccagtatggaggttccttaaaaaaataaaaatagtactgccatatgatccagcagtccactcctgggcatatatccggacaaaaccgtgatttgaaaagatacatgcactgaatgttcatagcagcactattcacaataggcaagacatggaagcaaactaaatgtccattgagagaggaaaaaggtgtggggtgtgtgtgcgtgtgtgcgtgtgtgtgtgtatatatatgtgtatatataagaataatactcagccataaaaaaagaatgaaataatgccgtttgcagaacatggatgaacctagagacagaggggcctggtgggctgcagtccatggggtcgctacgagtcggacatgactgagcgacttccctttcacttttcactttcatgcattggggaaggaaatggcaacccactccagtgttcttgcctggagaatcccagggacaggggagcctggtgggctgccgtctatggggtcacacagagtcagacacgactgaagtgacttagcagcagcaaagactgtcatactatagtaagtctgatagagaaagacaaatatatggtatcactcatatgtggaatccaactttttaaaacaagatgcaagtgaacttatttacaacacagaaacagatacacaaaaacaaacctaccgttaccaaaggggagagataattcaggagcttgggattaacatacactcgctactatgtgtaagatagataaccagcaagaacctatgtagaacacagggaatctccaatattctgtgataacctatgtaagaaaaaaatctgtgaaagaatgaatatatgtgtttgtataactgaatcactttgttatacccctgaaagtaacacagcattgtaaatcaactatactccaataaaaattttatttatttgctgtgtcaagtcttagtttcagctcatgggtgcttcatgcagggggcgggaggcgcacggactctgtacttgtggcactggctcagtagttgcagcccatgggctcagttgctgctcagcatatgggatctcagttccccaacgagggctggaacccatgtcccctgcattggaaggcggattctttaccaatgaacaaggagggtagtccctccagtaaagttttaaaaatatatagagtgcttactctattgtggaagtcactgggaaggatacaaatatgcactagaatgttgcccatttaatcacaacagatgttcttcctcctatactacacacactgatagccccaggggtgtaagatccaaattgttttcactcatagaataaattgtttactgccttcggcaaatagcacttgccacagagctcattagccagcagttacatcatgaaagttctctctcatcttattgaagtacaaacgatattcagaagtgaggacatatcctcacaagtatcttctgcagaagataagtctttgtctcagggaagatgctcatgggcctatctgtgattgttgcagttccctcagtatcagaaagagtgtgatgcagagaaacaggctgtgaagagaacacaaagacagccacgagaaatgagaccttttctctgaatacccacaggcaggcttaggttttatttttcagataagatgcttagaaaggctttatttatttaaagcctttatttaaagctgctaaacatttgcagacttttctcatgtgcaaggttggttaatttttcatgttacatgaagtgttaagatagctgggagaatttatcttagagcttaaaatcatgtgatcattacctccagtaatatttgaattactgtcaggtgaagcagggcttttgcaagttgttttgggatcaataagtagaatatatagggaggaagatttacggtcactgaacagaaaaatctttccagcgattagagctatcaacaatgacatgtaaacatcccattattaaaagtcacaaattctatcactgaaagtcctcaaatagaggctggataaccttctaccagaagtgtagtggagaactttttcacataatctgagtttagctaagattatttggaaggaaggtcatctctaggattctgtaatatcacagccatcagacatcttctgatggctgtactctggtcacagagagtacatgatttatttattcaccgcatttattgagcacttatatgtcactcttctagacactgaagatacagtaaagaacaagaatgacaaggtctctcaaggcactaatgttctagggtaggcagacaagtactgaactaattacaaaacaatttcatattaggatacatgccttgcagaatacaaaccaggatgatgggagagagtggttgggcaaggaagggtcaagggccattttaggttaggctttgagggaaagtctttttgaggaattgaggtttgaactgagacctaaatgcaggggaggcatctgtcctgagaagactggggaagactgttcaaagcggagagaacgtgtgtggaagaccagagcaggaacaagcttggcatacagatggccagtgggcacatggaaagatacacagcatcagcttttattagagacatgcaaatcaaaactacattgagttatcacctcacaccagtcagaatggccatcatcaaaaagtcgacaaatcataaatgctggagagggtgtggagagaagggaaccctcctgtactgttggtggcaatgtaatttggtgcagccagtgtggaggttccttaaaacactgagagttgccatatgatccagcagccccactcctgggcatattatctggagaaaaccacactttgaaaagatacatgcaccccagtgttcactgcagcactatttacagtaaccaagatgtggaaacagccaaatgtccatcaacagatgaataaataaaggtgtgacacatataccatggaccgccgctgctgctgctaagtcgcttcagttgtatccgactctgtgcgaccccagacataaaaaagaatgaaataatgttatctgcagcaacatggatagacctagagattatcatgttaaataagtcagagaaagacatagatcacttgtatgtggaatctaaagaaatgatacaaatgaaattatttacaaaatagaaatatagaaaacaaacttacagttaccacaggggaaagtgggaggtgggataaattaggagtttgggattaacaggtacacacaattatatatagggcttctcaaccggctcagtggtaaggaatctgcctgccagtgcaggagacttgggttcaacccctgggtaaggaagatcccctggagaaggaaatagcaacctgctccagtattcttacctgggaaatcccatggacaagaggaacctggtgggtcgcaaaagagtagaacacaacttagccagtaaacaacaactattatatataaaataaataaggtcttactgtatggcacaggaaactatatattcaatgtctggtaataaaccataatggaaaagaatctgaaaaagaatacgtgtgtgtgtgtgtaaactgaatcactttgctgtacaccataaactaacattgaaaaccaactatacttcagttttttaaaagcatatggattaaaatacagcaaaaatattgcattaaaaaaagaagcaaacaaagtcaagggagacgcacagagggctgtgttttcggatggagtaaggcatagataggggccagatctcaccaaagcttagctgttacttatccagtgagaagcatggggtgtagggggtctgggggatattttcagtgagtggcatgctctgatgctgtatctaaaaggtgactacgggtgctttctggagggtaaattgtaggggccagagatgtaagcaaagaggggaacaggaggaaactcaagagaagtgtggtctcacagaagccaaaagaagaaactatttcagaaaggaaagagtgggcagcagtcttgaatagggaaaaattattgaatagggaaaaattatcagggaggtactgatggccttgatgagcaattgtttatgggtggtagctttgcaagccctcttcagtgaatttaggaaacattgggaagcgagtaagagaacacagggagaagaaaccattctttcaaaaatgcgcggaggggtgttgagacgtaggactgcctttggaggatatggagtcaaggcctcatttctaaaataagagctactacagcagctgctccatgtgctgacagatgggggtcagcagagaggcagactctggggatgctggtagttaagtgcagaaggatcctcaaaagggggactgtgaactgttttgccttgttattgaagttgaaaatggcattacctttattgattagtttgtagtttttggaatgttcttatattaagttgaaccatatgaagttaccagtatgcatacattttgacctacagaaacatctgtggcaatataattctacctgaaagaatttggattttccaccttaacttagacaatttctctcataggactttataagtttatatatattttaaaattttatttaattgaaggataattgctttaagaattttgttgttttctgtcaaacctcaacatgaatcagtcataggtatacatatatcccctccctttgaacctccctcccatctccctccccatcccacgcctctaggttgagtttcctgaaccatacagcaaattccctttggctgtctattttacatatggtaatgtaagtttccatgttactctccatacatctcaccctctcctccctcctccccatgtccataagtgtgttctctatgtctgtttctctattgctgccctgcaaataaattcttcagtaccatttttctagattccatatcatgcattagaatacaatatttatctttctctttctgactcagttcactctgtatactaggttctaggttcatccacctcattagaactgactcaaatgcattccttcttatggctgagtgcatgtgtatatgtatcacaacttccttatccattcgtctgtcgatggacagctaggttgcttccatgttctagctactgtaaatagtgctgcagtgaacactgggatacatgtgtctttttcaattttattttcctcagggtatatgtctaggagtgggattactgggtcatatggtggttttattcctagtgttttaaggagtcacataccgtcttgcatagtggctgtatcaatttacattcccaccaacagtgcaggactgttcccttttctccacaccctctccagcattggttgtttgcagactttttgaagttggccattctcactggtgtgaggtgatatctcattgtagtttgatttgcatttctctgataatgagcaatgttgagcatcttttcatgtgtttattagccatctgtacgtcttctttggagaaatgtctgtttatgtcttctgcccactttgtgattctgtgttttgtttttctgttattgagttgtatgagttgcttatatattttggaaattagtcctttgtcagttgtttcatttgctattattttctcccattctgagggttgtattttcaccttgcttatagttcctttgctgggcaaaagctttgaagtttaatcagatcccacttgtttacttttctttttatttctattcctctaggaggtggatcatagaggatcttgctttgatttatgtccccaagtgttctccctatgtttcctttaaaagttttacagtttgtggtcttaaatttaggtctttaatccactttgagtttatgtttgtgtatggttttaggaagtgttcaaatttcattcttttacatgtagtcacaggactggaaaaggtcagttttcattccaatcccaaagaaaggcaatgccaaagaatgctcaaactactgcacaattgcactcatctcacacgctagtaaagtaatgctcaaaattctccaaggcaggcttcagcagtacgtgaaccgtgaacttccagatgttcaagctggatttagaaaaggcagaggaaccagagattaaattaccaacatctgctggatcatcaaaaaagcaagagaatcccagaaaaacatctgtttctgctttattaactatgccaaagcctttgactgtgtggatcacaagaaactgtggaaaattctgaaagagatgggaataccagaccccctgacctgcctcttgagaaacctatatgcaggtcaggaagcaacggttagaactggacatggaacaacagactggttccaaataggaaaaggagtatgtcaaggctgtatattgtcaccctgcttatttaacttctatgcagagtacatcatgagaaacactgggctggaagaagcacaagctggaatcaagattgctgggagaaatgtcagtaacctcagatatgcagatgacaccatccttatggcagaaagtaaagaggaactaaaaagcctcttgatgaaagtgaaagagaagagtgaaaaagttggcttaaagctcaacattcagaaaacgaagatcatggcatctggtcctatcacttcatgggaaatagatggggaaacagtagaaacagtgtcagactttatttttctgggctccaaaatcactgcagatggtgcttgcagccatgaaattaaaagacgcttactccttggaaggaaagtaatgatcaacctagatagcatattaaaaagcagagacattactttgccaacaaaggtccgtctagtcaaagctggtttttccaatggtcatgtatggatgtaagagtgggactgtgaagagagctgagtgctgaagaattgatgcttttgaactgtggtgttggagaagactcttgagagtcccttggactgcaaggagatccaaccagtccattgtaaaggagatcagtcctgggtgttctttggaaggactgatgctaaagctgaagctccaatactttggccacctcatgcgaagagttgactcactggaaaagaccctgatgctgggagaaatcaggggcaggaggagaaggagatgccagaagattagatggctggatggcatcactgactcgatggacatgagtttgagtgaactctgggagttggtgatggacagggaggcctggcatgctgcgattcatggggttgcaaagagtcagactcgactgagtgactgaactgaactgactgtagttttgtagtataatctgaaatcaggaaggttgattcctccagctccatttttctcaagacagctttggctatttggggtcttttgtgtttccatatgaactgtgaaagttttgttctagttctgtgaaaaaatgtcattggcaatttgataggaatcacattggatccgtagattgcctttggtagtatagtcattttcacaatagattcttctacccaggagcatggaatgtgtctccatctgtttatgtcatcttttatttcttttattagtgtcttagaattttctgggtacagtttttttccctccttaggtaagtttattcctagatatttaattctttttgttgctgtgatgaatgggatttattccttaatttctctttctgatttttcattgttagtatatagaaatgcaagttatttctgtgtattgactttgttttttgtttttttttttataaatttatttatttatttatttttaatttttactttacaaatctgtattggttttggcatagattgacatgaatccaccacaggtgtacatgcgttcccaaacatgaacccccctcccacccccctccccacaacatctctctgggtcatccccgcgcgtcagccccaagcgtgtcatatcctgcatcagacattgactggcatttcgattcttacatgatattatacatgtttcaatgctattctcccaaatcatcacaccctctccctctccctctgagtccaaaagtccgctgtacacatctgtgtctcttttgctgtcctgcatatagggtcatcattgccatcttcctaaattccatatatatgtgttagtatactgtactggtgtttttctttctggctcacttcactctgtataatcggctccagtttcatccatctcatcagaactgattcaaatgtattctttttaatggctgagtaatactccattgtgtatatgtaccacagctttcttatccattcatctactgatggacatctaggttgtttccatgtcctggctattataaacagtgctgcaatgaacattggggtacatgtgtctctttcaattctggtttcctctgagtgtatgcccaacagtgggattgctgggtcataaggcatttctatttgcaattttttaaggaatctccacactgttctccatagtggctgtactagtttgcattcccaccaacagtgtaggagggttcccttctctccacaccctctccagcatttattgcttgcagatttttggatcgcagccattctgactggtgtgaagtggtacctcattgtggttttgatttgcatttctctaataatgagtgatgttgagcatcttttcatgtgtttgttagccatccgtatgtcttctttggagaaatgtctatttagttctttggcccattttttgattgggtcgtttatttttctggaattgagctgcaggagttgcttatatatttttgagattagatgtttgtcagttgcttcatttgctattattttctcccattcggaaggctgtcttttcactttgcttatgttttcctttgttgtgcagaagcttttaattttaattagatcccatttgtttatttttgctttctaacaccgcacacaaagataaactcaaaatggattaaagatctaaatgtaagaccagaaactataaaactcttagaggagaacataggcaaaacactctccgacataaaccacagcaggatcctctatgatccacctcccagaattctgtgtattgactttgtatcctacaactttgctaaattcactgattagctctagtaattttctgacactatatttagggttttctatgtacaatatcatgtcatctgcagtaagagctttacttcttttctgaagaagattcctttttttatttttcttctctgtttgctgcagctaggacttctagaactaagttgaataacagtggtgaaagtggacaccttgtgtcattcctgatcttagggggaatattttcagattttcaccattgaggataatgtttgctgtaggcttattatatatggcctttactattttgaggtaggttccttctatgcccatttttgaaaaattttaatcataaatgggtgctgaattttgtcaaggttttttctgtatctattgagatgatcatatggtttttatctttcaatgtgttaaaatggtatatcacattgattgatttctatatattgaagaatacttgtatccctgttgaattatgtttgctaaaattttattgaggatttttccatcaatgttcatcagtgataatggcctgtagttttctttttttgggttgtctttgtctggttttggtatcagagtgatggtgcctcatagattgagtttggaagtgttccttcctctgcattttttgaaagagttttagaaggataggcattagctcttctctaaatgtatgataaaattctcctgtgaagccatctggtcctggggtttttgttttgggggagatttttgatcacagcttaaatttcagtgcttgtaactgggttgttcataatttctatttcttcctggttcagtcttggaagattgaacttttctaagaatctgtccatttcttccaggttatccattgttttgccatatagttgttcataatagtctcttaatcctttgtatttgtgcattgtctgttgtaacctctcctttttcatttctaattttgttgatttgattcttctctcttttttttgatgagtctggctaagggtttatccattttctttatcttctcaaagaaccagcttttagttttattaatcttttctattgtttctttcctttcttttgcatttatttctgctcagatctttatgatttctttccttctactaatgttggggtttttttgttcttctttttccagttgttttaggtgtagagctaggttgtcaattcagtgtcttttttgcttcatgaggtaggattttattgttataaacttccctcttagaactgcttttgctgcataccataggttttgagttgtgttttcattgtcatttgtttctagaaatctttttatttccctttccatttcttcagttatctattggttatttaaaaacgtgttatttaatatccatgcgtttgtgtttctaactgtttttttcttgtaattgatatctagtctcatagcattgtggtcagagaagatgctcgatacgatttcagtgtcttaaatttactgaggtttcatttgtgacccaagatgtgttctatcctggagaatgattcatgtgcacttgagaaggtatattcttttgcatttggatgtaatgtcctaaagatatcaatgagatacatctcatctaatgtatcatttaaaacttgtgtttccttattaattttctgttttgatgacctgtccattggtgtgagtggcgtgttaaagtatcctactcttattttgttactgttaatttttccttttatgtctgttagcatttttcttgtgtattgaggtgcttctatgttgggtgcatagatatagaactgtacaaaaaagatcttcatgaccaagataatcacgatggtgtgatcactcacctagagccagacatcctggaatgtgaagtcaagtgggccttagaaagcatcactacaaacaaagctagtggaggtgatagaattccagtggagctatttcaaattctgaaagatgatgctgtgaaagtgctacattcagtatgccagcaaatttggaaaactcagcagtggccacaggactggaaaaggtcagttttcattccaatcccaaagaaaggcaatgccaaagaatgctcaaactaccgcacagttgcactcatctcacacactagtaaagtaatgctcaaaattctccaagacaagcttcagcaatacgtgaactgtgaacttccagatgttcaagctggttttagaaaaggcagaggaaccagagattaaattaccaacatctgctggatcatggaaaaagcaagagagttccagaaaaacatctatttctgctttattgactatgtcaaagcctttgactgtgtggatcacaagaaactgtggaaaattctgaaagagatgggaataccagaccacctgacctacctcttgagaaacctgtatgcaggtcaggaggcaacagttagaactggacatggaacaacagactggttccaaatgggaaaaggagtatgtcaaggctgtatattgtcaccctgcttacttaacttctgtgcagagtatctcatgagaaatgctgggctggaagaagcacaagctggaatcaagattgctgggagaaaatatcaataacctcagatatgcagataacatcacccttatggcagaaagtgaagaggaactaaaaagtctcttgatgaaagtgaaagaggagagtgaaaagttggcttaaagctcaacatgcagaaaactaagatcatggcatccagtcccatcacttcatggggaaacagtagaaacagtgtcagactttattttgggggcctccaaaatcactgcagatggtgattgcagccatgaaattaaaagatgcttactccttagaaggaaagttatgaccaacctagatagcatattaaaaagcagagacattactttgccaacaaaggtccgtctagtcaagactgtggtttttccagtggtcacgtatggatgtgagagttggactgtgaagaaagctgagcgctgaagaattgatgcttttgaattgtggtgttggactgcaaggatttccaaccagtccattctaaaggagatcactcctggtgttctttggaaggactgatgctgaagctgaaactccaatactttggccacctcatgtgaagagttgactcattggaaaagactctgatgctgggagggattgggggcaggaagagaagtggatgatagaggatgagatggctggatggcatcactgactcgatggacgtgagtttgagtgaaccccgggagttggtgatcgacagggaggcctgccatgctacaattcatggggtcacaaagagttggacacgactgagcgactgaactgaactaaactgatgtcttcctcttggattgatcccttgatcattatgtagtgtccttccttatctcttgtaatcttctttaaggtctattttgtctgatatgaggattgatactttagctttcttttgcttcccgtttgcatggaatatatttttccatcctctcactttcagtctatatgtgtcttgaagtctgaagtgtgtttgttgtagacagcatatatgtgggtcttgtttctgtatccattcaggtagtccgtgtcttttggttggagcatttaattcgtttacatttaaagtaattgttgatatatatgttcctattgccattttcttaattgcttggggttgattttgtagatctttcttctcttgtgtttcttgactatataagtctctttaacatttgttgtaaagctggtttggtggtactgaattctcttaacttttgatttccccatcaattttgaatgagattcttgctgggtaaagtaatcttggttgtagatttttccctttcagtactttacatatatcctgcaattcccttctggcttgcagggtttctactgaaagatcaactgttaaacatctggggtttcccttgtatgttacttgttgcttttcccttgctgcttttaatattctttctttgtgttggcatgtttctccttgagtttatcctgtatgagactctttgcacttcttgaacttgattgactatttccttttccatgttggggaaattttcagctataatctcttcaaaacttttctcataccctttctttttctcttcttcttgtgggacccctacagtttgaatgttggtgcatttgatattgtcccagaggtctctgagactatcctcagtccttttcattctttttactttattctgctcttcagaagttatttccaccattttatcttccaactcactgatttgttcttctgcttcagatattctgctattgattacttatagagtatttttaatttcaataattgtgttgtttgtctgtgtatgtttattgtttaattcttccaggtctttgttaattgattcttacattctcccttctgttttcaaggtttttttttaaatcatctttactatcattattctgaattctttttcaggtagtttgcctatttcctcctcatttatttggacttctgtgtttctagtttgttccttcttttgtgtggtatttctctgcctgtttgttaatttttttaacttactgtgtttgatgtcttcttttcccaagcatcaaggttgaattcattcttccttttggtttcttccctcctaaggttagtccagtagttttggtaagcttcatatagggtgagatttgtgccgagtttttcttgtgatgagcaaggctgattgaggtggtaatcctgtctgctaatgagtgggtttgtatttttgttttgtttgttgtttagatgaggcgttctgcactggtgctactggtggttcggtgttgctgtggcttttattcaggtggtttcctttgtgtgagttctcgctattttttatttcctagagttagttctctggtagtctagggtcttggaattagtgctctcactccaaagccgcagggtttgatctcaacttcaggccacaacaagtagtagaaactgagaagaaaaggctgtcttctctaacacttagtcatgaaaatcctgattcattcttgcaaaaattttactggatcatcactcacataggatggcaaccagaatggtggggcttctgaacttcacataaggaacaaccgaagtacctggggaatattcagccttccaagatcttagcagctgataagtaaaaggcagagaagggagcccagggcaggaatagcacctgggcatgtgcccaagggggtggctgcatgaggttcctcaaagctgagagcaaaaagtgtatttacattttaaatttggaagcaatctcaaacttgtctcagttcacttcagtctgtcgctcagtcatgtctgactctttgcaaccccatgaatctcagcacgccaggcctctctgtccatcaccaatttccagagttcacccaaactcatgtgcatcgagtcggtgatgccatccatctcatcttctgtcatccccttctcctcctgcccccaattcctcccagcatcaggatcttttccaatgagtcagccctttgcatgaggtggccaaagtattggagtttcagcttcagcatcagtccttccaatgaacacccaggactgatctttaggatggactggttggatctccttgcagtccaaggaactctcaagagtcttctccaacaccacaattcaaaagcatcaattcttcagcgctcagctctcttcacactccaactctcacatccatatgtgaccactggaaaaaccacagcctcgactagacggacctttgttggcaaagtaatgtctctgcttttgaatatgctatctaggttggtcataactttccttccaaagagtaagcgtcttctaatttcatggctgcgatcaccatctgcagtgattttggagcccaaaaaaataaagtctgacacagtttccactgtttccccatctatttcccatgaagtgatgggaccagatcttagttttctgcatgttgagctttaagcctactttttcacccttctctttcactttcatcaagacgattttcagtttctcttcactttctgccataagggtggtgttatctgcatatctgaggttattgatatttctcccagcaatcttgattccagcttgtgcttcttccagcccagcatttctcatgatgtactctgcatagaagttaaataagcagggtgacaatatacagccttgacatactccttttcccatttggaaccagtctgttgttccatgtccagttctaactgttgcctcctgacctgcatacaggtttctcaagaggcaggtcaggtggtctggtattcccatctctttcagaattttccacagtttcctgtgatccacacagtcaaaggctttgacatagtccataaagcagaaatagatgtttttctggaactctcttgcttttttgatgatccagcggatgttggtgatttaatctctggttcctctgccttttctaaaaccagctggaacatctggaagttcacggttcatgtattgttgaagcctggcttggagaattttgagcattacttcactagcatgtgagatgagtgcaattgtgcggtagtttgagcgttctttggcattgcctttctttgggattggaatgaaaactgaccttttccagtcctgtggccattgctgagttttccaaatttgctggcaaattgagtgcagcactttcacagcatcatctttcaggatttgaaatagctccactggaattccatcacctccactagctttgttcgtagtgatgctttctaaggcccacttgacttcacattccaggatgtctggctctaggtgagtgatcacaacatcatgattatctgggtcatgaagatcttttttgtatagttcttctgtgtattcttgccacctcttaatatcttcttcttctgttaggcccataccatttctgtcctttatcgagcccatctttgcatgaaatgttcccttggtatctctaatttttttgaagagatctagattcccattctgttatttttctctatttccttgcattgatcactgaagaaggctttcttatctctgcttgctcttctttggaactctgcattcagatgcttgtatctttccttttcttgtttgttttttttttctcttcttttcacagctatttgtaaggcctcctcagacagccattttgcttttttgcatttcttttccatggggatggtcttgatccctgtgtcctgtagagtgtcacgaacctccatccatagttcatcaggcactctatcagatctagtcccttaaatctatttctcacttccagtgtataatcataagggatttgatttaggtcatatctgaatggtctaatggttttccctactctcttcaatttaagtctgaatttggtaataaggagttcatgatctgaaccacagtcagctcctggtcttctttttgctgactgtatagagcttctccatctttggctgcaaagaatataatcaatctgatttcggtgttgaccatctggtgatgtccatgtatagagtcttctcttgtgttgttggaagagggtgtttgctatgaccagtgcgttctctttgcaaaactctattagtctttgccctgcttcattccatactccaaggccaaatttgcctgttactccaggtgtttcttgacttcctacttttgcattccagtcccctatgatgaaaaggacatcttttttgggtgttacttctaaaatgtcttgtaggtcttcgtagaaccgttgaacttcagcttttttagcattactggttggggcataggccataggcttggattaccgtgatattgaatggtttgtcttggcaatgaacagagatcattctgtcgtttttgagattgcatccaagtactgcatttcgaactcttttgttgaccatgatggctactccatttcttctgagggattcctgtccacagtagtagatataatggtcatctgagttaaattcacccattccagtccattttagttcgctgattcctagaatgtcaacgttcactcttgccatctcctgtttgaccacttccaatttgccttgattcatggacctaacattccagggtgctatgcaatattgctctttacagcattggaccttgcttctatcaccagtcatatccacaactgggtattgtttttgctttggctccatccctttattctttctggagttatttctccactgatctccagtagcatactgggcaattaccgacctggggagttcctctttcagtatcctatcattttgccctttcatactgttcatggggttctcaaggcaagaatactgaagtggtttgccattcccttctccagtggaccacattctgtcagacctctccaccatgacctgtccgtcttgggtggccccacacggcatggtttggtttcactgagttagacaaggctgtgatccatgtaatcagattggctagttttctgtgattatggtttcagtgtgtctgccctctgatgtcctctcacaacacctgctgtcttacttggctttcagggacttaatataccagagaaattcatgcatttgaatgtctaaggctgctaaactctttttaaggtagtgaaaaaaagtatatagtgtatacacagacacatatatgctaagtatatagatatattcaataaatatttatatataacatttatgcttatatatattaatatatacatatgttttctttaaacaatgctgaggaaagggctatgtgtatatatatatttcaacactccccacaaagtgatacatacttcaaatgagtccataggacctcatttttacaatgtcccttccactgtgcagacactagaacaaaagtatagttgatgagtatttagggtgctatgctcagtcactccatcatgtccaaccctttgcgatcccatggactgtagcacaccagtctcctctgtccatgggattatcccagcaacaatacctgagtgggttgccatttcctcctccagaggatcttcttgccccagggatccaacccatatctgctgtggctcctgtattgccaggcagattctttaccactctgccacctgggaagccctgtagataatgtatgacacttattctttcttagaattggaacatcttgcttttaaactgtgactttctattttacactgctgtacataagggccttagaggctgttacaagcttgtgagagtgaagtttttggttaaaatgccgttacatcactgccacacatgcatgttatacacaaaaaaaacaaggtttatccaatatttatcatggaagaactgctgtgctttaaatctatcagtgcttttcacctttttattgtaaataagacctataatagaaagccacacaaaacagaaggtaaatataagctgggtcaagaagcagaaatttcggcagctgaccccaaaaccccttccatgtgttccatcctcatcacaacaccctctctccccttataaggagccatcaacctgacttctacagtattcacttctttgcactttaaaaagagatttctttcattcacatgtgcatccctagactatagtttaatcttgcaccagtagccttttaatcttcagattctccctcctttcttttccttaacaatctatctgtcgaagaaaccagcttgtagagttcctctcagtctgggtttctgggttttgctgacggcattttcacgatgcagttcagaaatgttcctctgttctttatatttcctgcatgttggcagttggatccagaggcttggtgagatgtacagttgctatggcgagcacaccagaggtagagcactgtgtcatcagaagggcctcagtgtctagctgtttctttacgatttccacaatcactaatgcgctatgcctagatcaactcatcacacttaaaaaaaaatgcatttatttatttggctgtgcctagtcttatttgcagcatgtcggatctagtttcctgaccaaggattgaacccaggccccctgcactgggaagtgtggcgtgtcagtggatcaccaaggaagtcatatgcttgattctttcactttatttgcccactttccagataatgaaatagttccttattatccttgtaaggcaaccatatttttaaaaaactaatcatacactcacagatggaaacatatttgagtcccgttcttttgcaattactatcctttttgaagttcaaagggtcccatctctgtccagggagccagtatcgctagagtatcatagtgcatatcactggcccagtaaaagatcaaaattcaaaatttgaagcacagttttctattgaatgcatatcactttcacaccatcgtaaagtcaaaaagtgaagttgaaccattgtaagttggaggctgtctgcactccatttttttttttctgacataaagcgttgcatttaaaagcctgagaataatccaattttctttcacttaaaatacactttgtcttttagatgtctaaaggaactttttcctttaaagtccagttaacttactacatggtattattttgggtcagtattctcaggtatatgctgtgctctttgagtaagcagttttcaatttaaagaaaaaagttttttggcattaccgtttttagtagttttttcagttcccttactttgtttttcttcatcaaggctcctcctgtccatgctgaatcttccttgtctattgcctacatgtgacattttctcttaaatatttttaatgtctttcctcattatttacttctggctgtgctgggcgttcactgctgcaggcttttctccagttgtggcgagcaggggctactatccagttctggtgcgtgggcttctcactgcagtggtttctcttgttgcagagcacgggcctcagtgcatgagggcttcgacagcagtggcgcgggggctcagtgattgcggctcctgggctctagggggcaggctcaacagctgtgccgcacaggcttagcggcatgtggaatcttcccagacaagggatcaaacgcgtgtctcctgcgttggtaggcagattgttatccgctgtgctaccaaggaagcccctctcatttctttttgaattttagagttttatattttaagctcattttgaaatactatgcttcagtgtttcctttttttaaaataaaattttatttttatttattttttaacaccaaaaacatttttaaattggggtatagccaattaacaatgttgtgatagtttcagatgaacagtgaagggactcagcatatacatgtatccattctcccccaaaccctccttctgtccaggctggcacgttgagtagagttccatgtgctatacagtaggtccctgttggttatccaatttaaatatagcagtgtgcacatgacctttccaaagtccctaactatccctccccccagcagccatgaatttgttttctgtgagtctctttcttttaaagtaagttcatttgtatcatttctttttagattccacatataagggatgtctttctccttctctgtctgacttactttactcagtatgacaccctcttgatccatccatgttgctgcagatggccttatttcattctttttaatggctgagtaatattccattgtgtgttcttatatacacatgcacacacatatacatgacttcacccatttctctgttgatggatatttaggttgtttccatgtcttggccattgtaaacagtgctgcagtgaacactggggtgcatgtatcttccgggccacgtttttctctggatatatgcccaggagtgggattgcaggctcatatggtagctctatttttagtttcttaaggaccctccatactgttctccatagtggctgcaccagtttacattcccaccaacagttatgcttcagttttgacctcttccatcaagttgtcttgccagcttgctttcatcagagggatgttattctgctccctgttctttcatttccctagtaacttcttatgagcttggaagttgatacttttctgtggctcattatgcaaaattagcttttctgaatagttagaaggaagtgcagttcaagaaaatctcactaacttgacagaactccctctttggttatcaccgtgaagtgtttaaaaccatggcctcttgctttctgatatttcctgttgtcatttaatcgctaagtcatgtcggctctttgcgactgcatggattgtagcccaccaggctcctctgtccatgggatttcccaggcgagaatacaggagtaggttgccattttctgtatctcttccttttccccacttttatctggacttcttctttccctcatgtctcccagcactgttgtgctcaattttgactccactgtcagcattttctcttgagatggcgccctggcctggaagagggctttggttttagggttcaggagttaatgtggcccagactgcctgagttcctttcagaacccaccaagaaccctggcactcatctggcactgaattgggtaaaacccctcccagtttcagctgctatgctcaaatcagcctgcactcatttccagtgcattcctgttacctattctggggttctcctggtctcaggtctgccagatgcgctgttgtctccccagccctaacttattccgttcatacaaacactgatatcctgcaggttttgtggctgctggaggtttatctctaccacctgcttatactttgagatctgtggataactcacttggttttgatgtaagtgctacgtgctacctagttgttctgttttacatgaggattcagagattcgaataacaatgttgctgctgtcttttgcccagaactgattaggcacgtctatcttcaaggtctatttttcacccatccccaaagctagtccctaaatgtgacatactgctgcctcatggccatactgtccttgctgctgaagtaggcattgccacaccactgctccttacccagggcttttctcagagaaactatcagagacagatgaaaactgcagggcccggatgtggctgctccctcagtgatgcagagactggggggccggggggaatggggagaacacggtagggcttataaccttgtggtttatctgcatttagctaatcaagcattactacctcagtggcatccgaaaaaagtacaagtagagataggaaaatttaaaaaaaaaaagagagagagactgcctatcagctttacctttgttgcagctaatgcaagatggctaggatttgggtcatgggcttaacagaacaagggagcccttccaatggctacccaaagacctcactccatcatgcaagcaggttatttcaccattctcacctagtggaatttgatgactactaatacaaatgacaattgtatgtttccattttctccctttctggaatccttgcattttcctttgcctccagtgtacattgagagcagacaggccatcttttaacttataggtcactaggtcgcaagcagccttgtctggacttgataaggagagctgcacaaaacccagatatcctggactctgagtgggatgcagtgatgaatggaggagggagctggttctacttatagcaagaggaatgatgagaggggacagactgtgacagataacataaattagattgctcagtatccatttgaattttcttgtcctacatgcagaggttgaaaaaaaaaaacaaaaaacaaaaaaaaaaaacatctcagatacccttacaattgaggttcaaaatgtgatttagattctaatcaccacttaaactcacaggagtctgatctggaatagagtcatatgagaagaagcaatatgtagggtatttattttacagactgtggcaaaggcaacatgctcttgagctggccaccgcagtggcagcttcctgattttagctgaagtggctggtttgcggccagcagacgctgggattccttcctgatctaggcagatgcagcatccacactgaggatttgccatgtggcttggggagtcattcctggcagcctggtctacagcctgtctctttagccctccagggattctgaaagccactgaaaatcctatgaaaatcactttttgtttagtctacctagagtggattatgttttgcactactaaactctgacccacatagcctgccaatgcacaaagcagaggcagctccagctctcttggtttacccaggagcaagcacccaggtgcctaggtaaccccatttctggatgcttctagcaacaaagggggtaattcttgcagttgggcacgtgtttttgctgccctaagagacagaagggacagcctgccacaagcacatacatgtgtggcgatggtggcacttttgatgttcaggccatagctgttggtgtttttattggtatgggagaatgatactcttctacattctctctgagaactgtaaaattagaatattgtgttttttttaattaatttttattagactacagttgctttacaacattgcgttagtctcgtgtacagcaaagtgaatcagctgtgtgtatacatctagccccctttttctttcttcccatttaggtcatcacagagcattgaatagagtcctctgagctatacagtaggctctgattagttctctatcttatagatagtatcaacggtgtatatatgtcaatcccaatctcccaattcatcccatccgcaccctgccccctgatgtccatatgtttgttctctaaatctgtgtctctatttctgcttggcaaataagattgctttgtgtttttgaaaaggacttttggctttagacaaacaaagaaagatgattttggggtaaaatgcttccaattcaggacacaatttataaattgtagaatttcccgcccattttgtattatatgttatctgtcctagaataaaaagaaaggtagttttccctctgtttcaagtgtgtctatgattacaaacaccaggggcacacccagtgataagtggctgcacggttttgtagtctttgtagacttgaacattttcggctgttgtttaatgacagcactcttggctttgagctactggcaacagggactggttaccgtgcgcagcactgggtcttctctgccagtaaaggctgcacatcaaacccataacagctgttctcaaagggcaaagaatacacctgcccctcccagagtcatctttcctccctgcctataagcaggcccttggggcaactggtcatttctgagacctttccacggtgacctttgggaacagtctgtcccttctgtccttaaatgtcctagaacagcagcagcactgggctgtcactcctggaaacgcagaccagtgggctgcaataatggccccgtgtctcatctcccacatggaagtgatgacccctacttatatccttcatgcctatttgattactttcatcttttcctgaggatttagagtgctgtcattgagtttgccacatcacaccattacatcccctgtaaactgcacctttctttcctaacactttttactgtagaacctcttcagatttatagaattctgtagagttcctacatacccaagaattcctagtaccccagtattccctattagtgatgtcttccatcaggatggtatgtgctgctgtcctatgcttagttgctcagttgtgtccgactctttgtgaccccatggactgtagcccatcaggctcctctgtccaaggggattctccaggcaagaatactggagtgggttgccatgccctccccagggggtcttcctaacccagggatcgaacccaggtctcccgcattgcaggcagattctttaccttccgagccaccagtgaagcccaagaatactggagtgggtagcataccccttctccaggggatcttcccgacccaggaatcaacctggggtctgctgcattgcaggtggattctttacagctgagctaccaggggagcccctaggatggtatattacttgcaaatagtgaactgatgttgacagttattactacctgaaatccacacttcactgtaacccaaagtcctttttctgtttcaagacttcatccaggatacactgtattaggtgtcatttccccttagggtccttttggctgtgacaatagactgtccttgttttggatgactttgacagttttgaagagcatttaacctgcatcttttcagagttatccctcactttagtaacagtaagaatcagagaaaacttatttttggaaggagttatcagtaggatcaagagccctcaaaccaaatcctagctgtcctgagttttcagaaagctcatgtcattttatctctatcaatgtccctctgtgatggaaggctgggtgcaggcctggtggatattcagacagctgctgcaggagctggaagagttggtggagtgaggggttccacaacctggctgatcattacagtcagtggagaatttgtaaagcacagacgtccaggccttatcccaggtgtactgaatcagaatctccagccatagggtctggaatcctatatttttttattgcttaaaaactaataatcctgctaattatgtttttaatatataaaattataaaaaacatgggccataatcctatgaatatacatagaagtataaatgtagaaaatgtaaagaggaaccaaaagtctaaaatgaaaaatgaaagcctccctataatctatataacttaaggacgctttggtttctctctgtttttagtgctgtcttttgtttgcttgagatttatatttctgcaagcttccaaggtattctggtgtaaccagaaatttggaacccactactgatgagattcacagttcacctggccgggggtggggtggggagagaatgttcctttcagagctggcatccattataaaatcacagaggcctaccctacccctttccctccctgaacaagtcagccctaaagccatcagttggggcagagcaaggggaggcagcctgtgacagcctgtcggagcccagctggattgacaagggcatcctacagaggacagatcccgtatggggcattcaggcctgagtgcatgaggctggcatccacgggtaggggcaggctgaacagggagcagtgggtgtgagtatccatgtggaggggtggcctggggcccaaggggataaagaaggcactcacaagggtggtgtctctgagaagggaatcagtgcctgaatagagggcgtctggcttccctagtggctcacatggtgaagagtctgcctgcaatgcgggagacccgggtttgattcctgggtcaggaagatcccctggagaaggaaatggcaacctactccaatattcttgcctgggaaatcccatggacagaagagcctggcggcctacagtccatagggttgcaaagagtctgacacgactgagcagctaatactttgtaggggaaggggtggatgcactggtgacgggaggctggttatttatgtgggaatgaattaaagaaatataataagggtaatgggagccatgtttctcgctgttggacaagggggtcactaatatgcaaagagagaaggacagaataaacccagaaagaaagtgagctccccatggactatacagtccatagaattctccaggccagaatactggagtgggtagcctttcccttctccaggggatcttcccaacccagggattgaaccaagtctcccacattgcaggcagattctttaccagctgagccacaagggaagcccaagaatactggagtgggtagcctatcccttctccaggggatcttgctgacccaggaatcgaactggggtctcctgcattgcaggcagattctttaccaactgagctgtgaaggaagccccagagtatcctacagttagagataccagtatgaacttatggatttaaagatataaatctatatttatattatacttacaaatatatacatttatattatagagtatgtggcatatatttgtagatacatatgtgtatgtttgcatggttgtatatatttacatttatgaatatattaaagtgtatatatatcctttgagtgggcttgggagcaatgatattccattggtagtaggtacacccaatgcccactccttggctataataccattttccactaaaaagaaccagaggtccttggagaaatgactgatttcagggctggggcaggcagagaacatgatgaatttagaacatcttgtgccagaaatcaaagacacacttaaagaatgatgaggacatgtctggagaacacaggagccaggctgaaaggactcaggtggaatttgaaacagtttgaacattaaaacaaataatgacagtaacacactgtatcccatcccgtaagatagaaatccaagacctcatactgagaacaataaattaaactttgaaggaatatttacatagtttcaaagcatctcccacaaaatattcattaattaaaagagaggaaaaaaaagagcagcctcacaatggaaaatcccagaagattctactttaatcacgggactaaaataaagatgactagtaatggtatgaattgaaattgtgtgtcacacaacagagtgcactcaaaagcacccaccatcacttctatgatattcctgcctgtatgcattatgtaccgggagccaacaaacatttattcttgtcacagttcctggggtcaggaatctgagagtggcttcattgggtgactctggtgttaggtctgttatagggttaaagtccagctgtcgagcgatagacatcttggggtttaaccagggctgaagaatccacttccatgttcactcacatggttggcaggcctcagtttctcctggctgttgcctagacgcttcagttccttgccatctgggcctatatgtagggctgctcacaacatgacgtttgcttgccccagatcaagtgatccaagaaatcacttctgtaacctaaccactttggctctatgctcttgcttacaaagacctactctcataccatgtgaaaggagactcatgagggtttgaataacaggcatgcgtgtgctaggttctttcagtcatgtctgatttttagtgactctatggactgtagcctgccaggctcctctctccatgggattctccagacaagaatactggagtgggttgccatgccctcctccaggggaccttcctgaacgagggatcaaacccacgtctcttatgtctcctgcactggcaggcaggttttttactactagtgccacctggaaaatccttgaataataggaagtggggccaatttgaaggctggctatgaaactgccaaacataatcaagacaaactcagatatggagctgttctacaaaatcactgatctatattcttcagtgtcaaggtcatgaaaatcaaggaagagactggggaactgtccagaatgaaggagactagagagacatgactaccaactgcaatgtgaaatgtggactagttccctttgagattaaggacattggaggacactagcaaaagttgtcggagaaggcaatggcaccccactccaacactcttgcttggaaaatcccatggacagaggagcctggtgggctgcagtccatggggtcgcgaagagtcagacacaactgagcgacttcactttcacttttcactttcatgcattggagaaggaatggcaacccaccccagtattcttgcctggagaatcccagggatgggggagcctggtgggcagccgtctatggggtcgcacagagtcagacacgactgaagcgacttagcagcagcagcagcagcaaaagttttcatggggttgaaggattagctggcagcaatggattaacgctaatttcctgattttactagatagtactactattttatagaataatgttatttatagaaaacactcattcaaatgttagggaaagataggaaagcaggtttgtaacttactctcaaaaggtttggggcaggagggaaatattctttattcttttactgcaactctgagagaagatattaagaagaggtggcaagaatacacagaagaattgtacaaaaaagatcttcatgacccagataatcacgatggtgtgatcactcacctagagccagacatcctggaatgtgaagtcaagtgggccttagaaagcatcactacaaacaaagctagtggaggtgatagaattccagtggagctatttcaaatcctgaaagatgatgctgtgaaagtgctgcactcaatatgccaacaaatttggaaaatgcagcaatggccacaggactggaaaaggtcatttttcattccaatcccaaagaaaggcaatgccaaagaatgctcaaactaccacacaattgttctcatctcacacactagtaactgttgctattgctaagtcacttcagtcatgtccaactctgtgcgaccccatagacagcagcccaccaggctcccccgtccctgggattctccagacaagaacactggagtgggttgccatttccttctccaatgcaggaaagtgaaaagtgaaagtgaagtcgctcagtcgtgtccgaccctcagcgaccccatggactgcagccttccaggctactccgtccatgggattttcctggcaagagtactggagtgggttgccattgccttctccgcacactagtaaagtaatgctcaaaattctccaagccaggcttcagtaatacatgaaccatgaacttccagatgttcaagctggttttagaaaaggcagaggaaccagagatcaaattgccaacatccgctggatcattgaaaaagcaagagagttccagaaaaacatctatttctgctttatggactatgtcaaagcctttgactgtgtggatcacaagaaactggaaaattctgaaagagaagggaatacgagaccacctgacctgccttttgagaaacctatatgcagatcagggagcaacagttagaactggacatggaacaacagactggttccaaataggaaaaggagtatgtcaaggctatatattgtcaccctgattatttaacttatatgcagagtacatcaagaaatgctgagctagaggaagcacaagctggaatcaagattgccaggagaaaaatcaataacctcagatatgccgatgacaccacccttatggcagaaagtgaagaggaactcaaaagcctcttgatgaaagtgaaagaggagagtgaaaagttggcttaaagctcaacattcagaaaacaaagatcatggcatctggtcccatcacttcatgggaaatagatggggaaacagtggaaacagtgtcagactttatttttggggggctccaaaatcactgcagatggtgactgcagccatgaaattaaaagacgcttactccttggcacaaaagttatgatcaacctaaacagcatattcaaaagcagagacattagtttgccaacaaaggtccatctagtcaaggctatggtttttcctgtggttatgtatggatgtgagagttggactataaagaaagttgagtgccgaagaattgacgcttttgaactgtggtgttggagaagactcttgcgagtcccttggactgcaaggagatacaaccagtccattctaaaggatcagtcctgggtatactttggaaggactgattctgaagctgaaactccagtactttggccacctcatgcgaagagctgactcattggaaaagagtctgatgctgggagggattgggggcaggaggagaaggggacgacagaggatgagatggctgaatggcatcaccgactcgatggacgtgagtttgggtgaactctgggcattggtgatggacagggaggcctggcatgctgcgattcatggggttacagagtcggacacgactgagcaactgaactgaactgtacttggatctataaataacttttctctcttgttgatgtggcttttaggcttaggcataaaatcctaactttggtgagactgcagtgcttttctggctggcctgtcactgacatgcctcctgacacattgaaggcagagaagtgttagagaaacacagtaagttttgccgtcctcatactccatacccaatggcatctactcctctcctatcaaaatctacaaagacctagactatccaaggagctgatattcctactgctgagcctttgaagggccttatgtacagacagtgctgcctgctccctcggtctgcaaggttgtacattttatgttccatcagcacagattatattcttcagttccttctcatcacacctcttgcttcttctaatggtcggttgtttagggactggcattattgtcatctttgctttaatgcattttaacctgcttgtgaaatttctaacatcccttccagtgtccctgctggaggacagtccagtcatccattataacagcagctgctaaaagggtttggaatgtgtttggatgtgaaggaaccagatttgtacactattctgtatcatgttcatgccagctctcaatggcataacaaggctgaaattttaattggactttggggaagtcatgcattaggttcatagcattttgtgtgtgtaagatagagttgctgtcaagaaatatttttttctttttaatttttaccttgatgatgtttagaatgttagcagcagctaataacatggtttcatgtcctaatgcatagataagtgcttggccttcaagcctgtggccttaactttgtgatttcatgtatgtctacccaaagatacatgaaagtgcccttggggtcagtcactcagtcaactccttgtgaccccgtggattgtaacctgccagttcctgtgtccatggaattctccagggtagaatactggagtaggtagccattcccttctccaggggatcttcccaacccagggatcgaaccaaggtctcctgcattgcaggcagattctttaccatctgagcaccaaggaagcctgtggaggggaaggcagcaaatgtgcttacccatatctccaacactgaacctggcttgacagggtatttaaaagtgaattacataggcagagcctgcctcccaggatatagggacatcttttgccttttgttggagaaggcagtggcagcccactccagtactcttgcctggaaaatcccatggacagaggagcctggtgggctgcagtccatggggttgcaaagagtcagacacgactgagcgacttcactttcccttttcactttcatgcattggagaaggaaatggcaacccactccagtgttcttgcctggagaatcccagggatgggggagcatagtgggctgccatctatggggtctcacggagtcggacacaactgaagcgacttagcagcagtttgccttttgttttattacaagtggtttgaaaattgatgcattcctcttgattttagcccatttagtgaatttgttaatctaactcattgttatgggtttcccaggtggcattggtggtaaagaatccgcctgccaatgcaggagacttaagagatgcgggctcgatccctggctcaggaagatcccctggaggatggcatggcaacccactccagtattcttgcctggagaatcccacagacagaggagcctggcaggctacagtctaaaggctcacaaagagtcggacactactgaagtgacttagcatgcaataagtagcataaatgggtgatttatgggcgattagaacacacccctcctgcctcactcttgtttcttgagctttgataattttgtgccactagaaagcaccgcaacttcccctgagggaagtggacagtgtccttgataggacagaaagcccctgttgtctttatgggttatctaaggaaaggaacttaaaatttgtcagacttctgttggggaatcctacctccctatcatccagagtaaaccaaatcatactgcattcagattcttaatttagaaattcaagataaaatcatcttccttaaccagacatcattcatgcattcaggaaataattattgaatgtttactatatgtcagatactcctctgggcattggggataaaggtaaacaagacaaaattcacattcttgtaagtatataaacaataaaagatcagatagtgataagtgttatgcagagacattagggcaatgtgtttagaaagagatactcagaattcccaagggaaaaaaattagcaggagtttctagaaaagtccagttgaactttctataataatggaaatgttctatactgtactgtccagtgcagtagccactagctgcatgtggttttaaggaacttgaaatgtggttattgctactgaggaattttaaattgtatttaatataagtataaatggccacatgtggctaatggctaccatactggacaagcatggtttgagagctatgttttggacttaggtgtctatacttgtacacagaatgggtgtaatatatagcagtatcttgatttttttttaactcaaagaaccaaacacattctcactgtatcatctttgtagaatagattcatgactagacttcagtgtttgagtacttagttggaaagatacaagatcaagcagtctaataagggggcttaagagaagcaatggatggtcacaaaaagatgttagaatggtacccacaaactgaaggctaaaggctctgagcagtattaaaagcttgaaagagagaaaatcactgcatggcaatgtatgccataggcccctctctgccagaaaggtgataagcgatgttatttcctaataaaaattacaaggctggcagaaagagagttagaataagaaaggattcatgctttcttattcttttaagacatttgctgaggtttttgtgccactgagaccagagtatctcattaactttgatccttccctgaggaatgacctaatggccattgtctacaaataaagctgttggacaaggtcttacataagggtctcttcagctgaaatattcttttaattttgtcactcagtcatgaacaacagagaaccatttggtgatgtgaaaacagcaacttgggaaaacttggtgttcgtggtagcaacaggggggaagtatatcttgtgcttagaaccattactaaagtttctggaaaagccatatggatttggtgtgtgacaaaatgctcattgtagaaaaagtataagattttagcatattggaaaagtatcacaagtagaagattattgaaattattcaagtattatctaattctttgaccaaccacaaatcatcatgacattactaaatccagaaaacatttcaatctgaccagttaaatattttcttgtcaaataaacaaatgcttcagttcagttcagtcactgagtcatgtccgactctttgcaaccccatgaaccgcagcacaccaggcctccctatccatcaccaactgcaggagtctacccaaacccatgtccattgagttggtgatgtcatccaaccatctcatcctctgtctccccttctcctcctgccctcaatctttcccagcatcagggtcttctcagatgagtcagttcttcgcatcaggtggccaaaggattggtaggaatggcaccccactccagtactcttgcctggaaaatcccatggacggaggagcctggtgggctgcagtccatcgggttgcgaagagtcggacacgactgagcgacttcactttcccttttcacattcctgcattggagaaggcaatggcaacccactccagtgttcttgcctggagaatcccagggatggtggagcctggtgggctgccgtctgtggggtcgcatagagtcggacacgactgaagtgacttagcagcaatatgtttaagttagaaaagtcatcaataggaactttgaaagggactcaaacattagttacgcatccaagtataagatacagatattttagtacatggtcacatcataagcaaacaagtaagagcatatttaagaaaaggcataaggacttccctggtggtccagtggctaagactccacattcccaatgtagggagcccatgttcgatccctagtcagggaactagatcccacatggcacaatgaaaattgaagatcctgtgtgttgcaactaaggcccagagcagccaaataaaaagatttattttagaaagaaagaagatagagcataaaagggcaccaataaggatcttctttaaaaacatgtagtatgtctaatgaatttctgcctgaagtgtttctcgtgtgtgtgtgcgtgcacgcgtgtgcacgtttgtgctcagttgtgtctgactctttactaccccatggaccatagcccaccaggctcctctgtccttggagttttccaggcaagaccactggaatgtgttgccatttcctacttcaggggatcttcccaacccaggtatcaaacccatgtctcctgcattgacaggtggatactttacctctgcgaagcagttaaggctaagtgtcataatcttcagtgcactgagtggattcagcagtgcataaatgaactagttaaggctgcagcatttcttgaggggagataaagagaccccctgaaaatgggccttggttttgtagataagagaaatgagcctgcaaatttgtaataatatttcatctccaaaaagactactaggatttgaagaggactgtggggagaagccaaaaacaataattctgttaatggacaggagagaaatgtggaacctttttttccactatgaaaacacaataataagccatctctctctactagaatgaataagaaaatagtctcataatttccacatcacttagtattgaaatactggtcttttcactcataaacaaaggccatttaagctaataaaaagactaatgcacatagtgttggaagtgttattgggattacctccatccctttccagtgccctcagagacaaggtgcccgccagcacccccttgtgagggtcttggatgtttttatgtttcctccttgccttgcataagccaacagggaaatcaagtgtctcctcattaggaaatggaatactgctacttatatctttacagttgtgttaaatgatgcctgctcaatgtagggctggtggtaggacaacattaaagaagaaattcctactttaaaatgttcagtgctgttgactgactgcaaataagatttcatttagcattttagattacagtttggtctcagaccaaagattctcaacctttcagttcagttgctcagtcatgtccgactctttgcgaccacatgaaccacagcatgccaggcctccctgtccatcaccaactcccagagttcacccaaactcatgcccattgagtcaatgataccatctaaccatctcatcctctgtcgtccccttcttgtcctgccttcaatctttcccaacatcagggtctttttaaatgagtcagctctttgcatcaggtggccaaaatactggagtttcagctttaatatcggtccttccagtgaacacccaggaccaatttcccttaggatggactggttggatctccttgcagtccaagggactctcaagagtcttcaacaccacaattcaaaagcatcaattcttccatgctcagttttcttcacagtccaactctcaaatccgtacatgaccgctggaaaaacgatagccttgactagatggacctttgttgacaaagtaatgtctctgcttttcaatatgctgtctaggttggtcataacttttcttccaaggagtaagcgtcttttaatttcatggctgcagtcaccagctgcagtgttcttggagcccaagatataatgcgtagcaaaatcacctagagggcctgttactgaacacctttgctgggcctcatccctggagtgtctgactcagcaggctggaattgggcctgagaatttgtatttctagcacattcccaggtggcacagatgccgctggtctggtgaccatacctgaagaaccactgccttaagaccaggaagagctcattgggatagatttcttgatgtgcgagtacaatgaggagacaaagggttttttgtaaatccctttcttccggttcctctttttgatcgtgccaaaagtattgggtatgtcttaagctcctttctggcccagatccgataataaacattgtaacattacaattccattgtttaatatagactttgaatcttgtctgaatgaaaaagacaaaagggctggttgatgcattttctgactccctacattgttttgaaaacacactgaggtagtgctggagccctaagcccacctgccactcagtctgataccattacaagctgaggttggacatttcatatttcccgtctttgtaatgcgtttttcattattccacacggcagtgatactgtttactgagaagtagagtgaggactcctaatacgaaaccctaggcactgggtggaagcggctgttccgtggccccgttcatggttggcccggctctgctgctctccctccagcctgcccacctgggtactcggctgagcttccgaaggacaaaacaatgacctggattctccctttctcacttgcattaaggtttggtacctctttggtgtgatgtcagccagaaagctcttggttaatgaacacagggttccaggcaaaggtctggcttcaaagcacagaaaccgttagttccatttttaaattgacttcaagtgtctcatctgtaaaatggaggatgtagacgctagacaggtgtggatggtgtggtacaggaggtgttgctgtggctggcactttgatggcaatctctaaaaccactaatggagcccctttttaagggttcaggttgaaatggcttgaccttaaatattatcaactgttaaaagattttagcgtcttgttttgaattgtgtaaatgaccgaggagttgctctgtttttgtgagggaaaattaagaagagttcacatattaatcatcccagttattcctcatgttgaccacagatatttgaataactaacagaaaagcattgctgccaagctggcattcaaactgagattcagacatctcaagattctttcaccttggccttttttttttttttaagtaaatcactatatcctttggtttttattttcttacatgaggatatagtctaagattatgtgaaattattatagtgcttttgaaaaataggagtatttcataaaccatttactaaatttgagtttcattatattacccctgaggtcaaacagttgaggctgacttccagaaagcgcattccgccttgagttatattttatttcaaagccattgttaaagcagagtctccagccatggcaggatgtattagttttctaaagggaaagtacagggagataccatgacttttttagaagagtaagaaacagaataaagtcagtcagttatgtctgactgttcgggaccccatgaactgtagcccgccaggttcctctgtccgtgggattttccaggcaagaatactggagtgggttgctatttccttctccaagggatcttcttgacccaggtattgaacctgggtctcacacactgcaggcagactctttaccatctgagccaccagggaagctctaagaaagaaagacctgagtttaactgtaatgcatcctgtgagaatggagggctttactgtacaactcttgtctccgactgtgtgtcactcactgcacctgcctagtgtcccacaaaatgctgacattgcaagtacagacctagctgcgtctgaggttcatttctgcttctgactgcagggaatcccgcctctctgccccagctccaagggtcccagctaactagacagccaggcatccaggatgcttttctgttcccctgataagatgtgcatgagcatggttgaggtcccaactcagcagaacagattctccaaatgttttctctgttatcttagtaccctgaagtggagaactatcccttccccctgcagggcaagccctgggctaagtggtggagtgtgttgtcattgttcccccccccccgcccccccgtccctcacaaggtctggcttagcatcctcgcctacccgtggcctcatcttgaccttccatgcacactcactctgcagcacgcctgatttggtggttgactcattcctagagggcctccccccagctacagacgtagtaactagcaggtgttcgtactgcgatgcactgaggatgtgtcaggcacccagctacactttgacaaggtcttttttggagacagtgccttccccaagggtggatggaaatttcaagcactgtggcaggctaggtggggcaggaatagagggatacttttgaattgagaagttcttgggtgcttttcaaatcaccccagaaaggaagggagctgcctattacagatttccaacttttcatccaaaaaagcctaaaaccagatgtgtttcagaattcagaatttggggggtgttagcgaccttataagaacatcccctgcatgatctgaggctgacaactaaacacactaatattcacatgaaatgggatgactgttgcaagttgtaccaccagatgagtttcaactgggtcaggttttgctggcaaagtcatgtttggttattacagctttgaggatttcagaattgcagataaggaattatgctccagtaattgttaacaatggtttactattactgagcactaatagtgtgccaggcactaggctaagggagaactttactgatataaactcatttactcctgccatcaatgtgtgaggtagaaatcattagtatcccctacttcactgattcctcctaagtcttctgtaaaaaaaaaaaaaaaacaaaaaactactgggtacataccagataccaggaaaagggagcaaaaaagtctgtccagcccccacttaaagttacttgagtcctgggagagaggcagatggccacacagacatgggtgtgctcagagctgcaggaacagaggagggggcccacccagcctacacacggggaaagctccctgggtaggcactatccttgctgtcctccgtgcaggggaggaagccagccgagaggtcactaccactgcttgttactaagttcactcgttcaaggtcagtgactttcaagttctcttgaggtcacacaggtccctgtggtcctttattttctttaatgttgctctgtcctcccttctcttctacagaacacctatctctgctttctcccaagacaacatctatgaggttcagcctccaaaagtagacaaaaagtctacagagatcttccatgcccacatccaggccagtcaaggtatcatgcagcccttggggaaagaagacacctccatgtaccgagaatacatcaggaaccgctacctgtgaggagagaaagaggtccctgcagggggcccagaaggggaccaaagtcccacttacttgcattctaacctgtttgtctcatcttaaaaaggtcatttcctgtcagtcctttacattggaaggcttttactctttttataactagttaattactaatcattggtgttaataataaagaaatggctgaatattttgctgtcattgtctttgctttattttagaaatactttgcttagaaatgtggttatgtagtatcacaccatcacatttagatagtaacagtatttattgaagacctgctgtggggcttccctggtggtcagttggttaagagtctacctgccaatgcaggggacacatgttcaatccctggtccaaaagatcccccatgtggcacagcaactaagcctgtgtgccacaactcctgagcccatgccctggggcccgtgatccgcaacaggagaagccggcatcatgagaagcctgcacactgcaatgaacag

SEQ ID NO: 167 - DNA, 21456 bp, Hippotragus leucophaeus
  source 1..21456: mol_type = genomic DNA
tgacatcatgcctcctggctctcccgcaggttccggaggctgggttgggcgctccttgcgtctgggccccccacccatctctctcgctgggatgtcgttatgggatgctgcttatcctttttcgttttctttctggccacttcaccctcctcgcgggatctcagctccctggccgggggttgaaccccaaccatgaaagcccggggtcctgaccactgggccgccaggaactcccaggaagctgtgtctctgctgggtggggcccacctggggcacaggcccacccggcacttccgggggttcaggcccagccactccccagggcctgacagccgggggtgggtggggcgccccagggggaaggcagtgttttcagggccctgtctgtttcctgggttgctgtcctgccaggtagctttgggcaagtcccttttcctcttaggctgcagtttcctgggccgggagcgccctgctcgccgccctcccagggcgctgttgggatggaccgggtgccgcccccgcccccgcccccgcccccagggcccgagtctcctttctggccaggccctgcaggctctccgggatctttagcagatgagaggctccgggagggtggggcagggcccgaggctgcctgggcagctgcccctggctggaggctggccagacccaggcagctgctctgggagcaaggacacagagcccagctctcagccccgccctctgcccggctcctggggtagctgcgggattcgtggtcgcccaccagggtcttaatgagtgaagctgaaagtcactgagtcgtggcctacacagtccatggagttctccaggcggagagaaaagcagaaaagcggggagcctttcccttctccaggggatcttttcaaccccaggatcaaacccaggtctcccccatcgcaggcggattctttctttaccagctgagctatcggggaagccctttaatgagtgagccagggttaatgggttaccagcccagtgacacattcaccagcttccccgggctctcaaagtccagacgccctggcctggccttcaaggtctgagctcagcaccttcctgttccagatctgatgcctcacggctctggaagggtcaggaaggtcaaaggtctttcttgtgccctctctgctccagagatgcccccccagggcctggcctctgggctccaatggcccctccgccagcctggcctccccagcccaatcccagtggtgctagacacctccccgcgtgacagcgtggggcctccctccgggtcctgggctccccctccactgctgactgtactaccccatcttgggtccagctgggggctcctggagagaagaaacggcatgggttagaggggagagcgagggaacgaatgaatgatggtgcatacgtgcagactgcaggcagcgtgtgggcctcagaggttcgggcaggcttgcacatgccagccttgtgggggcaagcaccccaccccaccccgttgggcaggggcgtgagcagaccgccccatcgtccatcagcctgcctgcttgcgaccccagaaagttggggggctgaggatagactccccgcgtcatgtaactcccttctgtgcccgtgaccacggctcttcgagtgacagcctgtggacgcctgcagccctggggctgggtgagagggcatcccgtggccagaagtgggggccgccccccggatatcctaaggggccaggagagaccccttgcctgacctgcccctgcccgaagcccggcctcattcagctccccagaggccctcagaactcaggtccttttagcctgggctggggacccaccgggctggaagaggctggccactgtccgagtcacacggccccctggggcaggacccgggccgctcctccccctacctggaagagtgcctgtgcctttaaagcctcccccactccggcccgcggcggtggggggagggggcagggggaggaggggaggagccggcacgggactgagctccgtgcctagtgctggagcggacggaggaccagccttgcagccaggtgagctggggcagggaaggggggtctggctgtgccccggtgctgtgtgaccccgaagccgctgctcaccctctctgagctgccggggggcatgggagagggcagcccagacctggggcctttccgggggcatctggagcgctgggtcccagcccagctctgttctgtcccagctgtgctcccaacaggtcgctcctcctctctcagcctcagtttatgcacctgtgtaatgggagtgggcagcccttcagggtgatgggggcagggctggtgcggccaggttgcgcagggaggtcgagtgaggggcagagcctgaggcccttggcctgactgggtctggcctgggagccttttttgttgtctggtgagtggtctgaggccagctgaccaggcttcccagctgacctggccgcgggtgtggggtgggtggaggaggccggggagtgggcttctcggactgagagggagggggcccagcatggagaaactgaggcctggaagggtggggcaatctgggctcctggggaggttgctgggggggtctggagtggaggcgggcggcgctgggggccgggtgccgtgccgtcagaccacatctgccccgcttgggctctgggggggcggaggggcaggctggcggtgcagggggggtgactgcgccgccccagggggcgcccacccccttgtgggcctcacaggctccgacagccgcttggacaggcttccagccgagatggggtcatcgggtctcaggaagagaccgtttctaattcttgaccctgttccaccagggtgggcagcacagggcacggaccccagctccggtccgggtgtggtgccgagcttcctgcccagggctgtgctcttggacccgggggacgcggctcttcactgcccgccaggtggtaagtggggcgctgggtgcctacctgcccgtgcacgtgcctgcgggcccgagtcacccctgcctgagcctcggctttcggccggcctctgaacggctctggggctctgcccagtttcacccctctgattcgggcgggaggattagcagagaaaccccaggctgtcggcacgcctcatctcttcacgctctcgctgcgtgtcctggaacctgctcgctcagcccagattcctcatgggcgtaagtgtgtgcgtgcacgtgtgtgtgtgtgcacgcacgtgcattcattgggagcaggtggtgcatggcagactcaggatctctgggtgcgtgagacttgcgtactcctgggggcagcgggctcaccgccttctgtgcctagcacaggagccctagggtctggcggggacctccagcccagaccccctgcccccggacccccctggagtggaggtgggaggccatccgggacggagtgtgacacactcgacgtgggaggacaggctttattgttctgaacgtcttgcctctgttgactcggcctgtgggacgctgtcacactcgtcctccctgagaacctgcagctgctgctcggcttctcctgggccccatggcaggccctcaagccggtcccagctcgggatcttcctgctggggtcacctgtagggtctgggtcctcctctgtccattcaggcctttttctgacctccctgccactccaggcaggaaggaaaccactgagcaagctcaggcaggtggggcagagccctgtggcttcccactgcagaagcctccctgccaatggtctggtcatgcagctgctcagggaggaccaagtgctccggtgttgctggccggcgtccagcccttggggacgggtcttgagcctcagtccctgggtcctgcctcgtcccatcttctcagtcatcctggtctgcaggggacaggatgacatccagggaaagagtgatcggggcagccccagcctggggtcgtggtggagagctcacggggcagccccagcctggggtcgtggtggagagctcgcgggagtggggagctcgagggagtggggagctcgcgggggcggggagctcgcgggagtggagagctcacagtcccacgtggagcccgcccaagcgcagtggtgtgtttcggctgtgaggccccgggggcggcagtgtctgcttgggctctgtgtcttcttccatcagctggtgtggccttgtgggctttttgcagattagatagtgcaggtgtggggctggaggcctcggggcagcctagatacagagggcaccaggagaggaaggcctgacttgggaagcggctgatccttgcccttggcagacaaaggccaaggggaggtggggcaacgtccaagttcccccggggtgaatctggagctgctcccgactccactccctgtgtccgggacacacagccccttggggcaggtacggggcggccaggtgtgtgctctgctggtctgtgtggccttggacccactctggccctctctggaccctgcctttccaggctgggcagctggttccccgggcctggggcgctaccattattggacagatggtggaagcttctaggcgtgaagcaggagggaggtggtgccaccccggccctgctgcagggcctcaggaaccatctctgggcctggcgttcagacactctgagccaggacagggcaggccggcgggagacccaccctggggctcgcggagaggctcacagacaccatcctctgggacaaggattgccttgcctctgtcaagctccgctccttcccctttggggccacacccctcacctgctgccaccacccaggggtcaccgctgacagcacctgccacctccagggccctcccagggctgcgtgaactttagccgcctggtgatgggcggagtccccgggctgccgtgacaggtcgggaccagaccagacacagcctctggctgccctccctgccacgtgctgtctttgcccactctccgcggggattcaaagtgccccctgtcatggcagtctgagcgcggcttgggaaagcatttccagacacagagtatttcagaaaggagtgagttttttgagaataaacagcagagatagtgaaaatgttagttgcaactctttgtgaccccatggactgtagcctgccaggctcctctgtccatggggattctccaggccagaacgctggtgtgggttgccatgccttcctccaggggatcttcccgagccagggattgaactcgggtctcctgcactgccgtagtgagagtgcccagagcacagcaggcctgatcacggtggccttggcctgcagcggcgtggagcaggacctgggttcccaagcagaggctgggcccattcgcagtgctgagaccaccagatcccagccgctaggccagtggtcagtgacaagagcgctggcccttcagctttgctggaaagaatttccaccaagacggaaagcagtgaagcaaggagagcggttactaggcagagagcacagtgcgtgtggacagacacacagcggactcggagggagagaccctgggtcacgtccacatggcagttcagatcactttatggggcatttcttcccgttcccctctagccagtccttgtgatttgcctgcttcacgtgtttggtgcatctcaggcccctgccgtgtgtgcacgtgtgtctcctagccaaaagggattctactgcaaagggctgtgggtagagcttccctcgacatgactccccgtcggcctccaaggagccttttctgtgcgtgtgtggtcagggacaagaactctgcgatccatgcagggtccagcctcctcccttacttgtcccgctgttcttatcttggagtttcgggtgagagactgagtctctgatgctgtatcctggtggggggaggggcgtctgatctcctgacagcccactgagaaccgatgctttccatgggtgagtagaaaatttttagagccttgagacaaagaaaattcctgcaggaagggtggcattaggtgattggttagggcgctatagggtgagaaccaggtgggcatttttgcatcactgggggtcgggaagctggctggtaagggtcagggaggctttcgacaatggtcccagtggggctcagtccgtcccagagatgaccttcattctgggctccggggctgtggccttgggataggactccacgccccggggcgggcctctggccctctgtgccctcctcgagactaggtgagggttcctcagcccctctgctcctcctgggggaccccacctggtcacgggtggccttggcctgcagaggcgtggagcagacccaccccagcccccagcccccagcccccagcccagctctgggccccctgaggagctctgcagggcctgcgggcgtggctctgggcggctcttggggtgaggggcccggcctgtgcctggagggactttcccaggcagacaagtcggcctcttcctccccggccagtgccccagcccgctgccatcttttgggaagcagtgggggtattgtgcggcccccgtggtcccctaggcctcgggtaagccgaccagggtcaggaggagcccggccactgctggaggcccagcaccccttctctggcctcagtttcccctcctgacacggatttgggtgagagccagcctggggcgggggcagggcttggatgtggttttggccagtgcaaaaatgtggggggcggggatgggagaccaaagccagtccctcagcggggtgtcttcctccgggcttcctgtgggggctgggccaggcctcccgcccagggagaaggcgccggtcactgcagcccaccgcttccccatgccccggaaggctgagcctcgagggtaccccctggccctctggggagccccccgggcccttggcggaaagctgggcagaggggcggccagagcgcggaccccagggggcctgggtggggtgaggatgcagggtaggaccagggtctcagctgagggtccccagcccaggagaaacgcccagcatgcccttgaggtgcccagcatgaacaggcctgaggcccaggacgtgccctgagggctctccggcccggcggagggtggagggcagagggcacggaaccatcccagagcgggtccctctgagtaggcatggggtgaggcagaggagtcccggcctggggttttccggcagaacatcgccctttgtgggggaactgagtttgggagagggggccttccccctctgacccgttgggtcacacagccctcacctgccgtccttgccactgggaccccatggttaaaggctgtccctgtccagcctggcaggaagtctccagagaagcccacggtgtgagggtgaggcgaggacgaccggctcccctcctgcccacaggcctccggcatccccccagcgaacctggtacttagctaacgcttgacaccttgctcaagggcacagaatctgcctgtggtgcaggagcgcagggctcacccctgggtgcggaagacctcctggaggaggaaaatggcaacccgctccaaagcatccttgcctggagaaacccatggacagaggagcctggcgggctgcagtctgtggggtcgcagagagtcagacacggctgggcaacttacacgttcacactttccaacccacttcatctctcattgcactggacagacagccagtgactttcccaagaccgcacgcaggtgagaaggggcaggctggccccggagcccagtggccctcacccattggtcacatgccagctccctgtgactgacacacagacacacacacccccaccccatgcctgggagacacacagacgcacacagacacacacacacacacacacacacacaccctgcctgggagaaaggccctgggggtggaattcacaccagtgtggaagcggctgacagcttcctcttggagacacagagactcctcacagagctccccgagcttcagagacaccctctccgtttgcaggaggacaagcaggctgcgtgctctggaagtctccctggagcaggttctgtagtcacgggctctcacggagcgtgaaggaggccccagctatttctgcagccggtccagcccacaccatctctgtggcccccttcctgggaggctcgggccgcccacccgctgaggaaggtaggctccggccccgcagcggtcgggagacatgggtgcccccctctggctttgagcgcaccggaagctgggccccacgctctgcggccggtcacctggggccccgagaacagtgtcgggaaggagtcaggccaggcctgtccctcctagggtgacctgaaggccaccgtgagggctcaaccaccataaggggccaggcaggtccggggggctcccctcccagaaagggtccctgccagagggggtcccgaggctgagcaggaggatttagggggcagagatgggtcaggagctgctgagagagggcgtggcccgagcaaagacgggaaggaggcctggcatgtccttctgaggccggactgtgtgccgtgccctgggggccaagtcccctggtgggcaggtcggtcccctgacctgtcacccctgcacctcgcgcctgcagaacatgaagaagcggtccatgctgctggctttggcagccgtggtcttggtcctcctcatcattgggctctgcatctggctgcccggggcctccaagcagcacagccatgtgtaccccagggccgccgtggctgcggacgccaagcgctgctcagagattggcaggtgagtggggccccgggcccaggggaccgcccccgtcagtgccctggggcatcaccctcgcccctctggggctcaatccccagccccgctggccctggtcatcaggctgcctgggcgagccatgttcgagcacacagggctgcccctcccgtccgtggaccttcccggcagcctccggtcagaggagaaggggacctggagccgagggcagggtgtggggttctctcagtgaccggctggacccctttctcagttcaaggctgtctgcctcttcagagaaactgctgtttaacgctctttgtaggcccacaactcacatatacaaaagtcaggtctcacacgggaaaaagatgttattaataaaaaaaaaaaagcaacaagttttcattcttttccaattatcaaagccatgttcatctgtcggcgtgaaaagcctgttggttttcaaatatggcaaattttttgcattagaaaataaaacctgtgggttcctctcggtccaccctggggcggggtggcccctccgagccgctcacccccgcccgtgccgccggcagggacgcgctgctagacggtggctcggcggtggacgcggccatcgcggccctgctgtgcatgggcctcctgaatgcccacagcatgggcatcgggggcggcctgttcctcaccatctacaacagcaccacgcgtgagtgccctatgggatgggctccaggggcggggaggggtcgggggccgtgcagcccgcccacccgcccggtccttccaggtaaggctgaggtcatcaatgcccgcgaggtggccccgcggctggcctccgccagcatgttcaacagctcggagcagtcggaggaaggtgagagcgggctcggggcggatgcggggccaggacgagctgtctgcggctgggggtggccctcccatcccttcccggggcccacagcacccccaccgtggaggatcaagcccattatcacagagtgaagggcgtttctgctcaggcccctcctgggccacagggagctagagaagcggaacgacccctgttgcagcagtgcgtatgggtcaggccagcgccctgctcaggcctttgcacccacggcgagccccttgagccctccctgcacacttggcaggggagctctgtgcgggttcccatcgtatagctggggacgcggaggtccagccagagaggccacgtaggctgaccgaggccacacacagctcccagctggctcagtggtgaagagtctgcccgcagtgcgggagacccaggttcaatccctgggtcgggaagaccccctggagaagggcatggcaacccactccagtattcttgcctggagaatcccagggacagaagggcctggggggttacagaccacggggttacaaagagtcagacacaactgagcgcacacacacacacagtcacacacacacagccacacacacacacacacacagtcacagtcacacagccacacagtcacacacagacacacacacagtcacacacaaacacacacacacagtcacacacacacacagtcacacacacacagccacacagtcacacacacacagccacacacaaacacacacacagtcacacacacacacagccacacacacacagtcacacacacacacagccacacacagccacacacacacagacacacacacagccacacacagacacacacacacagccacacacacacacacacagtcacacacagtcacacagccacagtcacacacagacacacacacagtcacacacaaacacacacacacagtcacacacacacacagtcacacacacacacagccacacagtcacacacacacagccacacacacacacacagtcacacacacacacagccacacacacacacagccacacacacacagccacacacagccacacacacacagccaaacacacacacacacagtcacacacagccacacagtaacacacacacagacacacacacagtcacacacagacacacacacacacagccacacacacacatcacacacacagtcacacacaaaaacacacacagccacacacacacagccacagtcacacacacacagtcacacacaaacacacacacaaccacacacacacagccacacacacacagccacagtcacacacacacacagtcacacacaaacagtcacacagtcacacacacacagccacacacacacagccacagtcacacacacacacagtcacacacagccacacagtcacacacacacagtcacacacacacacagccacacagtcacacacacacagccacacacacacacagtcacacacacacagtcacacagtcacacacacacagacacacagtcacccacaaacacacacacacagtcacacagtcacacacacacagtcaccccccacacacacacagtcacacacacacacagtcacagtcacacacatagtcacacacaaacacacacacagtcacacacacacacacacagtcacacacacagtcacacacacacacagccacacagtcacacacacaccgacacacacagtcacacacacccagtcaccccccacacacacacagtcacacacacacacagtcacagtcacacacatagtcacacacacacagtcacacacaaacacacacacagtcacacacacagtcacacacagccacacagtcacacacagtcacacacagtcacacacacacacagtcacagtcacacacacagtcacacacagtcacacagtcacccacacacacacacacacagtcacagtcacacacacagtcacacacaaacagacacagtcacacacaaacacacagtcacacacacagagtcacacacaaacacacacacacagccacacacacagagccacacacagccacacacacagagccacacacagtcacacaaacacagccacacagtcacacacacacagtcacacacacacacagtcacagtcacacacacacagtcacacacaaacacacacacagtcacacacacacacagtcacagtcacacacacacagacacacacacacacagtcacacacaaacacacagtcacacacacagtcacacacaaacacacacacacagagccacacacagtcacacacagtcacccacacacagtcacacacagccacacacacagtcacacacagtcagacacacagtcacacacaaacagccacacagtcacacacaaacacacacacacagtcacacacacagtcacacacacagagtcacacacacagccacacagtcacacacacagtcacacacagtcacacacacacagacacacagtcacacacaccgtcacccccacacacacacagtcacacacacacacagtcacacacagtcacacacacacagacacacagtcacacacaccgtcacccccccacacacacagtcacacacacacacagtcacacacatacacaaacacacaaacacacacagtcacacacaaacacacacacagtcacacacacacagtcacacacacaaacacacacacacagccacacacacagagccacacacagccacacacacagagccacacacagtcacacacacacacagtcatacacacacagtcacacacacacacagtcatacacacacagtcacacacacacacagtcacacacagtcacacacaaacacagccacacagtcacacacacacagtcacacacacacacagtcacacacacacagtcacacacacacacagtcacacacacacagtcacacacacacagtcacacacacacagtcacccagctggatggtgggaaagctgagtttgaacgcacctgttgtgtttttaaagagcatccaagtcactcattgttcacctgtggggttagctggctagattacagggcgtagtttcttttctaacctgtccttcagccccaggggacgccctgcaaggaccccgggggactgtaagacaaggctggagggaggagggatggagatcaaaggccctgtgggtctgaccgcctcctgcaggctctgcccctgggggactgagagtctccgggagcagcccttttggaattctctttctctccaagacacagtctgtgaattttcacccgctgggaagctcaccaggtgtagtgatgaagtcattcagggtatggggctgcaagaatcttacagacttggcattttgcattcttgagattcacgcgtttgactcgggcttgtcaggcgttggggctgttccccagccagtagaaacaaaggtaacatgtgaagggcaccgtccaggaggagcagaggggagatggcacgggtgtgcccagcgccactgcgcagcctggagggcggacgcgggcagggtgagagggcacgtgggcttaccagatgcaaagacccggaggctggggctggggtggggggtgggcgtctggggggagcaggtggacgcagggtcagtttggacctcgtggtgggtcatcgtgaagacccggccttgtgtctgaaggagggatgggtgttccctgcgtcggagggcactcggggggatgtggctcttttccgacgggacccctcgggctgccagtcaggtggcctgtcgggaagtcccgcgatgggcagggatgctgagggctggtgcccagcacacttggagggcggagccgtggatctgctgagggggtctgctgtgacacacatccaggggtcccggggaggacagatggccctcatggaggccagcaaggctcccagtgagtcccccttgagatgccctctttgaccctcagatctggccatcagggagcagcctcaagagttcagcctgggggctgtcggcacgtaatggggctcagccgtaaagaatccgcctgccaaggctggaggtgcgagagacctgggttcaatcccggggtcaggattgaagatcccttggaggagaaaatggcaacccactcccgtgttcttgcctggagattcccatggacggagaagcctggcagcgggctgcagtccatgcgatcctaggagtcggacacgacctcacgtgtacacacactctggaccaggcagcctggtgtgcaggagggcagacagaggagaggccgggagatacagaagcgacccggggagagggggacgggccaggtgagatgagaaaggggcccggctccctgctgagagggcggcccagggcctcaccggcctgaggtcaggcccgcacgtgctgaaggggagggacgcgtgctggctggcagaccttccaggaggtgatgtggtaacaacctggctcttggaacctcgtgcccgacttctgggtgggataggccactcgagagtggccgaaacgcgctcccctggcccgcatctctggtgaaggcaggaaggcgcctgcgagccggggctgtgctgaggctctctgtgtcagggccgggccctagggcacgccggcgggcggtggggcctggcagggagctggggtccgcggctgtgtctccagtggcatcctggctcctcaaaggatggagctgggagcccaaacccttcatggtcagacggggaaacaggcccagagagggtgcggcgcaggctctgggacagcggaagagaggggaggggctgttgcgggtgactggggccttggtgggttccaggggaacccttgaatcgtacagggtgaaggggctcgtgacccaggaggctcagactgagaggtggtgaggtccggcttccgtacgctctcgctgcacagctgtgcgcctggaccggggtttcagacacggggccgctgtggagtcagacgtgtaggcctgggggacagcggggccccccgcacacgccccccgtgcccccagcagacaccccgagcagagtcacatccctgcctgccaggccgtgtgtgtcagtcgctcagccgtgtccgactctgtgcggccccgaggaccgcagcccgccaggctcctctgtccgtgggattctccaggcaagaatactggagtgggttgccattttcttctccagggtggtcttcccaatccagggatcgaattcaggtcttctgccctgcaggcggagtctttaccctttaccaggcacagccgcaagcatgcatttccttccggagcctctgggtcccactcggggacatgcggaccaccagcgggtgcctctcctttcgcaggcgggctgtcggtggcggttccgggcgagctccgcggctacgagctggcgcaccggcggcacgggcggctgccctgggcgcgcctcttccagcccagcatccatctggcccgccagggcttcccggtggggaaagccttggcgggggccctggagaggcagcgggagacagtggagcggcaccccgcgctgtggtacgcctggccccccgccgggggcgcccgccctgggaccagagccctgacccagctgggctgcacaccgtgggcaggggcgccccgtcctttggtctcctgtcgggggtgagggctggatggctgagcccggccccacccctgcctcacgagagcccccccaccgccgctccagcgaggtgttctgccgagacgggaaggtgctgcgggagggggaccgcgtgaccatgccccggctggccgacaccttggaaacgctggcctcggagggcgcccaggccttctacaacgggagcctcacggcccagattgtcaaggacatccaggagaccggtgagtgggagacaccaggggcctgcggccggaagctctgcagcgggaacccggagcctggggtccttgggccctgcctggacgctgggccctcagggagtgcctggcagggggagtgggtcacaactgtgtctgcagcatggatccacagctcctggctgagtcaaagctgagggaattcctgcagcctaggacaggaagcccggggctgcaggcttggggtcattgaggggtgggcaggaatgcagttgtaggcaggagtgaggattggggaaagcacgaaggtgcaaaccctggaggacttcctggaggaggtggcacctgagccacaggtgaggttggactttgcaggtagagagcagtctgaggcttggagagaggggttttgattctccaggaggatcacagggaaggagggtgggcttgcggagaggggtgtgggggtgctgcacgcagggatcttgtgggcaggttctggtgggtttaggagtcccggttgcctctctttcctgcccctgcctccctaagctgtgtgtgtcagggaggaggacgattagcttatcgacctttaccactgacaccggaaattagcctataaatacttcaaacacttcatctgtctggagccagtttccctggagaacaagggccttcctccatccactagtcagaggaggaggaagctgatgggagacgggggacctctggccccccgagaggacagatgtcggacccggaggccagaggcacagcaggtggaggatgctggcccgggcctggccccggggaggtggcacagttgggggggtatgggggggcagtggacagggctcccctcttgacagtcccccagaagtgtgtcccatccctgggccccccgctgcagggggcatcgtgacggccgaggacctgaatagctaccaggcggagctggttgagcagccgctgagcatcagccttgggggtgcccagctctacgtgcccagtgccccgctcagcgggcccgtgctggcgctcatcatcaacatcctcaaaggtcagccgtgtcccgggctgcgggctgggtggcctgggccagggggcacgcccagtggatctgggcggtcatccgccaccccggggcctgggtaaccctgtggctggtgtgtgctgcccaacacgggtacctttgcttccttcccccgcctcccaagcaggcactgccattgggcagtaactgttccccttctcagggtgagccgagcgactcagggaggcctcccggggcccccgctgtcctggccaaggggacccgggacgctgaggtcactacggctctgcctgaccagggtacaacttctcccgggcgagcgtggagacgcctgagcagaagggcctgacctaccaccgcatcgtggaggccttccgctttgcctacgccaagaggaccctgcttggggaccccaagtttgtcaacgtgactgaggtaagggggcagggggctcagccccactctgctttattcctctgtttgcaccgccaactttggcctcggggccaccaggtgctggggtgactgctgaccctgagtgctggcctctgcgccagggcgctcagcatcagccacgtccttggcctggaagcccctggagccatcagcgccgaggtcggggggcgagcgcacaggggcgtcccagcccccagggctgatgatgaggttcgagccaggtggcaggggccctggccacacacgctcccagtcacaccagcttcccagatccccactgcccaacacgctcgctccccaagtgcccccacacacacccaggctccaggccggacccctgcctccatccccatcacggcgctcatcccctactccgtccgcctgcgagcccttgccccctccaccccctccaggccctgacggagcctcagcctccgctccgctccgcggcatcccacgccttcaccagtgcctcctgcccttggctgcttcctgtgcaaggctgtggccacgtttcctccctctcccgcctccggcccctctgctctgcctgcttcttctcctgttaggacgcctggctcggccttttcccaagggtcccgcctgcgtcttgaggccccggggccccgtccttctcgcctccagtctcttagcctcgacggaccccgccccgggctgccgtggggattttcaggcccagggcgggtggctcgtaggatgtccccgtccctggtccagctgctctcttggaagtagattcgagcttaacgtcctcccctgggattagtcaactaatccgtggatgttgcaagaacccacggcctctgctcggcctccggggccttgccttgccagtgaactctacaggtcaggggcggcccatcacacacccgggacaggacctacaggatccgacaagcgcgcatctccagtcaggctcccgctgtccccagccgccccttctgcaccacgcgcctcccgggcgaagctcacggcctgtcccggtggtgttccgcccccaacacagggccagagggttaacacccgtcagctggtcatttctccgccccaagtgcgggaggttttaaaggccttttagggcccgtaaggacctgtggggagaaggcagtggcaccccactccagtactcttgcctggaaaatcccatggacagcggagcctggtgggttgcagtccatggggtcgcgaagagtcaggcatgactgagtgacttcactttcacttttcaccttcatgcactggagaaggaaatggcaacccactccagtgttcttgcctggagaatcctagggatgggggagcctggtgggctgccgtccatggggtcgctaagagtcagacatgactgaagtgacttagcagcagcagcagcagcaaggtcctgtgggagcagcccctgccagcatcttcagcctcctctctccctaactcctttcactgtctgtgtgtcactcataagccggcctcagggcctttgcattaccagtcaggtggcttttttcagatatcacctcctctgagaagccctccctgaccactctcatctttccgtccctcttgctccctcccctccctgtacttgttctttctagcacatccttgcctgcctttgtcttccctgctgtgagggtggggacaggcgtgtctgttccctgctggtccagcgctccgttgaagagaatgaatgcttgggtgcagtgagagtcagggttcggagggcagacggtcattcagagttgctgggcagcaacagagacaggctggggagagggggttcgggtgggccatgtgagactcagacataggagggttgtggttggagcctgagaaccgctcgcacaagcctgtgccccctcctcgcctccttcacctcctcagggcagctctggggtctcggcaggtggtccgcaacatgacctccgagttctttgccgcccagctccgggcccggatctccgacagcaccactcacctgacctcctactacgagcctgacttctacacgcccgacggcgggggcaccgcccacctgtcggtggtctcggaggacggcagcgccgtgtcggccaccagcaccatcaacctctagtagggctgctgggcggccgggtgggccaggggctgcctgcgtgtctcagaagggaagggctccacgttggcagagtgcctctctggggagtgtgtgttggtgggcacggggcaggccggcccccctctgaccctgccggtcggcagctttggttccaaggtgcggtcacgggtcagcgggatcctgttcaacgatgagatggatgacttcagctcccccaacatcatcaaccagttcggggtgcccccctcgccagccaacttcattgcgccaggtgcggggtgcagggcctgggcggggggcgggccggtgtccccgcggccgctgacccggggctctgtgtccctcaacctccccccaccgctgcaggcaaacagccactctcgtccatgtgcccggtgatcattgtgggtgaggacggccaggtccgcatggtggtgggcgcctccgggggcacccagatcaccacgtccacggcgctggtacgagccccaccccccctctcctgagcacccagccccttacctactgggccacgctgaccccatccccacaccccgcaggccatcatcaacagcctgtggttcggctatgatgccaaacaggcggtggaggagccccggcttcacaatcagcttctgcccaacaccaccgtgctggagaaaggcatggaccaggtggggcaggggaggggcaaccaggtcccggagggggcggggcgaggaaccgagtcccggtgggggtggggtgggggcggggaccgagtcccggtggggggcaggggaggggcaaccaggtcccggagggggcggggcgaggaaccgagtcccggtgggggtggggtgggggcggggaccgagtcccggtggggggcaggggaggggcaaccaggtcccggagggggcggggcgaggaaccgaagcccggtgggggtggggcggggcccccccagtcccggtggggggcaggggaggggcaaccaggtcccggagggggcggggcgaggaaccgagtcccggtgggggtggggtgggggcggggaccgagtcccggtggggggcaggggagggggaaccgtaccccggtgggggtggggcgggccccccccccgagtcccggtggggggcacgggagggggaaccaggtcccggagggggcggggcgaggaaccgaagcccggtgggggtggggtggggccgggggtggggcggggcccccccagtcccggtggggggcaggggaggggcaaccaggtcccggagggggcggggcgaggaaccgaagcccggtgggggtggggcggggcccccccagtcccggtggggggcaggggaggggcaaccaggtcccggagggggcggggcgaggaaccgaagcccggtgggggtggggtggggtgggggaggggacctgtcccccggtggggccccgggcctgcgtctcccatcaccgcagagcaggcagtggctgctccccgcggcccgcggcagctggccgtcacgcccaccgcccgggtctcctcggccccggtccagagaggcccgggccagccgcgcggatgagacccagccggcagccctggccgcggggtgtgtgaagcccacgcgggcggcccgggaccccctgagaccgcgccccctcccgcccgcccgcccgcaggcggtggtctcggccctgaagacccggcaccacgccatcgaggagacgtccacctacatcgccgtggtccaggccgtcgtgcgcacagccggcggctgggcggcggcctcggactccaggaaaggcggggagcccgcgggctactgagcgctccggggaggagaggcccgccggggctgggggccgggggcgggacttggggggctggcttcccctgggagcggcgtagcagggcaataaatgcggcggcgccgggctctgggctgtcctgccgccggctctccactccgtgggctcagcgcgctgtgtgaggtggggccgcctggggggaggatggagacggaactcggaggccttggcagcgcgggcgctgggcccgggagggcgggcggggcttggactgcacccccgagtcccagcaccagggtcgggccgccccgggacacgtcccgtgtcggccaccagtgggcgcgcagccccgggcgatttgtccgcggttccgggaaccgggagacctcctcagctcgctggtgcgcgtctggcacgcactgaggggaaaccgagctttgggggagatggggttgggcaagaggctggagaaaaagatgctggtcagggccaggccctgggggggctttccaaatgga

SEQ ID NO: 168 - DNA, 31502 bp, Hippotragus leucophaeus
  source 1..31502: mol_type = genomic DNA
gggtccaagcctgccctcctctgccccctagtggtgaatgaggaacttgctcccgggtgcttcaccggaccctgtatcatcacttatcttaagagcattcgcttagacgtgttattcagacagaccccaagtcaggctgggagctcggacacaactacttttttattattattgttatttattaactcttccaaggacctgtatctggcgttgagatgacagccagattagaaaaacgaacgtccacggagagtccggacaagctgctggtctccaggggaatctgcctttgcttcccaagcacaggctcgcggtgggcctctgcatcacacagaggctgccatggaacatgctcttaactgtgatggcaggaagatccagtggggggcacgctacaccccgcagtgtgctgactgcggggcaagagtaccgtcgtgagggatgcgaaccctcacttctgaaaacacacacagggtccagacccccctgtctcatcctctctacgggtctcctcggactttcggaagagagtccaccgcctttccgccgcgggacccacttgcgacgtggatttcaatggtgctgccgtcagaacctggggaggaggaaagactgtcacgggttggtgtcaatgccttttacaacttgcacagccatgttaaaaagagaaaaaagaaaaatacacaatatgtccacctacgtgggattaaagcatcccaaaggacagagcaaaccctacagaatcatctcaggcaacttgactgatgtcatgactgtattcaccccactcccctgccttgagacactctcagccaaaccctgtggatgctgcagagcaaatggaaaccaggcctgttgacaccctgccgcttcggggccctgggacttgcactaaatcaggggtcctaatatctcagtgctctgtgatgctagcggggtcactagggcagtggggctacatggtcacccggccaccacttttgcacaattcaggaggtgcccggaggccttctcttgctaaaactgagagtggccttttcacggatgatgccatgtggttggaggagggggaagggtgtagggagcaatcagtggaatcaaagccaggcatgacttgccaaaactgtactccttgaggcctgtttaatccatcccaatgacacaccttcctctggactctgtgggaacagatgtgaggattattctctctgggcagaagtacccaggcttgcctgctgttgtgccaggttctagggtgtgtgtgtatgtgtgtgtcaggaatgagccatggaagacatagggaagggtggccttttcagctgtgcgtgaggcaggtgactgcccttgctgaaaacctccaaatcccaaattctctcaacctatacaccctacggacggctgcagcctgttcccgtcatgaccctctgctcgctcacaaacttcaggcacaggcttctttacacccaagctcagtcctgccacaaggcctttgcatgtccccttttctgcctatgaagctctcctgatgttcttgtggctcactcccacactgcacacaggtctcaactcaaatgtcacttcattctcaaagagatgtcctggacaccttgctgaaaccagtctcctgccctctacggatatgccattgttcctgccctctacggatatgccattgttcacagcacttcctttttccttttttttaaaactttttaaatttcgatgacgtccaacatgtttttttttttttttcccttgagtcgcttgtgctttaagtgcattattttaaattatttgtctgtagctgtgctgggcctttgttgctatacgtgggctttctctagttgcggtaagcggctttgtcattgtggtggcttctgttgttgcagagcacaggtgtcaggatttctggctcacaggctttgttgccccgtggcatgtggggtcttcttggatcagggatcagaccggtgttccttgcatcgcaaagctaattcttaaccaccagaccaccaagagtccttcacagcaccagggaccaccaaggaaccggtggagtccttcatagcacttgctgctcattaattatggtgcctgggcttagttgccccgcagcgtgtagaatcttcctggctcagggatcgaacccatgtccctggcactggaaagtggattcttccccatgggccaccagggacgtccttcagttctttgtgattttcattctgtctctgccgctagaatggagcatctcagtggacagtgcatttctctctcagtcgccgtagtatgtgtggcccctgacacgcagaaagtgctccataaacaaatgtgagatgcgtaaatcctgtggggtcgcggccttgaaacagggggaggccacacgggtccctctgagcagaaagacactaatgtatcaagacaggcagaaatgagccctatttaacatgtgcagagttttggagaatactcaaggaagagaagacagagcctcaagggtgtaaatacctggagaaggctgagatgcaggtggaggccacgactacgaccaagaaaaagcaagtatgtgcctgcagcgtccccacgaccagcccatgaaaccccacggtttcgcagggtcctcccagggcaggatgaagatacgtctggggggctctagcttggagtaggtcacaccaagagtgatgagcccccagagagcagaggaatttagaagatggggggtgggggagaaaggctcccatcaacgggcatggaccctgcagcccatctcaggagagtccaggttgcccgtcaagatggtgggagcagccatttggctggagtggaaaacgtgctcctcctggaggccaggcagtcagttcagttcagtcgctcagccgtgtccgactctgtgaccccatggactgcagtcccaatctgcagttatttcggagccaaaaaaaataaagtttctcagtttccactgtttccccatctatttgccatgaagtgatgggaccagatgccatgatcttagttttctgaatgttgagctttaagccaactttttcactctcctctttcacgtttatcaagaggctttttagttcattttcactttctgccataagggtggtgtcatctgtgtatctgaggttattgatatttctcctggcaatcttgattccagcttgtgcttcttccagcccagcgttcctcatgatgtactcaccatataagttagataagcagggtgacaatgtacagccaccttgatgtactcctttcccaatttggaaccagtctgttgttccatgtccagttctaactgttgcttctttacctgcatataggtttctcaagaggcaggtcaggtggtctggtattgccatctctttaaaaaatgtccacagtttgttatgattcacacgcttaaaggctttggcatagtcaataaagccaaagtagatgtttttctggaactctcttgcttttttgatgatccagcagatgttggcaatttgatctctggttcctctgccttttctaaaggctgattgaacatctggaagttcacggttcagtattcctgaagtctgacttggagaattttaagcatcactttactagcgtatgagatgagtacaactgtgaggcagtttgagcattctttggcattgcctttctttgggattggaatgaaaactgaccttttccagtcctttggccattactgagttttccaaatttgctggcatattgagtgcagcactttcacagcattatcttttaagatttgaaacagctcaactggagaccaggcaccagctgggaagatgacttcagttccaaaaccgcattcctgctggaggcgcttcacaaaggctttgatttctcacagggtcaccccacactgtttaccctcacatcctgagctcgtgggaacttgtgtgcagtttctgtagttcttgcagaaagaccatggcctggagggtcacacagtggctcgtgaccgaggtctcagctcagcacccaccctcgtgacctgacactttgaggcatgctccacatcctgtggtttttcgtttctaagttcttgcatccttcgctgtcccctcggggtctgtccacaaaggagaccccttcttgctacaaccactcagtgagtctcagatgccagcaccgttgcagatgacccctgaccccccaagcctagccccgcctgggctgagctggtctgctgtctgcaccgagcgctttccagcatgtctgactttccacaggcttcttgtctgatcttagcaaatcaaacaaggccgtggtggaatgcagcaccaatgcagcaccattctgcattggtgctgtgtgaatacctgagtgtccttgcaggaagtgcggctgctggtgacctcacagtgcccaagggccaggcctccttcccagcaactcccagcagtgagccttgcacgtctaggcaggctctttggagctttctggctctgtgcagacctaccattcggggaggcatgtcgtctcttgggccctgggccattgtccttggattccttgacacctcaaagccctaaattggcaacaccaactaggaggtacggagcaccagctatacggaacgtgtgacacctagcccgcatccccttcaagctgtggaatcatctgcaaggtttagccagcctgacagattggaggccctggggtctgttaactcccacactccccgggcactgggaacccatggagccaccaggagttacgcggaccacatgtgggtggcaggaaagaatctgagacaacaagatggatgagacagaatagaaacgtggaaggtaacggggaagcgtgggagagaacagggaactctgaagatcaagggaagactgtgcaaaatggaaccatggcgggggggaaacaaagatgaaacagggcgtggagggaaagacaaggtattgtgagagtaacaactgcagaagaagagggagacaaggggtgatgaggggggaagagaaccgtgagaaagcgtggaattctggagcgagaaaggaacttttggagccacggaactgtgctcagaggacacagagatgggagagatagaatcatgagaaaggctgctgtgggataggacaggaacttgagggagagatacagaattgtcagaacagaaaattatggttaccaaaaggtatacgtgaaagggtctggctgctcgccgctcaaaagccaataagcgggccaagttggtggaaagggaaaatttgctgtatttcagatgccagcaagtacgggagagagtggcagacatctgtccaaaggccaaccccccgacaggcagagggtgagacaaagttggggcgggggtacgtgcagaaacagtacagtcacctctgataggcatcttcactgagagcagcaccgcggttgctttaggtacagataatctttacttcctgggtgcacgtgttcccatgtctttgcagtcagttctcggaatcgttggcagctcaagacctgggtacagtcgggtcatcgtgtagttaacgtttccacctggtgtgttttggtatctataagacagctcacaggaggtggctcagaatattccctacagcctctcagaaagaatgaaaggcccttgtgtgtatgtgggtgttagtcactcagtcatgtctctttgtgaccccatggactgtaccccaccaggctcctctgtccacggaattctccaggcaagaatactggagtgggttgccattctcttctccaggggatcttcccgacccagggatcgaacccgggtctcctgcctcgcaggcagattctttgctgtttgagctacagtggaaatctcactacacttaaagagtacgttattatcatttggtcacctttgacggtttttcctttgtttttagcatttctcacctctctgattaaactgattctttgactacacttctccaccagcagcaggcaggcagagaacataatggaatggagggcggcagtgggcaaggatcatacagtctggctttgtttcatttcggggaaagcgtgttgtgggagagactggtcgtcgtgaaaaagagggttaggggaaccctggaagatttttgcgtaagaatgaatcatttgaggatgaataggcagttgtggaaaagaaaaaaaaaaacaaaaatgagaacacagaaaatcattgaagaataaaatggcagaagaactgaaatgtggtcaggaacagagccctaggagataaaatggtgatatgagacagaccacagacagcaaagagctgtgggaaagtaaaattattcgaaagaggaattctggaatgaaacagaaagctgtgggaaaatggagagttgtgggcaagacaaggattatggggaagaaagaaaactgtgggagaagcgtagcgttgcggaaaagacatggggtgggagagagaagtagggaattacaggaaatagagctttgtgggaaacacaggggttgcatggagaaggaggaagaatggaaaagcaagggattattggagaaatgggagggcttgtgggaaatcctgattctttacaaagaagctcctcatattctgaactcaagttgtcatcaggaattatatacagatcctctcactgtgaaccgtcgccacagtcatgaaagtgaactcgctcagttctgcctgactctttgcgaccccatggactataggcctaccaggctcctccatccatggaattttccagtcacttggttagtcctacaagcaaatgtaagcgttctctctccgctcagaaaccttaactggccttttgctgtgtccaagataaaaatgcagaatctgtaaacaccccttgacggatctcttccccacctgcctctctccagcttcccactgccaaactacatgcaagttcagcctttatttatttataagtctttattcctaagttccccatgtgacacttctcagagacgctcacaccccagcccccgcctcagctaaaacggtgttgattgggttgcaagcgctcaaggaatatttgttcaaaatcagttgactttcctgttaagtggcgagaaagtgccagagactgcattagacgcttaatgacggaggcttggtggaagcctgtcagcctggaagtgaatcctaaagtagcagatagaggcttaaggatatgatttacaggtcaagcttcgtcctaacagtgcagacggggagaggcctaaccgtacttaccacttcaagtttgtatctctgggtttttctctgacatgtaacagtattttctgtcttgtgaaagcaaagtggctggaaaggagaaaggaaatatgcccaagattaaggcagccttatctcatttccgatattaccactttattcgaaaaggcccccggttcctgagggttctggcctcagcatacagcctgtggtatagacacgggggtcttgtatgtggaagtcattctctttgctgacttgtacccacatctttaactgtggtgttaaacaagacccttgagagtcccttgggctgcaaggagatccaaccagtccatcctaaaggaaatcagtcctgacttcactttcactttcaagctttaaagaaatattatttgggccttaaactgatattttcatcctccatatcagttgggttaatggacataaccccaaattagatgaaaagtgaaagtgaagtcgctcagtcatgtccgactctttgcgaccccacggactgcagcccaccagactcctccatccatgagattctccaggcagaagattggaatgggctgccatttccttcgccaggggaatcttcctgactcagggatcgaaccctggtctccagcattgtaggcagacactttaccatctgagccaccgggggagtccaaattagatgaacaggagttgagaaagaggactgatttgaggaccacagtgcaagagtcttgaaatgaagaggacagagcggaatagccagcgatgggtgacctgcatttcgtcttaaacgcccccgggtgaagtggacacaccaaaactgcacataaaaacctccagaggtcaggctgcctgctgttcattgtcttacagcacacgtcagcgccgggtgagaaatgaccggttatctcagactcagaatgtcacgcaccccaaggcagagctagtgatcattaacgcaaggctacggtgctcagtagcgggaaagggaagattcccctggaggagcgcatggcaacctgctccagtattctcaccgagagaatgccgacagacagaggggcctgccaggggtgacagtccccggggccgcagagagttcaacaggactgaagccacgtggcacgcaggcagagaaaaggcaccacgctcatattacaaggagaggtgagtgacgacctgcaagattaaggtggtccctttccactcatgccctgaagctggttccagaaatcagggcagagagcctccaggtcactgacaaaggagttcctggggagcctggggcccccaacctaggcctgcctctacccagaggctcttaccttcagaaagcaagctcaaggcctcatcggaagtgtgcgcaccgcctggcagctccttcttgggagcggggccttccccgggctcatgggggcctctgggggatgggggcgccccctcggtggccgaggtggtcatcgagtcccactggatctccttgctgggacctggaagtgtcaggcagcagcccgtccagccgtagaaggccagggacaagaggaaaccttgggctggattcaggatcccctggaagggaggagaaagagacagcatataagtcagggtgctgacgggcatcgggggtcacttcggtccacagggttggcctcagctggagcatgtcctgttggctagtttggggcaagagagagattggcttggaggtgctgggccttcagaggtgtgtgggggacacaggaggccagggggtggagaggaaggtcccgggcatcaccccagcaatgtgggttgtctagaacgcttgatatttatggacagtgttccaagggatacctccaactctgtggctttctcactctgcaacatttcttccagagaaattcccagatattcttagtctgcctgaaaagtttgagacacttgccaaactgacttaccagagtcatatgcgtttaataatgatgctaacactgaacacagaagcgtttaattgaggacacggtacgcctctccacttgtttacttgctaagtggtttccaactctttgcaagtccatggaccgtagcccgaccaggcttctctgcccgtgggattctccaggcaagaatactggagtgggttaccaggcccttctccaggggatcttcctgactcagggatcaaactggggtctccttcattggcaggtggattctcttactgctgagccaccagggaaacccaggcacctctccactaacagctcctgtatggagtttttgtagtggagacacaatatactggaaacatcgagaacgatgtatccgtaagctttccacctgattatggcggtgagtttctaggcaatattgttgcctacatgtgattaggtggttgaaatgagtataatctctacatcctgcatttttcacttattatgagatttcagaattgttatattttacattgtcattttcaacatctgcataccattccatcaagatcaaagacagtgatttacttaaccattcccttttattaaaaaaaaaaatgtgggttgtctagaatgctttatatttatggatagtgttccaaggaatacctccaactctgtggctttttcagtctgaaacatttcttccagataaattcccagatatgtttagtgagcctgaagcgtttgagacacttgccaaactgacttaccagagtcagatccatttaataatgatgccaacactaaacgcacaagctagctcatggaccacagccagataagggggccccgcaacctcttcaactcactgcatatttaaataacacatagataatacttctcagtggtttttatcctgtctgggtttttttcttcttctttaggaagtacatttaaaatcaagattgacctaccatcatgaaccacgtggtcttggctgcgtttctgacctgtttcaaagagctgctgttgatatctggttgcatttcaagatagaacaaaaggatttcgttgatgacatttgagaaccagctgtgagacagaaaatgggccacgggtaaagagaacatgcgatattattctttttttttttttttgcttacttttaatgggaggataattgcttcacaatatcattttttatcaatgccagaggtcaggggacatgtctgcacccatgactgttgagtcactccatcatgtctaactctttgcgaccctaatggactgtagcccaccaggctcctctgtccatgggatttcccaggcaagaatattggagtgggttgccatttcttcctccaggggatcttcccaacttagggatcgaacccacacctccggcattgcaggcagaattttttatccactgagccacctgagaagccccagaaacatatctcccaagacctagaagtctgggaggggtgaccaaatagctgcaggagaattagacgagaattagacgtcagagatggcatccccctcagccaaaagcagagaccaagagaccctcccgatggtcacaatcaacaccatatcgggtggaaggttctagcacacatcaaatagcccagaagtcattcctcctttgatgagtaagctgacgtctaaatggagaccaacacgaaccttgatgttttacgtcggaaatttctgatgttagtgtcagcaggtcggtgaagttggaaatggtggactcggagtagttttagagggaggtaactcacggctctcccaggagaatgtccaaagcagcctcctcccatcagataaattattaaccaccaatgtgtaccctgtcttgcagagcactctgtcgctgcagcaaagggctttctgatttggtgctcgtcacaggtctatttgcacagagcaaacccacctgaaatgctggggcagactgcctgttggggacagggtgggcccactgaggagatgaagattgctctatacccttcttgttgttttctttttttcagttgttttttggccgtgccacacagctttcaggatcttagtttcctgaaccagagatggaactcttgccccatgcaatgggagcttagagtcctaaccactggactgcctggggagtcatggtttctgtccttgttgccctgagctgtgagtcatcacacagacacgggccgttgcctctgtgtctcatcagatacaggaatcttgctgtcaagacaaatgcagagacttccctagccatcccagtggtcaaaactcggtactcccagtgcaagggatgagggttcaatccctggctggggaagtaagaccccacatgcctcacactgcagcaaccaccaaaaaaattaattaattaaaaaataaaacaaagatggatgcaaaaataaaagatggatttagaaggcatgatgaagcatttgatttgaacgttaacccccggtgatgggacaatactccggaggcaagtggttgggatgtgaccacgttaaagtgaggattttctgttgttagggattctctataatttgagcggatgtgaatttctttccagaaggttacggctgtagactggccttcctgtctggacagcattgccttcagggccatctggacaagcctcagaaggtttcgtctcccaagactctgcctctggaactcaggtcacacttggggaggcatcttacaagtggtttgcatttcacctccccgtgacaatttaaagaaacagaaatgcattaccaaacgatgaaaaccagcattattttgaagaaacgggtcttgaccatggctcccacgcgtctctcgttctccgtgtaaatgccctgtcttcccttcagtaaggaggtcactgtggagagcagaggggaacgatgtgtgatgttcatgatttgcaaaggccagcaaaccagatgggaccccgcaagtcaccctggagagcaggaggcaagataccacccatgcctctctcaccactgcatggggtggggcggggcgcttctcagacactcgggggaatacatagcttttaaaggtttactttgaagtctttgtggcttccctgatagctcagatggtaaagaatccccctgcaatgcaggagaccccagttcgattcctgggtcgggaagagcccctggagaggggagaagctacccactccaggattctggggtttctctggtggctcagctggtaaagaatttgcctgcaatgtgggagacatgggttcaatccctgggcttgggaagatcaccctggagaagggagaggctacccactccagtattctggcctggagaattcctcggactttatgagttggacatgactgagcaactttcactttagcttttgaaatcatttagatttatataagacatacagagatagtagactccccatatagctacacccagctgcccccagtgttaacgtcttccacaaccacacgttggtcagcatgaagaacacaacgctggtacagtgctgttaactacacctccaattttatctggattttattcattcaggaactgtatttttaacaggttatactttttatctttataataaaaattattttataaatataaaatataaatataaaaaattatttttattataagaataattcactaggggacttgtctggtggttcagtggttataagattccatgcatccaacacggagggtgaaggttcgatctctgatcagggaacaataatgccccatgctgaaaagtgtagccaaaaaatttaaaaataataaaaatttatccttgatttctttcttttttagccaagactctctgcacgtgggatcttagtttcccaaccagggattaaacccaggtcccctgcagtgaaagcatgtagtcctaacccctggacctccaggggagtctcatatttgctattttaaaatgtcaaaagagttagcattcctcctttagacaagttgaaaaatataaaaaaagtttaaaaaaaagttaataacctatcatccccccaaagacaactactattagcatcttactgtatttctttccagtgtttttttctacactttgttttcctttatttgatgtaattgaatcactattttttaatcactatgttttaatgcaatggttttaaaaaagctgtatttggctcagacagtaaaagcatctgcctaaaatgtaggagaccagggttcaatccctgggttgggaagatcccctgaagaaggaaatatcaacccactacagtactcttggctggaaaattccatggatggagaaacctggtaggctaccacccatggggtggcaaagagtgggacacgactgagtgacttcactttctttctttctaatacactatgggggttctgtgttttccagtttttcttgcagtagagttgatttccaatgttgtgttagtgacaggtgtacacacactggttttcaacgcagatacgaagagagagacccaaagagccttggtgatgtctccctaagtagcagagcatatcgcttaaagttctgcaatccacagtcgatcgtccagtgacctttctgcggaggtgtgtttctttatcctgcccatgagggacccacaggacaagagggggctggagccttgccccagggctcatctcctcaaggatggggtagggggctggaatgcagtccccctcctctgggtctgctgactcaccttcttgcccatatctttctggtggcctctgactcatgtcctgtgggccccttcctgttcctgcccagctgggagaagacacgggcccagacaacatggggatagccctgtccatctccgcccctcgtcaacggctgacctttcctttcctctcctgttcccatctccccctccaccagttttcaaggacactgggtctttgggggcacaccaaggacagacccaggatgagtccaggtagaagggaaaaagtccacaggtccctgggctgtgcactaacgggtgctggcaaagacttcatctagcctatgactgagtaggcttgctccctgtcactgatgtaaacccactcactctcctcaactttattctgctcgtctctccaggatgacagatgaggtcagggatcctagataatgactggggcccaagacctggggctcatccccgtggcctcatccccagggaagcttccctgccctttacctgcggtcactgtcttttggaataggatggggttgcccacgaggaccagtagcagcggcaagtatgtggtgatgtagtgagggatggcgtgctccaggcccctctcgcacctggtggggggtggggggagagaaaaaccgaggcattctccaacaatgaggctttacctgaaataacccactgctttatttgaaatccaagataagaggacccaaagtgcaaagggaaatgcacaggtcacttctggctgccggaaggaaacctgactcacatctcatgtctgtggacaagcaagtaagtcacagaaggagaaggaggatcaatcacagttctgtcttgtctcagaaagcgggccgcttttccagttcccagccagaaaaaaagtaaagacaggaaaagatgggatggtggatgcccactcccaccacaacccctctgtgggacccctgcaaagaaaacatgcacagttcaagcaagacaaaggcactcaacagactagttaggtctcagcactttactacgtgctagacctggctgacatcatcaataagatccaagctctgcccttgaacaactgaaaacacccaagcctcctatttcttgttctcacttgttctcaaggtgacccataatcattttggtggttcttttcggaaagaaagacaggaatgtctactgatgggttgaatgacacatccgtcagcaacaggacatggtggtgtgccacacacagctatgttaccaaggccgggagtgtcactgaacaaatgcgtaatgtagagaaagtggcaacgggggagatggcatccaaaggagaagttgctcaggtccgaccccagatgaggtggaaaaccagaggaaggcgcagccctggaggcccgcgaggacggcatgataaagatgccggtgctttcatcagtatggagtgcgcacgccagagacgaaagtggcaggagaatgcacgaaaccaggcatgaacaatgcagtgcccaccttttgttgccctaaggatggcaataccatgtgaagatggtgcgttcttttttaaatgaagctttcttcttcagctgtgaaagctaaaccatggtctacaaggccttgaggggagaaagggaaacaggaggaacaaaagatgagattcgaatgatgagggacagatgagtgagggtgggagcctgcacagtgctctgaggatgcaaatgatgaagggtggagatgatggagggtggagagatgatggagggtgcagaggagatgatgggatggtggagggtggagatgatgggggatggagacatagagggtgatgatgaaattaaaagacttactccttggaagaaaagttatgaccaacttagatagcatattcaaaagcagagacattactttgccaacaaaggtccgtctagtcaaggctatggtttttccagtggttatgtatggatgtgagagttggactgtgaagaaagctgagcgccaaagaatggatgcttttgaactgtggtgttggagaagactcttgagagtcccttggactgcaaggagatccaaccagtccattttgaaggagatcagccctgggtgttctttggaaggaatgatgctaaagctgaaactccagtactttggctacctcatgcgaagagttgactcattggaaaagattctgatgctgggagggattgtgggcaggaggagaaggggatgacaaaggatgagagggctggatggcatcactgactcgatggacgtgagtttgcgtgaactccgggagttggtgatggacagggaggcctggcgtgctgcgattcatggggtcacaaagagtcggacacgactgagtgactgaactgaactgaactgaatgatgatggaagaggagatgatggagggtgaaatgaggaaggttagagaagatgggatgatagaaggagagagtactaatggagggtggaaatgatggagggcattttgaaaagaccctgatgctgggaaggattgagggcaggaggagaaggggacagaggatgacatggttggatggcatcaccgacttgatggacatgagtttgggtagattccgggagttggtgatggacagggaggcctggtgtactgcaattcatggggtcacaaagagtcagacacgactgagtgactgaactgaaagatcatggaaggttgtgatggtggaagatgagatgatggaggtgggagatgatgggataatggagacgatgagataaaggaggtcagagattatggagggtggacatgatggtggagataattatggatgagatgatggaggtaaagacatgtgatgatggaagttggagatcatggagggtggagatgatggaatgatggagggtggagatgatggaggctgaagatgatgggatgacggagggtgggaatgttggagcatagagaagaagaaggatggagatgattgagggtggaaatgttggagggtggggatgaggcaaggggaagatgttggaggatgagatgatgcagggtgggcatgatgggatgatggaaggtggagatgatggagagtgaagacatggaatgtggtgatgatggaggagatgatggaggaggagaagatggagatagacatgatgggatgatggagggtggagatgatggcatggtagagggcagactgatggatggtggagatggtggagggtggacatgaggcagatgagatgatggtggctggagattatggaggatggagatgatggaggatgaaaatgatggatggtggagatgatggagggtgggatgatgggatgatggatggtggagatgatgaaagatgagatgatggaaggtggagatgatggagagtagagatgatggaagatgagatgatgagatgatagaggatgagatgatggaggttagagaggatgatggaagttgcagatgatgatggttgcaggtgatgtagttacagatgttggagggtggggatgattaagggtggacatgttggagggtggggatgattgagggtggagatgttggagggtggggatgatatagggtacagatgttggaggaggagatgatggcctatgagatgatggaagatgggcatgatgggatgatggtcggtggagatgatggaggctggaggtgatgcatggtggagatgctagagagtggggatgattgagggtagagatgttggaggatgagatgatggagagttaaaatgcttcagggggaggccctgtgttaatcttggagcacctgggctcaaataaaacagccccaggatcccacaggtggaggtgagtgataaaaattccctttccgattaagtgcatccctctgtaacagctgcttaccctgtctttgtccttttaaggctcctggggagagcagattattttgaggggtctacacagaggcctggaggtagtcatagttaacaaggcaatagggctgtggagacatttgagtgagcagctgcaagaaattaagaaagatggggagaaacagtctacaccacaggtcagcaaattttttctctaaaggaacagataggaaatattttaggctttagaacctatgagtagatttgagtcaaatctactcaactctaatggataaagcagccatagacaatacatacacaaatgggtacgggccgtgtgccaataaaactttatttacaaaagcaggcaaagggctggatctgtattaagggccagatctgtattaagggctgtgctgtactgatccttgggtctgtgctgtgttgtgcttattcactcagttgtgtccgactctttgtgaccccatggactgtagcccaccaggctcctctatccatgggattctccaggcaagaatactggagtgggttgccatgccctcctccaggggatcttcccaacctaggaattgaacccaggtctcccgcattgcaggcggattttttactgtctgaaccaccagggaagtccaagaatactggagtgggtagcctatcccttctctgggggaacttcccaacccaggaattgaactggagtctcctgcattgcaggcagactctttaccagctgagctacccagaaagcccctccctgggtctacaccaccttaaaaccaccaagagaccgtgttcaacctctgattttcagttttccattaaaatgtagaatatatctccttagagggaccttgaggttttacaaatggtaaagggcaggggttcagacttaaagaaatgtctgagacagtttcagaggccacatctcccagtgtgtgttcagaagagcacaggatggagacatgaaaaaaaggtgtagacagcagaagctgaacatgagctattctaaaagcaaccctttgagtctcccagacatctagaactcagccctgggatgttcaagtcacctgcatgcccagaggaagctggtttgaaggattaaaaaaaaatcaagagcgggtaggagggagccatgcccatcacaggcatctagggagaagagatgcacctccagctctgattgtgcctctgaggttgtttttttgtttgtttgtttaaacacagccctcagtacagatccagccgtccgcctgcttttgtcaataaagttttattagcacacagccatgcccacttgtgtatgtattatctatggctgctttacccattagcgctgaataatgaaagtcacttaacatcacactcaccattctacagtgaacaagtcagcggcatttaggacatccacggtgctgtgcaagccccacctcaagctctgcatccacactgggcacagcactgacccaacacacaggtgacgggcaggagcaggggaccctggccggctcgaggagccaggcatgtgcttgcagctgcgcagatcctggacgaaggcccgcccacccacatggggtcagcacccaggcacgtcctgcaggaggacacccacgggggttgggcatcgggggagccccggctcacctggccacggaaggatagtacagcatgagggcgccctccacgctcagcagggcggccaggccccaggttatcaagtggtacagcaggatggtgctgggggagggagaatacaggtccagaacctcaggtccagtacctgcccggccccgcactctgcgagcagcggtaaaacacatgcagagcaaactctcagcaaacagccccctgattgtgcctctgaggttgtttgtctatttgtttaaacacatccctcagtacagatctggccctccgcctgcttttgtaaataaagttttattggcacacagctgtgcatacttgtgttatgtattgtctatggctacttcaccccttagtgctgagtagtgaaagtcacgtgacatcaaagtcaccattctacagtgaacaactcagaggcatttaggacatccacagtgccatgcaagccccacctcaggccagtttcaaaacatgttcatccccctaaaaggacacccacacccattcaggggtctctccccatcacgcctgcacccccagcccctggcaaccactcagctaccacctctctctatggattcgcctattccggacatttcatccaagtgaaagtgtaaaaagtgtggccttctgtgtctggtttgtttcccttaacctaaggctttcagagtccgtctaggcaaagctatggtgtttccagtagttatgtatggatgtgagagttggactataaagaaagctgagtgctgaagaattgatgctttggaactgtggcattggagaagactcttgggagtcccttggactgcaagcagaaccaaccagtccatcctaaaggaaatcagtcctgaatatcctttggaaggactgatgctaaagctgaaactccaatcctttggccacctgatgcgaacagttgactcattagaaaagaccctgatgctgggaaagattgagggcaggaggaaaaggggacgatagaggatgagattgctggatggcatcaccgactcaacggacatgagtttgagtaagctctgggagttggtgatggacagggaggcctggcgtgctgcagtccctggagtcacaaagagttggacacgactgagtgactgaactgaactaactgaactgaaggctttaagattgacaggagggacaggcatttcaggtgcacagcaagaataccttgccgttttgattgtgccttcttccttttataaaaatgagctggcataattcctcctagggacctagctcccccagtagcaaggggttcccagcctctgtccttcctgaagtcatctcggtacctaacatgcaagggtcttaatgctcagtccaaaccacaaagaaggtctctgagaaatgggtggccatctgacattccaggagagcaaggagactttctatctctctccactgccacccttgatcattccttgcagagttgatactgttaccacccccatccttacatccttaacagtccccatccttcatctctgtacacccacacaacgccaccctgtccccccgaaggagcagaggcagtaagccttgcaggtgatccagagaggttcagaaacttgccaacagtcactcagtgactgaggtgcgtgagtgagggtcaggaacttgaacctactgaggccaaggcactaaccactatgtaattcctcctagacggccccctctccagctccagaattcttgggctctctatgtagcataacacatccatacatacttcttagaacttcttcctatacctttagataccatcagaatcatgccaacccttttttagtatctgtccagttccaaatatgaaatttactgaattacttatttccacggttttaaaatcctcagtttttttgggggggcacctggagaatattttgatatatatatatatatttgacttacaatgtttcaggtgcccagcaagaataccttgctgttttgattgtgccttctgccttttagacaaaaacgagctggcattagatgtttcttggtggagtgcccgctgggaggttctgatggactgtgtctcagttcagttcagtcgctgtcatgtgcaactttgtgatcccatggactgcaacatgccaggcctccctgtccatcaccaactcctggagttgactccaactcatgtcctttgagtcagtgatgccatccaaccatctcatcgtctgtcgtccccttctcctcctgccctcaatcttttccagcatcagggtcttttccaacgagtcagttgttcacatcaggtgcccaaagaattggagtttcagcttcaacatcagttcttccaatgaatattcaggactgatctcctttaggatggactggttggatctccctgaggtccaagggactctcaggagtcttctccaagaccacagttcaaaagcatcaattccttggcgctcagctttctttatagtccaactctcacatccatacatgactactgggaaaaccataaccttgattagacagacctttgttggcaaagtaacgtctctgctttttaatatggtatctaggttggtcataacttttctcccgagaagtgagtgtcttttaattgcatggctgcagtcaccatctgtggtgattttggagccccccaaaagaatgtctgccactgtttgcactgtttccccatctatttgccataaagtgatgggactggctgccatgatctcagttttctgaatgttgagctttaagccaacttttttgctctcctctttcactttccgtgtctaccctccagaaataagagtgctcgtggcctctccaaccttccccttgggcaatgagctagggcagaagaccccggccgctcgcactgaatacctctgtccagccgacctctgggtcaccaggtaggcatccactgcgtagcagaacaaccaccagaagcaggcgctgtacagcagctggatccagagctataatcagaagaacggcatcccagccccagggtgcaggctacgggcggtcccgccccccccatgttatcccagcccgtgggggtgggctccgggtggccctgccccctcccctgatgtcatcgcgtgtccctgaaagccctctgcagacacatggccacccttggaagcccagactgggatgtggcctagaggcaggcgggtgcctgggtttccccgtctgctcagccggactggtccagcgagccccgcctggtgctcacacgtgtaggcagagagatgaagagctcagagacgaaaggcctggcctggcactttgaaccagacacccttctgctgaggacgaaagaagaggatgcgcaggaaggaccttcccaggagaagcaaggcagggacgggcttcagtgctaagtcctttcaatagtatctgtctctttgcaaccctatggactgtagaccgccaggctcctctgtccatgggattctccaggcaagaatactggagtgggttgccatttcctcctccaggggatcttcccgacacaggggtcgaacccgcatctcctgcatatgcaggcgggttcttcacccgtgagccacctgggaagctccagaggcacctggagggtttgttaaatcacaaacaggccctcccccctcagggcacctggtcagtggggtaagggtgggggtctctgagcttttctaaaaactgcactgggttggtgggagggtcaggactgtactttgaggactcagtgtaacacaggagagtaaaggggtgtggagggggtgccaggggagccacacttactgcactccccacgcagaagacggctggccacacatctgtcctgttcacggcggagatgtcatccacgaaactcggaaaccctaaccacaccgcagatcggaccacgacacctaagggacaaccaggtgataatgctttctttatatctgctcctgactcagacctaaaggggacccggtgactgtaaaaatgatggatggacaaatggacacatggacagatgaaaggatggatggatagaagatagggagggagaaagaaagacgtgaggggggcagagatgatgcgtgaaggagagacggggggaagaaaaaagattcagaagataaggattacggttgcaggcaatcccaggcgctttgatttccacttccactgacgttccttattttgcttgtttgttcatttgcctctaaaacccaactgtttcttggctgtatttttagtgtccagcttaactagtcctcgtatgaaaaaaaaaaaagaacgactgaaaaaaagcacattctttcttaatttttttaaaggatgtattggtttattttattgattggtctttgttgctgctaacgggactttctccaggtgcagcgagcagggccactcctcttgggcttctcgtctctgtggcctcccttgtggagaaccagctccagggcacctgggctctagtaggttcatcacctgggctcagtagtcatggctcgtgggctcagcagttgtggggcatgagcttagtcactccatgccatgtgggatcttccccaaccagggatggaactcacgtgccctgcattgcaaggtggattctcaaccaccagaccaccagcgaagtcccgaaaaagcttattctgaagttgtagagttcttccattcttttaaaaaaatagataaataaaaattgaagattttcacaagttagctcttggtaatctacttctgacatttattatttgtgagttttccttgctcttagatccagatatctaatttgcctataatcagtatccacactcgagggttgtgaggtttgtgataacgtctgtttgagtgtacactgtataacgcaaaatgctcaaggggaaatgaacagcacagacttggatactagcacaatgtgtatagttggcatacaaacatatacttcaaattaggcaaccaaatatacactctgtcctacaccaccaaagggaattatggacactaaaatcctaaagatgttgcttctcattcttaagcacaaataacaaaaataatgttttattccaaatagtgctttgttgttttcactatagagatctgctttgagctcagtaaacactgtatgtatatatttttgcatgtatatgaggtgatgggtgtttaggaaacattttgtggtaaatatgagtcattgtcctgggtatctaaatgtttccccgtgctgtatgtcagtgaattctcagtaaaactggggcgggacttcccgggtggtctagtggctaggattctgtgctttcacccccatggcccagtttcaatccctggtcagggaattgggatcccacaagctgtgcaatttgtccaaaaaaaaaaaaaagattttaaaaaatcctgagggggaaaaaaaccacactccatgcaataggcatctgtatttctttctgtctttattttggctgtacttggtcttcgcaggctttctctggtttcagagagtgggggctactcttcactgtggtacgtggacttctcaccgccgtggcatctcttgttgtggagcgcaggctctaggtgggtcatgggcttcagaagttgtggaccccagtctctacaccataggctcagcaattgtggctcatagactctggagtatgcaggagcctcccggaccggggatcaaacctgcgttccctgcattggcaggcgggtcctttaccactggaccaccagggatgccttggcatctgtgcttgttatttttcagcgaggaggtctggacaccccctgccttgccctgactcctgcttctgttcatttgcccacagtgccatgtaccttccttcgaaaggcaaaacgatgtaccaatcttatttcctgacccctcaaaaggtgtttggctgcaactctatctccagatattcaagttactgaaactattaagacgcttcccccaaatgcttcagcagaatcagggagaaaaccaatttttaaaaatttaattatcctgcaccacactcactttgtcgctaacagaaaggaatgtattccttcctgtcttactccaagtctgaaaaagtgactacaagttccatagcatgtgtctggagtcaagattcttgagcgtctccaagcacaaaacagcaagaggaacaggagagccaacccctgggacacatccaccaggcatctggtcaaggtgggttgaagctgcggcaacaccctcaggacacgaggtggaagccattcaaataccatcagagcctctccttcaagagcagatgattccaacatggccagcacccgtcagcactcacagaacacggacgctctttggatcctgatttgaatgaactcacggaatactggcatatgtgacatgcctgaacatgtagcttgacatgaaggaatcagttttccttattttttaggtggtagtgatatcagtgtgatttatatatatatatatatataattacatattataatatgatactatattaaatatacacttaatataacatattgggcttccctgatggctcagagggtaaagtgtctgcctgtgatacaggagacccgggtttgatccctgggtccggaagatcccctggagaagaaaatggaaacccactccagtacacttgcctggaaaattccatggatggaggagcctggtaggctacagtccatgggtttgcaaagagttggacatgactgagtgatttcacttcactaatataacatattaaatatattatatattgtaatatagaataatattgtaacatacaatatatggcttccctggtggctcagatagtaaagaatcctcctgcaatgcgagagacccaggtttgatccctgggttgggaagatcccctggagaagggaagggcaacccactccagtattattgcctggagaatcccatggacagaggagccttgtgggctacagtccatggggctgcaaaaagtcagacatgagcaagtgactaacacacacacatatgtggtatacagtatgttacaatagacatgttatatattataattatgtatataattatatatacatatgttgaattcttctatagttacatactgagatttgtgtggatgtcatgatataaattctgggatctgcttcaaattagttcagtggggagtggggtacagggatgaagtatagaggaggctaggtgatgagaacagggggcttattatacagtctctctacatttgcatatatttaataaagtccaaaatgaaaagtttaaaaggtcagcagtattgagcttagagtttgtaaaatgtgccatgctagggttgaaaggaggggtcagcaaagtttctgtaatggatcagggagaaaatattttagggtctgtggcccacagtttctctatgcaatacccacttctgccctcgtgggggaacagggtgggtggaagatgttgccccaacagtgcacaagtgcagggcatggctgtatccccatcagactccacttacagacgctgacattcacatttcacagaatgcttacatgtctgaaataccgttgctctgtagattttcttaaaagtatttatttacttggctgggccaggtcttagttgcagcaatgtgagatcttgttccctgactagggattgaacccaggtctcctgcattgggagcgcagagtttgagtcactggaccaccagggaagcccctgttctgtagatttttaagctttgagtgttaagccagctttttcactctccttttagaaagggagaaagtgaaattgcttagttgtgtctgactctttgcgaccccatagactgtagcccacaaggctcctccatccatggaattttccaggcaagagtactggagtgggttgccatttccttctccaggggatcttcccgacccaaggatcgaacctgggtctctcaccttgcaggcagaggctttactgtctgagccaccagggaagtccccgtagatttttaaaacacacttgaacatgtaaaaacattcttaactcatgggcggtgcatagaaaagcaggctggatttagcctagagactacaagtttgcacacctgtgatagaaaacccaaacttagatggataaaaaaggaaataaaaattttatcgtatatgtggagttttcttcctgattctgctacattgctttggaaacaactgcatgtgtgtgagcacaggcttgatattattaactattagtctctcattggtggaatgatcatggaaccattgtattttctgggttttccttcacagcactgcctaaagcttccctagtatgagcagtaacaaatacatcaaagtgttaaaaaaagaaaaaaagaagtccctggaagcaacttttacccatcttgtactgcagaatccacttgtcctctgtagtgtccctgggaggccgtctctggatcagtcctccaatccccgggccaggcactctcaaccacgcacaagcagtacccactccctggggcgggcatcctcatttgcacatgtaggggtccccactcaacgggccatgggccctaaaacacacaccacccgactgctgggcacccccactcatacacagagctccccacttgcgggccccatgccttcaactacacacagatgggtccccacccatggacggggtgccctcatccttgcacagaggggaccccacccacctgctgggcgccctcaaccactcacagatgggtccccccacacgcgggcctggcgtcctcacccgcatacggagggtcccccagtcccggagaccaggcgtgctcaattctgcaaggagtggtccccatccatggcacgtacatcctgaaccatgcacacgactcccggaacgggtatccttcccttcacacgaagggttccccaatcgaggaccgtgttccctcagctcccaagaaaggggtccccactctcgggccccgccgcctccactgggcatggaggggttcccaccgcgggccgcgggccctcattcgcgtaaggagaggtccccattcgctggccgcgtgccctcaacggcacacagaggagccctgacctgaggtgtgcatgccctgaaaaacgcacagacagctccctgctcgcgggccaggtgtccccaaccgcacacgcagtagtccctgccactgggctgcgcccttaaccgcagacagaggcgtccccactcgcgagcagcgtgctctcaagcacacacggaggtatccccactagagggcctcgggcctcagctgggcatggagggatcctgacacgtactacgcacaccctggaaaacgcacagccgggtcccaactcgcgacccgatgtcctcagctgcacacgaaaggcttcccacccacgggccgtgtgccttcaaccgcgcatgcagcggtccccgccacaaggctgtgggccttcaaccactgacccagtggttcccactcgcaggccgtgagcccacaagcacacagagagggttcccactcacgggccacacaccatcaaccacgcacggatgggtcctcaaggctgtaggcgcgccctcaagtgcacaccaagtgtgccctcaaccccgcacggagtggtcctcaccgcaaggctgtgcgccctccatgcccatgaaggtcccactcatgggacgcgcggctctacggtgaggacccctccatgtgagggtgaggacgcctggcccgcgagtagggacctatctgtgagtttcctagggcacacgaaccgcgggtgcggacccctccatgtccagttgagggcccgcggcccatgagtggggatctttccgtgtgtgcttgaaggcacgctttctgcgagtggggacccctttgtgtgcagttgagggtgcatgaagggtccactcatgggagttgagagctctcaactgggcacagagaggtccccactcgcagacccctgggccgtgtgtcttcaaccgctcatacagtggttcccaccggcggtccatgcgccctcaactgtgcatggagcggtccccactcgcgtgcagcgcgccctcaagcacatacggaatgggcctcatgggctgggcgtcctcaccgcacatggaggggaccccacccgcgggccgtgtgccttcaactgcatccagaggggtccccactcctgggccctcaactgggcatggaaggatccccaccacagtatgcgtgccctcaactgtgcaccaagggccccacccgtgggccatgcaccctcaaccacgcacgcagttgtagtcctcaccacaaggctgtgcgccctcaactcccatgaagggcgtccccactcgcgggccgtgcgctctaaattgggcacagagaggtccccactcgtgggccatgggtcttcaaatgggcatggagaggttcccaccccgggccgtgtgccttcaactgcgcacacagtggtccccacctgcgggccgtgcaccctcagctgcacacggaggggtccccactcgcggacagcgtgccttcaagcacacacggaaagatccccactcgcgggcggcgggccctccactggacacggaggggtctgcacccgcagtgtgtgcgccctaggaaacgcacagatgggtccctactcgcgggccagacatcctcaccctcacacggaggggtcctcaccgtagagccgcgcgtcctcaaccgcgcaggcagtggtccccacctacgacgggccgtgcgcccccaactcccaagaaggagtcctcagtggcgggccgcaccccgtcaacctcgcacagaagcccacccgcggggctctcaaccgcgcacgtaggcgcgccctgaaaaaacgcacagacgtgtctctacttgggggccgggcctcctcacccacaaactgagggagccctactcgcgggcggcgcgcgctcaactgcgcacggaggggtccccacctttgagctgcacgccctcaacctcgcactcagtggtccccacctacgacaggccgtgcgcccacagctcccacgaaggggtccccactggcaggccgcaccccgtcaacctcccacagaggaccacccgtgggccgcgggctctcaaccgcgcacctaggcgcgccgtgaaaaaacgcacagatgcgcccctacttaggagcccaacgtcttcacccacaggctgcgcgcactcaactgcgcgtggagaggtctccatccgcgcggtacgcacgggccctgaaccacgcacggaagggtccccggccatgcgccctcacctcccaagaagaggtccgcacccgcggaccgggcgccctcactcgcacaccgacgggttccccacccccgctccccgcccgcgcgggtcgcgcgctaacccaagcagccgagcaggtcgcaagcggtggcggcgcgcacgatgcgcacggaggcggggccgcgggccgaggtcgctggcgaggccgaggcgatcccggggcccgcgggcaggcgcccgggccgcagctgcaggaggccgagcgccaggcggagcgcgccgctgcccaggcatagcgcgtggaaggcctgcggctggaagcccagcgcgagctgcgtggcggcgtcccgcgtggggcagcagaaggtgcccagtcgcggagaggccatgggtcgtgctggggacgcgcgcggctcgggtctgcctgccgacctgagtcatgtgcttggcgcgggggccgcggggagggggcgtcatgtgccctgggcctccccgcagcccccgcccgatcccctccccgcgctggcagaaaaggcgccaggctcggtgagggcagcgcggaacgccacgaggcctcacgagggtgatgcttggtagcgaggaggaggggtggaggcagagaactcagggtcgggaagtccgctctctcgccggtcagcaggccttcccggggggcgggggaggttaattatccagagcccggagccctcaacagtgctgtctcatcttaacccatctcccccagaaagcacgcgctcttgccagatctgagcagtttgagtctctgacatccttcattttgatccgttgccagttcataaacagtgaccctgccgtgattagcatgaaaatacttcttttctatgacccctctccacaacggaaatca

SEQ ID NO: 169 - DNA, 39097 bp, Hippotragus leucophaeus
  source 1..39097: mol_type = genomic DNA
aaaagagctcatctaccagcttcctcccatcattttttccctccccaaacaagacatggccaagatagtcttttaagacttaagagccattttattttaaaccaaagaatgggcttgcacaaatgcttatttgaaagcataataatgtataatgagaagtttgtgccttttgctgagatgattttccgcccccctctcctgcctctaggaatgattttctttctcctttcttatcacaaaggctcagaacaaattctcattgttccttgaagagaaagtctcagttcttctagtgccctgaaaaagctgcaagtgtgtgatattaatgttatttccagctggagacaagctggagaacaccagacctgcgctccagtgagcctgtgcccaggaccccccagaaccgccattcccgaggcccactcaccatctgtagccctagcccctccccagtgaaagcagtccctgggcagatgagccccagccctgcaccctccaacatggcagagggtgtcggcaggttctgcctgagagtcctccccccactctggctctcaatagcaaggaccctcagcagtggggaggaccccacgggcctgttaactgccgagtggccatgggggccaggccagcccagcacctgcacgctcaccccgctaccagcagccgaggcccctgtatgtggggtgggtgcatctgcaggactcacttcggagaggcagtgagagcagcttcacatcggaaaacaaaacggaaagtgtttcatctccgcaaaagccaaggcgaaccaggtgggtcactctgaccataaaaacactgggaaacagaaagactctaaacttgtgaatcatcaacagagcaaacaaaaataatagagctgtgtcttggagaaagtaagggaagaagaggcataaacatgtccctttctccagtctcagcaccactgcctactgctcttttccactaccttctatccagttccacagcctcacctctgccagccactctatcccctgtccagagcccggggaaatccattgtactgaaagggaattacatttcgattgttgaatagttcacatggtcttaagaagtaccagaattacaagatggtaaggaatactcaaagagagacagttattataaagcccaagagtattaaaaatccctgcctctgagttccactagcagtttctgtaactgctatgcccactcctggtggtggtgactagttagagtgtttggaaggaccagagtggcgtaactaggacttgaacccagatggatcagagtccaaattctgctctcactgtactctgctcactcttgctggactggctgtggccagcttcctctcgaaaggaagtttttttcctctgctgcccacagctagctctcttaaggtcctttgtgtgtgcaaacaaacactggtggtgccttcgcccaggagagtcaatctcagggcctggaggaactgaccagcagctctgctgagtggtgagttgaggtgtgactgaccttggatgtagaattttgaatccaggctcaccttggccctcctgatgtgctcctcttctgtcttttctggagaacaatttaaagggccccttctgccactactacccagcacaggtgatgacttggtattctgaagtcgtggaggtaagtggcagacctggtcaccacccacacaggcactgcctctgagcactgctcctcctcccccagcacccagagctttggaagtttctcttcaccttcccagactaaataataaatccagtaactatggccctcagggtagtatttgcaaatatcactgtaaaacaaaaaaagccaaaatacaccaagccagctgctttggcatccactttcttctaaacatcagagtagtcccaggagcccgggaagcagcagggaggagctgaccaagttccacaggaccagttcgagagtactgtcctgtgcatccagcagagaaaagggccttctgtacagaccacatcattctcgttattttccaattactagtcatgaaaatattctcagatgcttttctacttataaatgttatatagtaaattatacttttggaagaagcaaaaagaaggcttcgttttattcatctgaaagtaacaaaataagttcaggaacacctcccagggaaatgttctctgtgcagggggtttgaacaggggttaatattttcttccatggaacagattatattaaggtttatatgagcctagtaatggcagagtttgattccacaaggtagcttatattttgaggtagtgttttgtaagtaataaaatgtggctactctaactttctgttctcagggtgttctgtggggaaagggaggccactattgttcacattacaccttgacctgaagcctggttgctgatgaactcagatatgctggggatctttggtttcatgacgtgctaccttcttcctctactttcttccccataagtattgcttcaagcactccaagtggaaattcaattttattattcaagttagatgttattgtctatttaaagtaaccattagctgcaaacaggtaaaccctaacctgtcagaggcctaacacaattaaagtttatttcttgctgatagatcacggaaagttcagttggtggtgacggataaagcggacagtgtttctcttctctgtagtcctttagggatccagactgatgtagactttctgtcctcttcagcacttggcctccaaggtcgctgtggcatcagtaggcagttggacgtcagggaaagagagtatgcagatcatatgagagtattatgggagggtctcacctggcataaattcctccccctcagttctttaggtcataagtcagtcacatagtcccatcgattgggggtctagaaaatgaagtccctggctgggcagccacttctccacaacaattatgttttgttcctacagattggttgaatgtctgtgtccctctagaattcacaggctgaaatctaacccccaacatgacagtacttggaggaagggcctctgggaagtgattagctcataaagatggagccttcatgaatgggagtataaaagagaccccagagggcccttctgccccttccaccatgtaaggacatacccaaagaacacagcctatgaaccaggaggtaggctgtcaccagacaccgaatctgccagaaccttggtcttggacttcccagcctccggaactatgaggaataaacttttgttgtttacaagccacccagtctaaggtatttttatcatagcagcctgaatggactaaaacatttgtgaaaaaagagcacaaaacttcggtggacagctaggaggccagagaataaaccaacgatactgggtccttccaggtgatttgccatcaagcgagtgttatacactatgtggctgctatctaaattcaaaggattatttttaacatacttcataatgacctcaaggagctttcttttccatctccctcatttcttaaatccctcttctagtatttggcttggagaaggaaatggcaacccactccagtgctcttgcctggagaatcccagggacagaggagcctggtggcctgccgtctatggggtcgcacagagtcggacacgactgaagtgacttagcagcagcagcagtatttggctgatttttagcagaaaatactttgtgttgtcccactgccatccagttaggctactggatactgtgcccagtatctactaggcacatcaaaaataccatttaaagcctcacatagcaaagtggcgagtcatagaggcctcagctgcagccaagatgggtacccatacctggagatcccactgattgaatccatctgaggagagcaggaactcgaagaaggctgctctgacagaaaccttgattctagtcccagctctctaccaactgacagtgagatgtcagacaagtgactcagcctctctggactcaagtgtccttctctgtaaaatgagggctttggattaagtgaacccaagggtcacctgaaactccccgtttccaagcctatgtcagatggtccctgttccaactgctattgtcttcctgtataatttcacacatattacacatgaggagaaaacagtaaaatatacatacatatatatacacactcaattcatatattaactatatctttttgagagttttcaaaactagccttaaaatttttgacactatttctacatatatccaaagtgcatgtgaagttagcacaacacattttgctgatggtttctctttttctggagatactgtcatgatttttctttgagttaattacgtgacttcttccatccagtttcttccaagcagtgatttagtgcaaatttaatatcgatgaagcatgccccaaggtacactcaccttgttactagtttttaaaagaaaaagattgagctcacttttagaaattagttaaatcaaactttaagacacatgcatggaattactacagcagcacctgatgtaacacagtagacttttatcatggtgtgaacctcatgtcctggaattcaactaattacaggtggtgcaggcaggaggtgggaaatcagagggacaaagaaaggaaagattcgggggaagcaaaagaatgaataatcaccaaaatgctaagggagatgccggaaagaattgaagagcaacctaaagggcaaatatgtggggaaatctaaacataaagcaatagcaatgtctcctgagatttaatatagagaattaaaaatgcattacagtagtagcatacatattgaaagcaggtaaatggaaagtattctaatattctttccatttttgaggaagaggtaaaagtaccaatttatattaaattttgataagtcaaggatgcatattttaatcttcagggtaaccactaaaagaatattaaaagaggaattacttctaagtgaatggtgggggaagtggaatcataatttaaaatatttgatctaaaatcaagaaagaagaaaaaggcaacgaaggacaggtaggactaacagaaagcaaactgtaaaatgatgaattaaaacgcaaaattatttgcaatgttattgtcaatagaacaaatgctccaattaaaagacaaaaattttcagatgagataagaagaaacgaagttccactaaatgctgtttgaaaaaaaatataaaatataaaaaggtaaaacaattaaggaaaagccatatcatgcaacgaaacgtaatcggctacattgatatgaaacaacaaatgcttttggaaaacaaaaagcaggctaataatagaaagggacatttcataaagaaagaaatttgatttaacagtaaaaattcttaatttgcctgcacctaatcccctggagaaggaaatggtaacccactccggtattcttgcctggaaaatcccatggacagaggaggctgatgggctacagcccattagggttgcaaagagttggacacaattgagcaactaagcacaatgaagtattctatataaagtaaaacctcacagaaataataggagaaatagacaaatccacaattatgatagatttttttacatattatacctcccagaaaatacaaagaacaaatttcacctaagtaatatatatagaacagtggagctaacaaatgaatacaaaatattttttttcaagagtacatggaaacatttacaaaactttaactacatgctgtgacataacgtttcaaaaaaattcagagaatggtaacatagaaagtatttctctgataacagtgaattacaggtggaaaactttttaaaagataactggaatacctacctgtgtctgtgacttaagaaacaaatctataaataatccatgaatcaaaaaaatcagaaatcacaataaaaaagaaactatttcaaactcaatggaaaatactacatattgaactttgcgagaagttcaaacttctggtaattaacattaacattttatcagactgacccttttgccaacacaattctaaactcttgaagagatacaaaaaaattcccagaaaaccacacacacacacacacacacacacacacacagctctttgaaggcaatagggaacagctgaacatctaaaagcaggcataaactgcaggagccaagacccttgaatgacagaaatcacacagggtaagaaccacattcatctggcttttcccctaaaggaattcccccacttcacaacaaaaagggaattgaggttaagcagaaagcagctgtgtattattagactgtggagtaagaaactggttttcaggaatgactgagcagctgaaaatggaagggagtacaaaaaggagaaaccatgaaaatgaaagtcgctcagtcgtgtctgactctttgcgaccccatggactgtaggaatgaattctccaagccagaatactggagtgggtagcctttcccttctcccggggatcttcccaacccagggatcaaacccaggtcccacactgcaggcagattctttaccagctgagccaccagggaagcccagaaatactggagtgggtaacctagcccttctccaggggatcttcccaaaccaggaatcgaaccaggatctcctacattgcaggtggattctgtaccagctgagctaccagggaagtcctggagaagcaatgggagaagcccagaaaagctggtgccaagtacccccaaatacttgactgacttctgaactgtgtatacgcagagtgagactccaaaactctagcagaaaaagagctggaagactgagagagcagcagagacagaaattgctgcccagtgctggggagagggcttgagttcacgtcctaccaagttagaggagcttggtaaacacttcagacttcccactgaaaccccaaaaacgccacaccttaagagtaaggaccacaccctcttaggattaaggaagaaaatgaaatatgccattctaacaaagcctaagatcaagcctgtgcaatcagaatgaactgccattgattcaactgcctcgcagaacaaaactcaacacttcagcggaagatagaattcagagtcttttcaatgcatcccttacaatgtctagtatacaatataaaattaacagacacagaaagaagcaggaatatgtgactcacagtcagtaatagtgttgtgttgagctatattggagactgaggcaacagggaaaaccataaataatgattacgtttgtgtttgaaattttgatattttattcatcatgtattttatattaattttgacttttaaaaacattaactcatatagtatgtatcctgattaccaattatttgacatctctttaaattttgcattcatgatgagtatcacattctcacctcagtcctagtcctgaagccaacaaaggagagaatagagaaccataaaaataccaatagatttcttgaaaaaggcatgaaaagatgaaacaagaaacaaagaacagacaggacaaggagaaaacaaataacaagataacagactcatagacttaaaccatgttagtaatcacagtaaattggctttacatacaatctgacaatttagtctggcagagattatcagtctggataaaaaattagatctaactatatgctggctaccaaaatacacactttagatatgaaaacagaagtatgttaaacgtgaagggatggaaaattacatatataggagagttaaaggggcttccctggtggctcagcagtaaaaaatctgcctgcaaaacaggagacccaagtttgatccttggatctggaagatcccctggaggagggcatggcaactcactccagtattcttcctggagaatcccacggacagagcctgatgggctacagtccacagggtcacacagagtcacaactgacgcaactgagcagagcacaggggaggtgaaatgtctcctcagccctctggagatttctggctgggactgacacaagcagattaacaggagaaaggcataccgcttttatttagtaattttttcacatgcacatgggcactcccacaaggaaaatgaagacccagaggagcggcagggtcgatgtgctcatatactaggttcaacaaaggtggcaattgtggaaaagtaactaagctatttgggggactaaagaaagctaagaattttttttttaacaaagtctgtttgtacagatttctctccacctggactcctcatttctggagacaaggatgtttcttttctcctgatatgaggagggtgtctttcatacaggaatttagtttcatgccctgctttcaggaagaaaagcaaagtgcatctgctgttttcttccagtgcctttagctcaaaataatcaatataccaaagtgacatgtcctgaacttcttcacgtgccatgttaatactaatcaaaagaaagctgtgacagctatactattctcagacaaagtagatttagtgcaacaaatattgccagagattaaaagataatttcataatagtataggagttagtacattgagaataatgtgctaacataattataaagtctctcagtcgtgtctgactctttgtgaccccatggactgtacagtccatgaaattctctagaccaaaacactggagtgagtagcctttcccttgcaggcagattctttaccagctgagccaaaagggaagcccaagaatactggagcggatagcctatcccttctccagtggatcttcctgacccaggaattgaaccacggtctcctgcattgtaggcagattctttaccaactaagctatcataatgctctcataaatataataataataatcataaatgcttatgcatcaaataatagagcttcaaaataatatgaaacaaaaatgacataactacagggagaaatagacaaatccacaattatgattagagttcaaaactcttaatatttgatagagtaagatcacagaacaccattaaggatatagaataattgaatactgctatcagtcaacttaacctatttaacatttatagatccctcaacccagcaaaacgagaaaccatattcttttcaagtatacatggaacattcgccaagacagaccatacactagaccatcaataaatgtcttgataaaagtattcaaatcacacagagcatattttctgatgaaagggaattaaaatagaaaccaataacagaaagatacatggaaaacctcccaatatttggaaattaataacactttaaaataactcatgggtgaaaaaatcaaaacaaaaattagaaagcattttgaactaatgagaaatgaaaagacaacatatcagaagttgcggatgctgagaaagcagtacattgggagaaatttatagcaataaactctttagttataaaaaataaaacctctcagatcaatgggtcagtttctaccttaagaaactattttaaaaaatagcaaattaaatccaaagtaaacagaagaaagagtaaatatcagcacagaaattggtgaaataaaaacagacaaccaatgaaagctgatgaaaccaatagctgttttcttcgagaaaaatcagtcaaatccttagtgtgacctgaatccttctaaatttattgaacagaatagagtccagaaatatatccacacatgtatggtcatctgatttgagacaaatatgtcaaagttaattcagtgatgaaaagatattttttcagcaaacaatgctagaaaaactgcacatttgcaaaaacaaaaaaccaaacctttcctttacaccacatacaaaaatcaattcaaagtggatcactgacctaaatgcaaatcctaaaactaaaaaacttctggaagaaaacacaggataaaatctctgtgaccctagcttcagttcagtcactcaattgtgtccgactctttgcaaccccatgaactgcagcacgccaggcctccctgtccatcaccagctcccagagtctgcttaaactcatatccattgagtcagtggtgccatccaaccatctcatcctctgtcatccccttctcctcctaccttcaatctttcccagcatcagggtcttttcaaatgagtcagttcttcgcatcaggtggtgaaagtattggagtttcagcttcaatatcagtccttccaatgaatattcaggacttatttcctttaggatggactggttggagctccttgctgtccaagggactctcaagagtcttctccaacaccacagttcaaaagcaccaattcttcagtgctcagctttctttatagtccaactcttacatccatacatgactactggaaaaaccatagctttgaccagatggacctttgttggcaaagtaatgtctctgctttttaataagctatctagcttggtcataacttttcttccaaggatctagcatcttttaatttcatggctgaagttcaccacctgcagtgattttggagccccccaaaataaaatctgtcactgtttccattgtttccccatctatttgccatgaagtgatggaaccagatgccatgatcttagttttctgaatgttgagttttaagccaactttttcctctttcactttcatccagaggctctttggttcttcttcactttctgccataaaggtggtgtcatctgcatatctgaggtgattgatatttctcccagcaatcttgattccagcttgcgcttcatccagtccagcatctctcatgatgtattctgcatataagttgaataagtagggtgacaatatacagctttgacgtactcctttcctgatttggaaccagtctgttgttccatgtccagttctaactgttacttcttacttaacctgaatacagatttctcaggaggcaggtcaggtggtctggtatgcccatctttttaagaattttccagtttgttgtgatccacacagtcaaaggctttggcatagtcaataaagcagtagatgctttactggaccctagcttaggtgaagactttttaaataggactcaaaaaagcacaaagatttctgttcttcaaaagtcaccataaagagaacaaaaagacaaagtgacagattggctaaaacaagtaaataaataatgataataatgcaaaacagatacctgatagtttgtatctaaaaaatagaaatcatagaaataataacaaaaacaatccaattgaaaaattagcaaatgatttgaatgcttcaccagagaagatatacagatggcatataagcacacaaaaaggtcaatatcattagtccacttttcaggaaaatggaaatcaaaaccacaatgagataccactgtatacctacttgaatgactaaagttagaaaagggcaattatcaagtgctaaggaagctacagagcaactaaactcttagtcttgctggagggaatgtaaaatggtgcacgcacttttggaaacagttcaacaggataatatacacttactatacagcccagccaccccactcctaggtatttacctatgtaaaatagaaatttatgttgacaccaaaacctggacaaaatacaaatattagtagataaactgaattacaacaaaattgaaaatttttgtgccacaagtgataacattaagaaagtgaaaaagaaaccacataatgagaggacatttttgcaaatcttatatctaaaaaaggtacttgagtgcagaatatataaaggacaattaggactagataataaaagaacaatatcaaagcaggcaaaaaatttgcataaacatttccccacaaaaatagccaaaaatcagatgaaaatatgctaaacatcattagtctcagcatcaaatctaaatcacaatgagctatcacttcacacccactgaaaagttaaagcgaaagtcattcagtcctgtgtctgactctttgggaccccatggactgtagcctgccaggctccatggaattctccaggccagaatacaggagcagatagctgctcccttctccaggtaatccaaccaggaatcaaacagggatctcctgcatttcgggcagattctttaccagctgagctaccagggatggctaaattaaaatagacaataacaggtgttggtgaagatgtggacaaactaggatgctgctatgtggctggcagtaatgaaagctagtagcagcagaagtaactaaacagcagcacattcatttgatggaatttattcagccattgaaattcacgctcaggaaacatctgaccgagagaaacatgagtgaaaagagcaggatatagagggggcagccagaatgaccccaactgtgggctgcagagagagctgcctgcagcggggctatgtgctgtaaatggagaactggaaagtctggggcttacggtgggctgggaggggcgggcgccgtggattggagaatgatactccctttgcgtgcaggtggtggaagcattaattctcggccccggccttgttccaagcggtgctcaagctgctataccccagccagtcctcacaactcattgcttgctgggctgtgcttaaacctcccagggggcaccggagcattaacaggtgatttggttgggaatttcgaccctgctgtgatcttcatcactgttcccaactttgcaccattaacaacatacactattgtaagagactctagcaaacacaggttcaaaacaaagaccctaaggagcaccccatccccagaatgaattgagaacccttataaagaaagtctagcgttggaactctggggataactgggttcttctgcagattgtttctcttccaaggaacccaggcaagcagccacagaagagcagctctcaccctagaactgtggttcagcaaaaaaaaaaaaaaaaagtcagagggtgaggaagaggccagcggggagccaggagacctgcgttctgatgccagctctgccttcaacaagtgatttcttctctctgggcctcagttttcgcttctgtagaatagggatgttcccagaacctaggtggggagtggcttgcgcttaggcaggtggcggggcccagcgcagtggccgatgcaccaggggcctctgacggctaccggggaagcctgcacattgtgggcctcggcgccctcctcgttgaccaaagggccgtagccattgtcccgcaggaagtgagggtcgcaaccaggggtcgacggtccctgttacccagcgggagcaaactgcccggctgcgggcagaagcctaagccaggcagaggcggagcgagcttccaatccgtccccaggaggtcacgggggcggtcacgtgaccgcacccggaagcgcggcgcggacgcccggcaggctggtaggtgtctggctacgactcggtacgcacagtccgagggctgcggtggacggcggggcctcctccgggacccctgcagggccctcccggaagtagaggagtccccaccgccagcctcacccacccggcgtgggaacgtgggcgcgtcgcttcgcttctggtagccacagtttctgcagctacgaagtggggccgttgccactctgaagttcggggaattggggggtgaaaccggtgcataaactgtaaagtgcagggcaaacaagaaggctgccagtgggcaggtcctactcctgcgtcctccggcctttcaggggcggcggtcataggggcagtttacggggagaatggtgaaaatgagtgttggtggggggggcggtgggggaggaaaggggcagagaggttccccaagttgccccggctccatctaaggctccactgagtcctgtgttccctccttacagcagagagcagggaaaccacaaaataacaccagtgaggttctctttccaacagaccttttgaaataaaagtagaacttaatgtccactaaagaggatttccatgttaatgggaagatggcgttcaggtcagtcatgcccgcgatgtggtagttaagtctcatgttgcacaagatgctgagcccttaacagccttttcttgccttttgtttgcttacagtgcttggcttcctgattaagctaaagctttatattgttcctgccttttatcatcaaaatatgagtggttctggaactagtttagttcaccctgtttttgaggaggggagctgggaaataagaatagtgacacccccacctcacctctctgtgtaagaagagctttccaggcagcacagtggtaaagactctgcctgccggtgcaggagacacaggagatgtgggttcaatccctgggtgggaaagatcccttcgagaaggaaatggcaacccattccagtattcctgtgtgggaaataccatggacagaggagcctggtgggctgcagtccataggattgcaaagagaaggacatgattgagcacacacctctgtaagaaagtagtttgctaaggatgtgactgcctggttgctccctgactcactagaaccctggagggagatggagccagaggttgagcccagagaggtgtaagtgccttggcaaagccagaactagaaccaggtctcccgtgcctgttgtgttggtttactgccattcattgcatatcctgggatatctcctgtcttccaggactgcatctctgtctccctgggatgtgctgtgctatggcccaatagtcactcatagcaggctccctgggggtgctcagggtaggcttgctgaccacaccatggttcagagtgacccacagggaagtgagagtgctcgggaggaaacagtaggtgagaattactgtttgtggccactggctgggtccaagggactgtgcttgctgggtccgtgttctccattgtgggaaggcaggggtgagcagtgtgcagagcactgggacactcctggcagtggggagtgtgttctgagcagactgcccaggagccagagagagacctttgaccactcagccctccactgtttgtccactccccagaatgggcagcagttgaaatgagagcctctgcttactcttatgcccccccccccgccccgttttaaccaggtcgtggaatgctgtgctgcgctccatgagctggtcaccgagactgtctcctgcagccctttctgagccttcggctgtcaggaagctctgctgtgctccttgccacggtaggtgatcctgcctgagatggaagcaggtggcacctgccctggggctactcggactatgggaggtggacaggatggggcaggcagaggactgagctctctcaggctctgcagagctgtctcagccgcatcccgtgcctgccctggccctgcatcctcatgtcacctttgcctgttctgttcttcctccctggcatctaggtgaccgtcacagcctgttgtggtgatttagttgctaagtcatgtccatctcttttgcgacctcatgaactgtagcccaccaggctcctctctgtccatgggatttcccaggcaagaatactggagtgggttgccttttctatctccagaggatcttcctgatccagggatcgaacccacctctcctccattggcaggtggattctttaccactgagccacctgggaaaccccatcactaccaaacctctaagctacacctcctgaatcagccccttcctcctctcagttcagttcagttcagtcactcagtcatgtccgactctttgcaaccccatgaaatgcagcacgccaggcctccctgtccatcaccaactcccggagttcactcaaacacatccatcaagtcagtgatgccatccagccatcttatcctctgtcgtccccttctcctcctgcccccaatccctcccagctttctcctttggccttcagcaaagagtggacccacattaccccacaccaggacaactggcctccataaccttgaccccacccgtccacgacacatacccttaccagcctatagggactctctgttgttcatagacttcattctacagcccactgttctccagcacacgtactcccttcccatcaagccagcccctcaagtcctgaaccttgccaggctcacctgggagtcccagggcagcctcttccaggcccacctgccctcatgcagcaatcttccctttcacgctccattgctctcctggtctgtgctttgtgtgtagcagttccatgggagtaggctacattttctttttttcactgtgctagaaacacaatgaagctaggtgctctgagttaaagttgataatctaactggagattagggaggtaccagtaagaacccggagaaggcattggcaccccactccagtactcttgcctggaaaatcccatggatggaggagcctcgtaggctgcagtccgtgtggtcgctaagagtcagacacaactgagtgacttcaccttcacttttcactttcatgcattggagaaggaaatggcaacccactccaatgttcttgcctggagaatcccagggacaggggagcctggtaggctgccgtctatggagtcgcacagagtcggacacgactgaagcgacttagcagcagcagcagcagtaagtaccaccaagctggtcacctaggggatcgaagagtatagctgagtctgagacctcaagatataatggtccatctgaggaaactggacgtccagccatggaagagttaagagcagggcttcctcatcactgtcatgtcttaccacgcgtgtaatgtgctcgtgtctgtgtgacatgctgaggtacaggagaaggtctgaagcccctgcctggggcaagcagctggcccgagagctctagcttcaccagacgtggtcaggctgccccaggagttgagagtcaatgtcttgctgtacctcggggccaaggcccagagtaggaagctgtggattaaaaatctaccatggtgaataagaaaacacattttacataatcaagcattgcgtgttgcagagagggaacatgtgtgggtgatgggaaggaggtctgaaagggcagaggatactggtggaggtggctgaggaggcagcagctaagcaggggtgagaagaactgtggccgaggtcacagcctctctgtccaccagggcaggaggaacttgtgattaaaactcccatgatgctgagcccactgcctgtgggctttggagctgatactctggagctgtttttgacttgagtagaagtactggaccgcctggggggaggtgcactggctgcccagtgtcccaaactagaccttgactgcctgcctccctcgtgcagtcgaccccatgtccagatcacaggctggctccttctttacgcttgaccccagtaggctggtagtgtgtctgatacggtgtttagagagcctggataacacaggaaagagctcagccttggcgttcagttcagttcagttcagtcactcagttgtgtccgactctttgcgaccccatgaacctcagcatgccagacctccctgcccatcaccaactcccggagtctacccaaactcatgtccattgagttggtgatgccatccaaccatctcatcctctgtcgtccccttctcctcctgccttcaatctttcccagcatcagggtcttttcaaataagtcagctcttcacatcaggtggccaaagtattggagtttcagcttcaacataagtccttccaatgaacacccaggactgatatcccttagaatggactggttggatctccttgcagtccaagggattctcaagagtcttctccaacaccacagttcaaaagcatcagttcttcggtgctcagctttctttatagtccaactctcacatccatacatgaccactggaaaaaccatagccttgactagatggacctttgctgacaaagtaacgtctctgctttttaatatgctatctaggttggtcataactttccttccaaggagtaagtgtcttaattcatggctgcattaaccatatgcagtgaatttggagccccaaaaaataaagtcagccactgtttccactgtttccccatctatttgccatgaagtgatgggattggatgccataatcttaagtttctgaatgaatgttgagctttaagccaaccttttcactctcctctttcactttcatcaagagactttttagttcctcttcactttctgccataagggtggtgtcatctgcatatctgaggttattgatgtattctgcatataagttaaataagcagggtgacagtatacagccttgacgtactccctttcctatttggaaccagtctgttgttccacgtctagttctaacttgcttcctgatcggcatacaggtttctcaagaggcaggtcaggtggtctggtactcccatctctttcagaattttccacggtttattgtgatccacacagtcaaagggtttggcgtaatcaataaagcagaaatagatgtttttctggaactctcttgctttttcgatgatctagtggatgttggatcctggatctctggttcccctgccttttctaaaaccagcttggacatctggaatttcatggttcacgtattgctgaagcccagcttggagaattttgagcattactggcgtgtgagatgagtgcaattgtgcggtagtttgagcattctttggcattgccttttctttgggaaaactgaccttttctagtcctgtggccactgctgagtcaaaaataggagtaactggagattcctgctttgctgtgagggtgctgtgaagtaacgccaggaatgccctcgtggtagtgcccggcgcatagtaaatccggtaggtgtttgctgggattataattttttttgttcctcaggctgagtctgtgggtgtggggctggaggtgaccttgacctcgcttctccttggcagatgaagtgcgtcttggtggccacagagggcgcagaggtcctcttctactggacagatgcggagtttgaagacagtctgcgcctgaagtttggacagacagagaatgagggagaaaaggtgagtgcagagcaggcgggtcagacgggggactagttcagcaccgtcaggaggcggggagcctgcccacctgccctggccagccggaggggcaggcaaggctgcgtgtgtctgcacctctcgcacccacacagcctcagaggttagcccttggtgctctggagggctgtgccccaccctcaccccatgagattttgagcaccttagcatgtgcttattttctgtcttcactaatgaagtgtctcttcaggtctgtggcctattttttattgcgttgattcttattaatattaccaacttttgaaagttccctaggtattatggatatgtcctttagtagatacatgttgtgcagatattttcttccagtctgtgtcttgtcttcatatctactgcacaatatctttcaaaacagatattttaaatatgatcactccatgttatctacttgttgcttttatggatcatacttttggtgtcatacctaagaaacctttgcccaacccaagatcacaaagaattttccccatattttctcctggaagttttctagttttaggttttatattaggtctgatgatgcactttgaatttttgtatggagtgtatagattgaagtttatttctttgcatacagatatccagtttaacactttaatgtgacagctcgaagatagttgtcctttcacttagataagttctactatacattctaaaggaataacttactttgaaactttttccagattaattttggattgaacacttttttattgaggatccagtagagagtccttgcatgtctgcagccacacaggctggttgcctctcaatgtccctcctggtccagtgggcctggtcgtcagctgaactagcgccatgtccccaagttaattgacctccacatcactgatgctctttaggaataatacaacatatcagaggtcatagacatttaagtgattttatttaagctaaaaacaggtctatctgttaggctcctttattttttagtagtcagtatacataattgttaaattaagaatttttaagtatttttagttcttaaaccattatatcactatggtctaaaaatttaagagtcaaatgattggatagtgtttctcttcctctttattaaaaacctcagaaaggaacaaattcctgatttttcagttcctaaatgactagcataaagaaaaaaaagtcttcaaagttttatttctcttgaatacaacacttttttcccctggtcctataaataacatgacttaattgtaggaaatttgggaagtaacagagaaatagtttttaaatgacccataattcttctacctcgagccattagctcttcaatatattttctttgggtctctatcttttacaaatagttgagctcataccacacttatagttttaattcctgggtttttttcacttgccattatagcaaaagcattattccattttgttaaatattgtcaaaagcataaatcttaatggaaacattatattcagtatatgaataaatatagcatcatttatttagccatttccccagtacttgacatgtatattgcttctagtttgctatacctattactgttggggacatttgtgcttgaattttatcccacatctcattatttccttaggataaattcctaaaaaagaatcattgattcaaaagccattcaaagatattgtaccactttataaccacaccacataccaataatacaggagaattctctttacaccctagctacaccaaagattatcattcccccttcccaaccccaccaaagcaaaaaaagtcttgtcacacctgtacccctagtgaaagctactacttttgaaatgagttgctgtacaccatctaggtttttaagtcacatttctattaatgtaattgattcatgacagttccagaaaattatggtacctgaataattcaaccagcatttgcctatgtgaagggatatttattcaacaaatactaatcgagaatccactatttgccagcctctcggggccaaagcagtgactgtagcagcatgaccctgcactcacagaatttagaggatgaagatgaaccagatggcaaataaacaccgtgggtttttttttttttaaccagagtgtgggatggggcaggctgggctggggtgggcctaggggtggtccggagaggagccacctgagctgggactgttgaaggtgactggcagcccctgcagtagtggacacaggcctgggttcctgaatgtcaagtctgggaggaaattacgccccagtgctgtagccccctcatatttcaagtgccccaaagtgcccctggccgcttgcctgtttctcttttcaaggccaggtcttactcagctccttgtatccaagttaaaactaggactctgtttcctccctgtttcagtcaaggctcctgagatcagcatggggaaagtgagctgtgctcttgtacctgttcattcttatgtcaagagcttgacttactaccattcgccctgaccttatcccattttcattcacagatcttcagcacaacgatccagtttctttttggttttgtctgttctgttctttatttggaaggcagggagaatggatgagggaagagattataaaagtaaaggcacgcttgtcaccgaactaggaaagtacagaaagatataaaaactagggggagaaatcattcctgatcatcctcctgttcagaagcaatcactttaatgatgttgaatttttaaatgtttttcagtactttgttttttctgtgcacttgaaagtacagagcattcacaaccttattttaaaaaacatcacactatcgtaggaattttccacgtcactgaagtgctctgatattttaagtgctttgtgtcttcccatcgttcagatgtactgttgtatatttaaatctttccctggtactggacattgacattctctccagtttcttctgctataaatgatgctgcagggagcatttttgcacctgtatctctgccccgtttctgattgttttccttaggatactttccctaaaggagacttacggcgacaaggggcctggactttggtgcacatgtcagactttcttagagccggcttcctctgtggaagtgtggcctaattccttacctttccttccagaactaaggcctgaacaatgcagttaggtccctgacctttcccagtcttcctgacccaagatttggggcaaggtctccctgtcaagacagtgtcagcctcctgggtgggtctagaactgtggagctcttgacgtcaagttccgggtcttatctgttccttccgccccagttgtctggccccctgagcagtgttgttctctacccccacttgtagcctcccgccctggaggaccagcttagcaccctcctggccccggtcgtcatctcctctgtgaccatgctggagaagctctcagacacatacacctgcttctcgacggaaaatggcaactacctgtatgtccttcacctggtgagtgtgcctccctggggcccacgtgcctctgccccttggttccttggacggtccacacgcctcttcctcaccttgaacctcagactcctttagaaggcagatgctgcatcttagcaaaatcccctgggatctgaccgtccccccctcccatctctgtccccgggggctttctaacatcagctgatctctgtgcctgcagtttggagaatgcctgttcatcgccatcaacggagaccacacagagggtgaaggggacctgcggcagaagctgtgcgtgctcaagtacctgttcgaggtgcacttcgggctggtgactgtggatggacagctcatccgaaaggagtgagtcctggggtactgggccgagcccctctcgaggcctcagtgaagctgctgctcccactctgcccctgctgcttcctggcacctgcctgggtctctctagctggtgtttgtcatgtatgtgtgcatgagaagctgagaagtgaggtgagttgctcaggcacccacctcccggttccacctccgtcccactccgctccatggcaagagcacagccagatgtacccccagtgtgtgtgggtcccccggttgtgctgtggctcccccatctgtgttgtgtgggtcccccaggtattctgtgtggctcctctaggtgtgctctgtggccccccccaggtgtgctgtgtggctcccccagctctgctgtgtggccccccaggtgtgctgtgtggctcccctaagtgtgctctgtgaccccccaggtgtgctgttcccccaggtgtgctctgtggccccccaggtgtgctgtggaggttcccccaggtgtgctctgtggccccccaggtgtgctgtggaagttcccccaggtgtgctctgtggctcccccaggtgtgctgtgtggccccccaggtgtgctctgtgaccccccaggtgtgctgtatggccccccaggtgtgctgtgtggcccccccaggtgtgctctgtgaccccccccaggtgtgctgtgtggccccccaggtgtgctctgtgaccccccccaggtgtgctgtatggccccccaggtgtgatgtgtggcccccaggtgtgctctgtggccccccaggtgtgctctgtgacccgccggtgtgctgtgtggctcccctaagtgtgctgtgtggccccccaggtgtgctctgtgaccccccaggtgtgctgttcccccaggtgtgctctgtggctcccccaggtgtgctgtggaagttcccccaggtgtgctgttgaagttcccccaggtgtgctgtggaggttcccccaggtgtgctctgtggccccccaggtgtgctgtggaagttccccaggtgtgctgtgtggcccccccaggtgtgctctgtgaccccccaggtgtgctgtgtggcccccaggtgtgctgtgtggccccccaggtgtgctctgtgaccccccaggtgtgctgtatggccccccaggtgtgctgtgtggccccccaggtgtgctctgtggcccccaggtgtgctgtgtggcccccaggtgtgctctgtggcccccccaggtgtgctctgtgaccccccaggtgtgctgtgtggccccacaggtgtgctctgtgaccccccccaggtgtgctgtgtggccccccaggtgtgctgtgtggcccccaggtgtgctctgtgaccccccaggtgtgctgtgtggcccccaggtgtgctctgtgaccccccaggtgtgctgtgtggccccccaggtgtgctgtgtggcccccccaggtgtgctgtatgactcccccagctgtgctgtgtggctcccccaggtgtgctgtgggggtcccccccaggtgtgctgtgtggccccccaggtgtgctgtggaaattcccccaggtgtgctgtgtggcccccccaggtgtgctctgtggccccccaggtgtgctctgtggccccccaggtgtgctgtggaagttcccccaggtgtgctgtggaggttcccccaggtgtgctctgtggctcccccaggtgtgctgtgtggcccccccaggtgtgctctgtgaccccccaggtgtgctgtgtgacccccagctgtgctctgtggtcccccaggtgtgctgtggaaattaccccaggtgtgctctgtggccccccaggtgtgctgtgtggccccccaggtgtgctgtggaaattcccccaggtgtgctctgtggccccccaggtgtgctgtgtgggcccccaggtgtgctctgtgaccccccaggtgtgctctgtgacccccccaggtgtgctgtgtggccccccaggtgtgctctgtggccccccaggtatgctctgtggccccccaggtgtgctgtatggccccccagctgtgctgtgtgactccgccagctgtgctgtgtgactcccccaggtgtgctgtgggggtcccccccaggtgtgctctgtggccccccaggtgtgctctgtggccccccaggtgtgctctgtgacccctcaggtgtgctgtgtggccccccaggtgtgctgtgtggctcccccaggtgtgcttttggggttcccccagctgtttgtcacaggagcttgcccagctctgacagtgagctcagactgctcctttggttgaagctggggacaccacttttctgtgggtcccccttctctgccccaggctgcggcccccggacttggagcagcgtgtgcaggtgtgggagcgcttccagagcctgctgtggacctacagccgcctgcgggaccaggagcagtgcttcgccgtagaggtgacgctgggtgcgggggtcctctggccacggaagtgtcaggccgtggggcccgggcagcgttgagacactgctttgacgtctgtcccccaccccagtgagtgagagcaccgacagcccccaagctcatgcatttcagagggttgctctttctggcttcatggtacgttaggcactctgatgggcctccctataataatacggctagactttgggtaaaacagacttcttagtgcagtttttggactctcagtaaattatggaaatttctggttagctccctcacctctgatccttcccccaaattatgctgagctgaaactagagtagaaaatagtaaacagtaagcagcactaaagtcaagattgcctgatgatggtatcactacagccagcgaactacgcctcgggccagcagcgacaggggagctgcgcctcaactcctacctaagcgcaggtctcaggagtaggctggctgtcagtagcacccgccttgctccctgttgtagacaaacagattctctgtagatcagtggttctcctctttgtatgcatcagaatcatctagaggacttgtaagataggctcctgggcttcacttttctcagtcactataggcatggagggtgggaggctctataatttgcattttgaacaagttcccaggtgacgctggttatgctggtttgggaactacaagttgaaagccattgatttagaggacagatgaagagcaaacaagtatgagctcaccattaatagtcaggtgcacaggagaatgagccgtgagtgagtgtcaggggaactagcccccagcagatgtagaccccgcaggggcttgatacaccggtatagacggagcctctcaagagcacagcctgtgttagtctgagcctccctgctcccaagcgtctggcacagggtttgctctcaccgtggccagagtgaatgtagacttcagttgggacaagaggaatcggggtgacatggcttccatccccctgcccgcatccccaggctatggagcggctgatccaccctcagctctgtgagctgtgcatcgaggcactggagcggcacgtcatccaggccgtcaactccagccctgggcgggctggcgaggaggccctgcacgccttcctgctcgtgcactccaagttgctggctttctactccaggtgaccccgggacccctcacattcaccctttcttgcgaccccttcctgaaaagcaccacctcctgggcctgggaaaccttccagagccatcgcttccaggaagcgctgattcttaggttcttagttcttcaccctcctcggttcactcccctctctgaattattccttcctggaatgctgtctcagagtctgagcttagggtttcctgatatgccattcctggtccctggtccctggtggttttccactggtcattggttttttcaacagaaccaagttttatttttaaaaatgaatgagttcattaattttgtatattccatgtctttctcagaagaggataaagtcagctggcacgtttataaactgtggagggcagggaccctgccccggacccccttacctgccttggtgggcacgtgctgaccggcttcctggcctctccacagccacagcgccagctccctgcgcccagccgacctcctggccctcatcctcctggtgcaggatctctaccccagtgagagcacggctgaggacagcgacccccaggtctctcttggggcagctctctgggcagcgggaggccaccagaaaggccactcggatggccattctggagagcgctgggcaggcagctggggagactggtctctgagtctcagtcctgaatgtgtggttgggcatgactttcctagctgccttcaggtgtaaggggaattctagaaggcaggtggattagtgggttaaaagtgcaggcttttggagtcacagagtcccagctctaccacttagctgttggctgtgcaagtgcccaccccgtgggagcctcagttccctcatctgtgcaatgggacaaccgtggcatctacttctcagggttgtcatgaggaataaaggtggcagtttactaggagcccagcaatgcctggggcatagtgaaatgctcagaaagtgctggccagcccagttgccacaccatcctcctcatcagtggcaatatggcagtgatttggatgccagtttgttggactttgtagaatttctgtggttctggagaaagactagaactgaaacatccctgggaagcaatggcgcacactcggggctgtgcagtagagtgggcgcaggggctggcaaccccccgagggctgtgccatgaagcgctgggaggaaaagaagccagtcagcagctttaaccagcttccacggccctgtcctgtcacagctttccccacggaggccccaccgcagccagagcatccccgtgcagcaggcctggagctcttgttctgcagacccaaccaggaattctgcggggaccgtatgtgctctgtaccgtggggagaagccaggaggggagagggggggaaggtctgcctctcctcggagagcagggtccagggctgaggccccgcgagaacctccctaagccctcagcccaggtgccccttctcccttccaggagacagacagcttctcccctactgacgagtacttcacaccagctccttcccccggggagcagagctcaggtgagacctagagtggaggagggaccctggacggtgagggggaggagctgggtgccaactggtagccctgggaatctgtctcaggggtcagtggatcccaacgccctgtaagagcccaggcacagacacccacgttcctagagcccaggacactgtctgctgcagcccctctgtctgtcttgccagctccagcttgaattcaaggactattgaggccacttcagtgatctataaaaattcttatgacaagttgatttcatttaaaagttcagctcacatatgtgtactctcactgccttctgtttctttttttgtagttaataagtaatcagctaattaagtttatttccagcacagtggtttaaaatatcaatattcaatctgtatagtttatactttacttccaaagtaaatggataaacaataaaaaaaaaaaagtttgaaatattattaacaaaacaaaaaaggagcctgggacctctgagaccacgtggcagctcatctctgcttgtccacttctctagggccaaggtcccagctctcctgggttctgcaagcttgccacgagcccaagcacatcagaaagcgctactttggggtgacggctgaagttccgttttcttctcactgcttccttcccttgttcctcctcccgacccctttctctctctcagtggttagttttttcatgcctcaaagctgtaaataattcctgttccacagtgcacagaactcacagcttacaaacgtcttgagttgctttcatccattaagacaggtgtttgaaacatagatacaggctttccccaagaaacgtgattataaatgatggttatttgcagtgaaatatacgagagaacatagtacaaagctataatatttcaaatatgtacttgattcagtagtttttgtgagctgtcctacgaaaggaaatctagttcggttcccagcacacagtaggtgcttcagtaaaagtttgctgattaactaaatgaacggggaactgtagatggtttgtgctacctcccagcgaagagtgaaaagacactgttatagccagagaggggctcgaaggggtagagaagacagaagtaaggaggggattggggggctgaggaggggcctgagggacctgccccccaccactgcgaggtacagggggaggagctcgtgcccagcagccagcttgggagggggcgctggcaggggtgcctctcttccccagccaggctgccctagctgtggtaccatggagggagcttgccctgcactcgccagcttggggtagaatgagaaggggaaggctctccagttcacaccaaggtgctctgcccagcgaggtgctgtgagctgccagtggggaagggcctcttttccattgtcccctactgacaggctgttgggccagcatttacatcttcccactgcttctgtcgttctcttattacctacggtttgtctgcaggtagcaccatctggctggatggggacactccacctactgactctccccacatccaggtgagtttttcctggggccctagggcgcttggccagggtaccagctgatctgagatgctgcagtgggctctggggactctgagggcttctcctggggtgacgctccagccatgcctgtcttcggtgctgtctcacggctgtccggccagtgcaggaaacgcctcagcccagaggtaggggccgggggtagggtgaggcgtggtgggtgagggtggccttctccctccctcgtcctcctcccccagacacacagcctccactcctgagaaatccccactctcactgttcttgggagtgaaagtctaacttaatttttagtgttttttttaataagagagtaaatatgttcactgtagaaaaattggggaaaacagaattaaaatacggaaaaggaataagaatcactcagtcccaaccccagatgttagctactgttaaacacttttggaatgtttccttctaggctttcttatgactttataaatgtatttatacacacacaaaaaatatatatattttttctttttttttaaccctatttgaatcctaatgctcttcattattttttgttttgagcattttcccattgtcgaggcactccttggcaatgtggtttttaacgagactgttcagagtgcatcgcctgcattctgttattatttatttagcaaattcttggaacaaccagtgtgttgcatccggtcctttgctgtcgtcgtaagactaccgtgacttccttacaaagaagcttttgtggcatccctaatgattcccttaattttccacttttgcccactgaagactcttactcagagccctcatgaggctggagtcttctcatttagtcctggaagccctcacttgcacccttagaatgactttcagaggtccggaaggctgtcaaatgattaattgttaataggctttaaaccctttgtgtacatgacattgaggaggagcctccccccggctcatgccaccccgtctgctttccccactttcctttcttccttttcccctttcttactacccaccacccttgtgtagcatccagtcctggcgctgtgcagaagggccccgaagatgctgagagagagacagccagccagatgggagctgccaggggagtctcagcagagggccagcatttaggacctgggacgttgggggctagaagagtttgtccctcaaggttccgagggacatagcaagtgggcagctgcggggggacccagcctggggaggactcccgacgactgccccttccctccccctgacagctcctcttcctcctcagatggctgaagacaccctccagatgctgatccctcactcccaaggaccctctggccccagaaggattttcctggatgccagcgtgaaagacagctactgccccctggtgccccacaccatgtactgcctgcccctgtggccgggaatcagcatggtgctcctgaccaaggtatcagcgccctcgcctgccctggggccatcctggcctggacacccgcccccggccacccctgtccaccccgccctgctcttctcccctcagtgccccagcacggccctggccctggccctgtaccagctgctggatgggttttctcaactggagaagaagctgaaggaggggcaagaggctgggagctccttgcggtcccaccccatcgtggcggacctccgccagaggatggacaagtttgtcaagaatcgaggcgggcaagaactccaggtgagacgcaggccccgacgccccatcttggggacgggagacagggcctgttctcatcacacctgaggggccaaggctcaagaggagggggccggcctctgccccaccccaccagaggactgtgctcctgatcccccgcaactcagcaatgcacttgatgtttcctaaacgttcttgtgtgcctttggcaggacacaggttccagctcccatgtttcagataaggaaaccagggcggggctcagatagatggtgatttggccaaagttgtgagccgtggaggcagaacccaactcaagggctcagtaatggccagtggtctgcccactgtgcccctcaccacatggctggtctcacaggctgcaggacacagggaggccgttccacccatggggggctgagagcccagatggggtcgtgaggcccagacacacagggccagcacgtgaacagaggaggagaccagttccctccaggcaggggcctaggagggggcgcggcagacgagagccctgggccgagatctgaggccgttcatgtagctggcagggcttgggtctgtttgaggaactgagatccatggtggctgaagtttgcactggtttgaaaataagcaggggactagacgaggcagggcaggtgactgaagcccagtcggtccacagcgccccttgtctcttggtgcccggcatgccccagtgaggtatcaggaggcagagatccctgaaggggatcagcacccctgcccttgcctgcatccaccccgccctcgaggcactgacctgccgctcggacagcactggtttacctgtctgccagcgaggccgagagcctggggctcaaacccagaagctgctttttaagtaaaagcctactgagtgactagaccgtgatgtacagtgggctgaagggtgctgggagccctgccagagacccagcctggctgtggacagcatctgtgtgctgggcctaaataagccgagaagttgggggagccttctagagcccgacgtcagaactgccctggacctcactgtgggaacattgtcaggaagccgcctgtcacttgtctgcttacagagaacctggcaggagttcaagaccaaggccttctccaaaagtgagcccggctcatccttggagtgagtggtgggccctgaggtcaaggagggtattgtttggacgagggggcaggtttcctccaggcccaggagaagatgctcggggaggcgcttctgagcacggggagggtcctgggagggcgggtccaacccctacgatgctgaggggaggctgggggcagagaaaacaggttgaggagcagggcctgaggaccgacaccactagcagagacccagcttccgcacggacccagcatgaccttgggcaagtcactgtgccttgtattcccataaaataaaccaggaggttggaggagagttgagcttctcagagccccatgttgggggaacatggaagctgactcccagctcagtgagggccagggtgtagttcatcagccgcgtccatcagtccaggaggagggttaccacagggatggggtgctgtcctgggtgtgccctccagggtccttccctctgtgacagttcatccctggcccccaggctgctccaggcgtgcaggaaggtgaagcggcagctatgcgccgtctatcggttcagcttcctgactgtggccccaggccgggggggcccccacctaccccagcacctgcaggaccaagtccagacactcatgcagtaagtggcaatgcaaccccttggtggccggggcgggagctgggcacgcctcaccctcctgctcccttgctccctcgacagagaaaagctggcggactggaaggacttcctgctggtgaagagcaggaggaatgtcaccatggtgtcatatcctgatgcccggccctgggctggctgtgaaggcccctcgggctgctgccccactctgcccactcctctgcccactgtctggaaggacagcagctttagggaaagagcaggtagttcgcacctcagcttccttttgctgaagaaagtgaagagactttagcgtcctgttagtgtcctatctgtaggaatgctccgaggctggaatttcagaaatccctggtgtcccaagattacttcatagaggtcatctgtgtaggtgttgtccagccagcaaagtggcagtgggtctcccaggaggggcaggggcctggggtcaggtaggtttgaggggccgtgccccccctccttagatgttacagtacagtggagtgtgaaggctctgagaaggcctgcggtaagtatgtttattggtccctgtttaaaaaaccatctctaagacttacccttttattagagaactagtttcattactgatcttccctgaaactttatatgaagcagttttttcagaattaaaattttctgagacttcagtcctcagcgcgcaggtggaagggatgccaggcggccttgccggccaccagctgctgcccgtcctctcagatggagccttccagcccaagacgaggcgcagagatgaagaggattgtggcgaggcatgtgggtggcagccagcgaggctcactcctcagctccgtagctctgctcccaccctggcctccccacgtgtgccatttaaactcatcctgcatgaagatggtaaaacataaacgtgctgtgttccttgagcgcaggacgcccggcgtgaaatacgccagagccagagatccatcgtccttgcatcttagaccttctcaggattgggagttcaaagggaaagtgagacctgggaaagagggtgtcctgggagggtagggtggctgaaaaggaaacctatgaggcgggtggggcaggggtgaaggcgcctaaaggaagcctcggtgaatggaggagctccttccctggttctggcttcaaaaccaccttaactcagcccctcaccttcctggaagacttcccaggcctggtgcatttcatctatgtggaccgcaccactggtcagatggtggccccttccctcagcagcagtgaaaggacttcatcggagctgggccgggggcccctggccaccttcgtcaaaaccaaggtaacctggcccagcccaggcacgctccctgcgtgtcagacaaggcgtgcctggacccctgcctagaagggctagtccccgcgcttgggcccctgggaaactgagcacccccgtgggaactcttactgctttcttcctacctcctcaccccgctttgtaggctcctaagagaacggtcctgtctttgtcaccctagggccccagccagcgtgtggggccacctccccagatgtgttaaagttcctggagcaacactgggtagtgaggccagggagggaatggccggggcccagtaagggtttgttgagttcactaagacagaaaggggacacacaggttgatggatctgagtatcagaatgtaaaagtaggaggtttctacagaggaaacagtctccagggctccttttattttctttgattcatcttcatggcaaactagtatttttggtggggaggcctcttccactttataaaaagctatattttatacatatattatacatgtatgtgtatatgtatatgtaaggaaatggcaacccactctagtactcttgcctagaaaataccatggatggaggatcctggtgtccatggggtcacaaagagtcggacacgactgagtgacttcccttcattatacatattatgttactatacattatacatgttacatatattttacattattatatatgtatattttatatatccaagtaaagtgtatcataacgatgaaaacaaggtcactgatagctccctggagacccggctctgccctcgctagtcgtgtggcctggggcggtagggagtcttaagtttcagcttcctcttctgttaaagagagcaatagcaccagtaacgtcgtggagttaccgcgtagatcacagatgcacacacacggtgatgcacggcacatggcaccgactgtagccggggctggttgagcatttcctgggaccgtccacaccagcgtctgcgtctccttccggcgtagttgggctggtcttggtgcatttctctccatcgttttcctgtgcagtttgttgcagttgaggtcatcctgcatatgcatgtgttccccgcgtcactttgtatctggtgcatttcctcatgtcattaattctttatcaacatgattcccatcggctccacagcagtccatcatgggaacacagcgtcatgtacttagccatttccccagtgttgaatgctgagattgttcgcagactctatcataaataatgctgctgcacacccctctaggcatctatccttgtcctcatctcagattattttctcaatatggattcccagaaatggaattatgaagtcaagtgggaggaattgtttttaaggttactgatacacgttgtcaaattgctttcctgaaaaatagagcaagtccatgttatttgtttgcatttaattagatgctattgtgatcaggttgggagtagctcatgtacacctgtcactaagcatcttggtcggagtgcagaaggcctttgccagccctgggaggtggggggtgggggcagaggtgccccctgctgccagctcctctccggcagctcacaggcagcggcggaagtccttgaatcagggaggagagcctcgcagagaggacctggggcacgctgaccctcggtcactgtgttcccatcagtgcccttggtgagcccttgttcagacttcaactcagagcagaggatgtgccagggccagggcactgtgcattcagacacttttctagcaccttcctggcatagagccatgccagagatcctcaggcctcaggggtccgtgtgagccctcaacatcaggagagttccaggtggccaccctctcatctctgcttgcgtccctggctcggttctggcctgaaagatgaatttgctactttatagcttgcatatatagtgaagattcataaagtgttgatacgtatattttgtcctgcagtaatgagagggataggtagtccatccatccatccatcatctgtttattactaagctcctgccctgagccaaagctgggcccaggcgccaagaaggaaggatgagcaggaggcccctggccttccaggagctcctcgtcggagtgcttttcttcactgggatttgagagcccgagcccagcccccgcccgtggggtcagggctgccctcaggccgcagagacgagcactgtcccctccccccaggtctggtctctcatccggctggcgcgcagatacctgcagaagggctacaccacactgctcttccgcgagggggacttctgtggctcctacttcctgtggttcgagaacgacatggtgggtgtggctggcccgggcagggcagtcctgaaattctccctttctcctggattctgttcagtctgtctctccagctcttcttgtcgccagtgggactgacagcaaagcccagctggctgggacccagagctcaggtccgcctttgcgctcaggctctgtgacccctgcccccagttctctgaaaaactcatgctgttcaagaagcatccaggtgacacatgaacagaccgccatgccccgcgcaagcaaggatgctcagcccgcactttctgtgataccaggcctcgcttcctgctcccattgctgagacagataaacggaggctgagagcagttaaccagcctgcccagggcaaagctgcccacacctcgcatgccctgtctctgctcctggcagcacgccctccttcccctcagcctgaggttgcggcatccctttccatggtgcagtgtggctgttggggtctcgccgttctcagccccacacacctgcacagcccatgtgttggttgggacaagtgtctccgatcccattttgcaggtggtggaactgatgccctgagatcaaacaccacagccagggcaccaaggtcctaagtgatgaggtcagaacccaggcttggcttccagaacccaggcaggctcccatctttggcctgtgccctcctcagaggtgcccagggtgtggggctgagcatcacctcagcctctagggagagacaggctctgtgtgtatgtggttgactccatggggtaatgggcgggcctcaccatcccggtgggcacaggactgcaggaaccccatgacgacacctggcgcatggtgggagcccaacagagcctgagttgcttccccggcgtgtccttccctgggattcccagtcctttcagagcgagacttggcctttggtcacactttgctcttactgacacttccccagtcaccatccttcacgctgagccaggtccactggttggtggagagctaccaccatgatgcccagcatgaccccaggaactttatgttcatcacgtctaatgttcttgggagtttattctcatccccagttcccagatgagaagacagggtagaaagaggtccatgcattttcccagcaccaagcacttgctaaacagggctgagcctggcctcggacctgctgtgtctgactcaggcccatggtcttcccaccgtgcccaccgcctccccactcaagaagttcctcctcctcccccagggccacaaactccagatcatggaggtgcctgtgctgtctgatgactcagctcccattggcatgctgggaggagactactacaggtgacgccaacccggagggctgctgggaacagagggggacagatgacagatgataagtgcccatctcagcagagggagcagcccttccttcgagagtgtttccttgccccctcccgccccaagcccagccccccttgttagaagctcctcacggccaggcactcagaagagagtggggtgctcttggggttcctccccttctgttgcacactgaaatggcatttgcagctgtctctgctgggctcctgggaccttccctagctggcactggccccatagctggggccctgccatccagggttaggattccagagggtgggccctggcagcctggggctgagcctcaaaactggggagtcagcaaggaagtcctttccagcctggtgctagagtccagtgaggtgacctcatgcccatgtctccctcctgaatcctgtcctccttccccctctccaggaagctcctgcggtattacagcaagggccacccggcagaggctgtcagctgccacgagctgctggccctccacctgtcggttgtgcccacggacgtgctggtgcagcaggctggcgagctggcccggcgcctgggcgaggcctcccgcctccccctgctctaggaccaggagggctgccccgtggattggcctctgcccccagttctccaggcctacctggctcacagacatcgccacagcaagagcctccttttgtccacagcggccctggggatggcactgcctccaggggagccccaggatttcttaaactcacttagagccacctccattgcgggtaacaagcaaacccacaaacccttctttctggagaaagaaggccagtttccttagctagagcagctgtggatgtgagcttagacccagggccaccccactttgggaaccgcctctccgtttaccccaggagaccgacaggaagtgcccagctcttcttggagtggggagagcgcctcaggaagccgtctcctcccgcgtgaaaggtgctcccctagctgggttgagctctggctctgccgtgtcctctctgtggctctggacggtggctcttccccacctctgagcctatctccccacagtcagtgtgactgcgcccccgtcag

SEQ ID NO: 170 - DNA, 41821 bp, Hippotragus leucophaeus
  source 1..41821: mol_type = genomic DNA
tgtccagtgcttttgagcaactcttccgtttagcccgaagttgagctgtgtgcactccacttcagtttttgcagccctgttctccagaaggtcacaggctgcagcaagtataaaagggtacaacagatgatcaagtatttaaacggcctcaagggcctaaatatctcgcctggcccaaagcagtatcataaaaatatgaagcgaaagacatactggttcccgtgcccgctaactcttgggcgcggaggcgcggtccgaggttcagcgagctgcggtcgcgggcgggcccgtcctcacctccggctccaccctcacggtgtagctgcctctttaagaatcggcgccgcaggctgggccgcctggttctcacgtgactcggctccctgcaatcgcttgcggaagtggtccagcctccacggaccgcgcggggtctcccggcgcccggcggggctgactggccggagcgcgcaccgccgggaggcccgcagccggtcgccagaatggtgcagttatacaacctgcatccgtttggctcgcagcaggtggtgccctgcaagctagagcccgagcgcttctgtggagggggacgcgatacgctattcgtggcggctggctgcaaggtggaggcgttcactgtggtcggccaggagctgtgccagccgagatgcgtcttctccaccctgggcagggtgctgcgcctggcctacagtgaggccggtaagtagtggcggaggaaggggcgcctcggcccctcactggggcctccttcttagaggaccgagtgacgccagcagctctgggtagggaaggacttcctgcttgtaggatggtctcgcccagtccggcggctaaaggaaggtgagagctgtgcagttgtcctggcaaccacaggtgagagcgggcctctggtgggccgggggaatgcttggtggtttttgctcttctggtgtcctccctggaaaggcccgtggttgggtgactggattccactcaactcagacacttgaaaccaaaacaaactaagattcgtttattatagaaagcaagtacaaacaaaagtacggagaatggtatcctgaacccccggttaatcccatcttcaacaattatgccaactcatggccagtcctttatctatttcctgtcgatttttgaaagctcacatgacctgctgatttttaaatctgtgtaaatagagctcgggtcttaggcccctttccccccagaaaagtagcatccacgactccttttccactagaaatgtgaagcagtaccaagggaatactgagtaggcatatccctgttttagaaatatccaacatttaaaaatgggtactttgggactttcctggtggtccagtggttaagactcttcacttccactgaaggaggcgtggattgatccctggtggggaactaagatcctgcatgccaagtgcaacaccccctccccacccccaggaaaagatgcaaataggtagaaataggtactttagtttccagaagaattcaccatagcattcttttaactgtctaataatacacttaaaatttgaattctgcttttcaataggggtgtacattgcagtatttaagatggaaaagcctgtgacggaggtatttactaataaagtgaagagcatgaacctggagaactgtagagctccgtctaaactctctgtccacaactgtgtgtgagtttagtctccctttgtgttttaaaaaaagaaagtggaaaattagatcagtgatttccagaccttggaattttgtgggtcagcaaaaaaactgcggggctaccataagtggtatctgactattcattttgtcgagtaaagctacatgttaaaaaaaaaagtgaaaagcccttttatttactgtcgttatttacataaaaacacctagctccaaacttgggatgcctttgctttatgagtaacttattatattgttactcctttttctttttgagtagtttagacatcaataggtctgcagaccagtttgaaaaacacttattaaatctgtaaattctctgtcagcagaaggctttgattttggtatttttaatggtattgctctcctaatcatttcacaatattagtagttttccccacctcctttttagacctgtggattctttaccttcaagagctctattgagtggcaagctcgccagtttcaacattagtgtgtgtgtgtgtgtgtgtgtgtgtgtgtgtgtgtgtgtgtgtgtgtgtgtgtgtgtgtgtgtgtgtgtgtgtgtgtgtgtgtgtgtgtgtgtgtgtgtgtgtgtgtgtgtgtgtgtgtgtgtgtgtgtgtgctggtggggggcagataaccactgtttacatgattggccccattcttccaaatggacatttaatgtagaattgtaagtgaccagcactgtgggaacctctagctttcttgcctgtcagtagtggtgattctggggaatcctttggtgtttaagaatcacctagggtagcttaaaaagattcctggacctcagagaaacggtaatagtttcctggggtgtggtccagcattgggtgagtcttctgttgagtcaggcttgagaatcactgacctagagccgtattgactgccataggcagtgagtagcatggtggtactgatgccttgaagttaacaaagatgtttttgtgattccgttgactgtcttaaaaaaagttctggagtcatgtggtatggtgttagcataagtcagatagctcaagggtaactttcagcttgaacttaatgcgtgggtgcagcttcttccaaattgtaggtagcggactgctagatatgctgatatccagataactactcttaacacatctcagctttttcctttagcttgaacttaatgcttgggtgcagcttcttccaaaacgtaggtaaagactgctagatatgctgatatccagataactcctcttacacatctcagctttatcctttagcttgaacttaatgcttgggtgcagcttcttccaaactgtaggtagaggactgctagatatgctgatatccagataactcctcttacacatctcagctttttccttttgttctcttccctcccactaacactggcttggacttggggattcctgctctaagcccagtgtctcccctactctcaccccatcaaaaagaaagtgaatcttagatcagcagtttctattcactacaaatgctttgcagattcttgcacgagaaggaaacattttcaatttctttttgtctctgattagcaggatgccaggctccgttcataaagattggaggtggtagaatgtaggctgaaattttgaaggatgggcccctaatatcatcatcagtaattgaaattattttaggttttgtgtgtgaagagagaaagaagagatttgggaactcattgctctcaaggaagaaagatctctgtggccagagttgagtgctgtgtagggacttctggtgctggacacttgtttatgggatgtctggaggtgtgaggcagagaggacaagaccacatagcacaagtgcatgaaggagccccaagaatgtctgttatctccccctaggccctactgtggatggagatggttagatagcatcactgattccatggacatgagtttgagcaaactccggaagatactgaaggacagggaagcttggcatgctacagtccatgggatcgaaaagggttggaccagacaggacttagtgactgaacaacaaagccctaccctccctcaactttttaagtcataaaacatattttaattaattgtatattatttctgccttctgataattgttttgtcataggagtgcagccttttaatttatggattagtgttaaccagggttatgatcttgctgcataaaaggaaaaatttactttttttttaaaatcactgactctcagcttgagaataattagaataatgatttttaaatttacttaataaagacagaagctgtcataaaataagtaaaataaagccctgagcacataatgctttgaaaagtttaattcctttctcttatgaagggctagaatcctccagacttatatctcctttctaacattttgagagatgcatggaatgaccattgactttggaactaaccagatccagatttaagcccaagtgccatcatttgttggctgtgttgcctaagcaagatacttagcttatttgagggcttcccctgtggctcagctggtaaagaatctgcctgcaatgtggggcacctgggtttgatccctaggttgggaagatcccctggaggaagggaaggctacccattccagtattctggcctggagaattccatggactatatagtccatggggttgcaaagagtcagacacactgagcaactttacttcacttagcttatttgagtctcaggttcctgatctataaaatggagaaggggatcttgccttgaagggttgtgaggattaactgagagaactctaaaggtctgttgataaggcttatcaggaagacacacttagcaagttctagttcattgtttataaaacaagtttttaatttgaaaacataagacagcataggcactatctatagtttgcaaattacatataaacagttgatatatagactttaccagtaataggcatatatttgtagatgtatgaaaaaacgcttatatttttctaaaataaaatgtataaaaccttttattataactaaacaaattattcttagtttttaagttcgttaagtaactagtaacttgaatatgacaccaaagcactgacaacaaagaaaaaatggaaaaattggctgtcatcaaaattaaaaaattttgtgcatcaaaggacactatgaactgatttgaaaaagcagtctacagaaaagggagaaaatatttgcaaagcatatacgcaatatggaattagtattcagaagaactcttataactcagcaaacaacaaaacaacccaatttgaaaattggcaaagagtttaaatagatatttatctaagttgcgaacaagcacaggacaagatgctcaacatcactaatcatcatagaaacgcaaatcaaaaccacaaagagataccatttcatacccattaggatggtcattataaaaacaaatagaaataacaagtgttgatgaggatgtggagaaattggaaactttgtaccttcctggtgagagagtaaaatgatagagctgctatagaaaacagtatgtttccagaaaaaattcatagaatttccgcatgtgaaagtcgttcagttgtgtcggactcttggcaaccccatggactatagcctgccaggctcctcagtccatggaattctcaaggccagaatactggagtgggtagccattcccttctccaggagtttcacttctgggtatacacacagattaactgaaagcaggggcttgtgcacacatttgtacaccagtatacatagcatttttcagagccaagaggtggaagcagcccaagtattcatcgacagataaacaaaatgcagtgtatccacacagccttaaaaagggatgaaattctggtgtgtgtacaacacaaatgaactttgaagacattacactaagtgaaataaacctgacacaaaaggacaaatattgcatgattctacttatgaggtgccttagaatagtcaaattcacagagacagaagtggaatagtggttgcccgagtctgtgtttatgaggcactacttctgatattctgatgttcagtcctggttttcacttttactctacacacatttagttttactttcaattttatgtaccttagttctgagttagatctgcagatgtatacagatagttcatatttatgtatttgcacataatccatgctcttcagcattgatgctttattgtattatgtaaatagtaaaagacatacatgtacatagggtgggaatgtagaattattgttggcagattcagagtttgggagaagatgaaaaagttttcaagatggtggtaatggctgcataacaatgtgaatgtatctaatgccatgaattgtacacttaaaaatagtgaaagtggtaaattttatgttatatgtatttttatttttacgttatgtgtattttaccacaataaaaattttttttgtttaatgtatttactgagagagtttaaggaagatggaggccacgtggtatcttctgctctcaactccatcagaccttctctggaacagagtgagccaatgtatggaacccacagggtatagttaggtattccacctagatttcttgacgaagaaaatggcaacccactccagtattcttgcctggagaaatcccatggacagagagcacagtggactaccgtccacaggatctcaaaagggtcggacacgatttagtgactaaacaacaaccaggatctctggggagaaaacagattcaggattcatgtctgtggtatcaaaggaaccagcatcaggagaaggtttgcctgtcttgaagcctggctcagtccagaggagagggggcctggtcagcccactgagtatcttcagaaaagggctgcccccacttgcttgctgcatctgtctgtgggaagcagttgtgctaaccacagcatttcaatgtcagttcattggaggaaggcttgtttacataataatgtctagcttttagtgagttctctatttgaaagaaccttgacttctcccctccaacccagaaagttctaaagattaaaaatttaatttaccacccacccacccccatccccccgccaagggctgccgtctgtggggtggcacagagttggacacgactgaagtgacttagcagcagcaaatagaatatgtaagagtgtgtttatgtaatttgacagatgcaagagactgtttaaacaagtcaggaaacacagaagccaagacggaaaagataacatatctggttccatatggtaaaagatgtcagacaaagtcaaaccatagcaaagtcaaaagtcaaactacagactaccaaaagtgatttgcttttcatggccagcaaaggattaatatcctttttacccagagaactgctattccttgataagaaaaacaaaaaaacaaaccaatacaataattttaaaaagtggataacttgtagaagagaaactgtacatggctgcataaacatataacagctttataagtggtctggaaaatataaatgatatttatatccatcatgttgagtcagtgctggtgaggatgtgggggaacagggctgtttaagcagcactggtggaaatttgaatctgtaatatgtaattgtgtttgtaatctgggaatatctattaaattttaaaatgtactgaccctttgactgattgtcttacttttgaaaatctacaccattgaaattaaccctccagtattcttgggcttcccttgtggctcagctggtaaaaaatcctcctgcaatgcgggagacctgggtttgatccctgggttggggagatcccctggagaagggaaaggctatccactccagtattctggcctagagaattccatggaatttacagtgtagtccatggggtcacaaagagtcggacactactgagcagctttcacttttactttcaagtaaatatgtaggtataggcctatttattacagcataaactatagtggcaaaaacaaaaaagctggaaatttggggttggccaaaaggatcgttcgggtttttctataagacagtgtagaaaaacctgaacaaaatttttggtcaacccagtacttaaatatcagtagggggatcaaacccagggatcaaacccaggtctgctgaataaattatgatacaagtatatacaggatattttgtagatactgaaaagaatgttagatatccatgtatctaccctggagggaaacatatggaaatcttggtaataaattggtaattttaaaaaatcattttattattttttattttatttatttatttttaatttctacaatgtgttgctttctgctatataacaatgcgaatcagctataattatacatatatcccctccctcttgaggtcaatttttttaagttgcaggttgttaaatatatttaatgtgattccatttagttaaaagcaggaatgacaaactaccactctgtgatctatgtttctatgaaagaaaggtttagaaggacacataccaagctgtgtgtattaacactggctcctcatgggttggactgcaggggagagatcattctgcttttcattttgtatctcttcatcactttgacttctcacaaaacaacaactccaaaattactttgtaatttagaaaatccaagaaagtcaacaattaagggaaaactggcttggattgaaatttttggtatatgtggctttatgctatttctcagagttgacatgaaaatatgacttgtggggatgggcgaggtagcagtatatattccactgatctcttcagagttccttatacctaattttagcatcactctgatatcaaactctttatgtcaggagaggtttgttcaagctgtaaattcagagctacagtcacttgtagagctatcatcgaaattagtcatagaatttcttggtaagctacatgaatatttaataggttgtcttaagatagtaactgttttccaggtggctcagtggttaagaatacccctgcaatgcaggagacatagattcgatagctgggtagggaagatcccctggagaagaaaatggcaacccactctagtgttcttgcctgggaaatgccatggacagaggagcctagtgggatacagcctgtggggttgcaaaggagttgggcacgacttagcaactaaataagaagacattaagacggggtgagattgtatttcagaacctaaataaatgcctattgtcagttaaaaatacacccaagatcctgttacttagagttctgttctcttgttcagtcaccaagttgtgtctgactctgcaactccatggactgcagaacgccaggcttccctgtccttcaccatctcctggagtttgcttaaactcatgtccattgaatcgatgatgccatccaaccatctcatcctcaatcacccccttctcctcctgccctcagtctttcccagcatcagggtcttttccagtgagtcagctcttcacatcaagtggccaaagtgttgagcttttggttctagtcaatctttaattcaaccattcacattaggattctgttttagatccttttcatgatgcaaggtaagttgtggtttctaattagaaattctaagtgtaatcttattccttctcaggagattatttggtagcaattgaagagaagaacaaagctacattcctgcgtgcttatgtgaactggagaagtaaaaggactgaaaactcccgagtgtgtatccggatggtcgggcatgacatggaggcacccttcagcgaaaccttcagagagcagatgtctattgtggaaatgccgctttctgaggcccccctgtgcatttcctgctgccctgtgaaaggagaccttcttgttggctgcaccaataatttagtcttatttagtttgaagtatcagatcattaatgaagaattctcgattttggactttgaacgttctttagttatccacatagataacatcacccctgctgaaatttctttttgtgttgggtatgtcgctgtcatgtcagagttagaagtcttaatcgtaaaactggagccagaccccaaaaacagagagagtgttaaccaccatcgacgtaagaccaccaatcccatgaaacaggcagaaggtaaataatgaatttagcttactttcttgtttggggtatggagaaaaacccttatttctggcaatctcagaaaggctctactatgtatattgccaagccaccttatttatggtgtggttgcttccctgatggctcagatggttaagaatccacctgcagtgtgggtgacctgggtttgatccgtggtttgggaagatccctggagaaggaaatggcaacccgatccagtattctggcctggagaattccatggacagaggagcatagcaggctacagtccatggggttgcaaagagttggacacgactgagcgactttcacacaaatagatgttcctaatacatgggacttgggtttatgatctggccgtatcttctcctgtatcatgtgatgtattctgtagcatataaatgtattccaacatatatttgtcattaaaaataatgaaacatctactgctagaggagcagtttctagttccagtcctcatatttactattcgaatgaccttgggctaggaataccatctctgtgggtgtgatgatcatgtcctgttttactttgtcagttgtgaggaaggaatgagcaagtgttaagacatttcaaaaccatagcgccttataaatacaagggatgtgtgtgtgtataaatactgtaattggtggggggatgtggtgaaatctaattggcattcgaaaattacttggagttactacataattttcttaaattttattttttaaggcatcagtaatgaaacttcacagcttgagtcagatgattttgttatctgccaaaagcccatggaacttcttggtgaaaaaagcaaacagtcaggaatatctgttacactggagtcaacgggattagctgatgaaaaaataaagtatttccacgttcagcacctgctctataggtactagatagcttttcattcactagcagttaatgtatatttactggcttaatgcaatggaaattagatctcctctcctatttctctctttgaattcacagacgtttcgctcctgatatttcttcctgtctcttgtctgatgacgtcaggttgcattcacttcagcttctacccatttaccagacaggtaagtatgagagtgctgcagtgcagtgagctggaaaggcactgggtggagtggggagtccaatgtgagtaataggttaggtttttctgagttgccctgtggccttagacggattccttagcaaataacagtgagtccacaaaatggaaatcatgtctgccaggagaagccatggagaggaaatgactgacaaaacccatttctctttttgaaatggtcagtaggcccccaaaagaaaatcagggccctgttatagctgaggttcatctgggttccagctgggtcatttggcagagctgctaatgatggctttgtgagccagatgggaaaatgtgggctgggtggaaattcacttacaagcaatggttttcagcctcgctgcatattggccttacttggatgctttttaaaatactgatggccagtctcaacatactggagagtctttttttttataccatgctttgcagcatatgggaatcttagttccccaatcagagatcaaacccatgcccccttccctgggagcatagagtcttaaccactggatggccagggaactccccatgctggagattctgacttaattggtcaactgatgcctgagcatcagtatattttttttaacctttaaaaagatagtttaatttaaaattaaattttaaatcccattgcatggcatgtgggatcttagttccctgactagggatcgaacctgtgccccctgcagtggaagcacagagtcttaaccattggaccaccaggaaagtcccagggtatcagtgttttttaaaacctccccagaaatataatgggcaacccaggttaagaatcattgaattctgtacttagtgctggcctgcttcccatgtttaagtgatggctagggaaaggtataaatattactctgattaaacttacacatttttttttcaatacatggtagtgaccatgtatttagtacctactatgttgggtcttgtgctgaatactagggctcctgtaatgagcaaaactaggcaaagtacttgtactcaatggagcttattgtcttgtggggggaagcagccctgaatggaatgaacattagaaggagtatacagttacacactgatgggaatgctctgtgagaagaatcctgccttgagcatgtataacaaaggctcctgacctcactgggggtcagggaaggcttcctgagaaagaggatctgtggaatgaatggggctgattggtgggcaggtttggttgtggccaatggagagtctttgcttgaggaactgaaaagccggggagaaggatgtgtaacacaaggcaggaaaccagagggccctcagccaccttagagggttagctcttagccaggggtttcccgaagcatctggaagaaaaccccaaatcctctccatggcctgcattaccctgaccctaagctctttttgtcctgctcaccctcttacatttctccatccgtgtggcttttgtctgctgctaggttacaccaagctcactcatgtctaagatctattgtttactcttccagtgctcggaacatagtactttgctcagagcttgcaagactagtgtcttcagctcacagctcaagtatcacctcgctgcagaggacttcccagacttctcagtttaaactgttccctccctgcacgctgcagagtttattctccaccccagtccccctcactagaatgaatgcagttactctgtcttgtgcgctgcagtatccctggaacccagaacaatggcatgttgtaggtgcctcatggctgtttacttagtggacagatgaggggttgggcagtgcccatgtgagctgggccctgatagatgagtaaaagttttagaagattaaaaaaaaatttttttttttttagaagatggagattctggtaagatactacctcagggaaaccaacatgtgcaaggtgaaagatcatgtatgtttggagataagcgagcagctctctatgattagagcacagatgtgtgtatgaaagaagaggaagtagaaactggatcagttgttttaggccagttgtggagagtgtagtaattggattttcttctttttttattttctttaggttctcgttagttatctcttttatatgttctttactttaggttctcgttagttatctcttttatatgttcttctgttattaatgtgtccttgaagggcatcaattggagctatattttttaaaaaaaactttgattatgaaaagttttaggcacacagatatagaaaaacagtacagtgacccccaaggtccccatcacacagcttccgcagtgttgccttataatcacccgctgccctgtgccagattgttttgatgcaaaccccagagtttatatcttttcatttataagtatttcagcacatgtttctaaaggaaagggattcttttatttaaacaaaaactccaaatgtcatttcacatttttaagaaatgacttgataccatccaatacccatcagttactcaaatttccctgattgtctaaatgtttttttctgcaatttatcagattccaagtaaggttctatacctgcaattggctcctatgtcttttatgtctctctgctatataggatctgccttcctctctcgtttctctttgagggttagttagcaggaaactggactattagaacagaatttcccacagtctgaattttgctgactgactccccacagtgtcatttaacatattcctgtatctcttatacttccctgtgatctaaagctgtactgttcagtatggtatccatttgtcagtattgctgttgagcaccttgaagtgtgactagtctaaagtaagatatgctttaagcgtaaaattcacactaggtcttaaagacttagtacaacaaaaaagaatataatctgtctcgttaatcttttattgattatgtatcaaaatgataatattttggatatgttgggttaatatattttaaaaatcttgcctgtttttattttttaaagagcaattactagaaaactttgcatcacataaatggctcacattttatttctattgacagtgctggtctaagtcttgatcaaatgatggtgatgatcagtttttttttttggtcatgcaaatagtcttgagttctcttggaagtacgttgtatcaggttggctcttttttgtgatattaacaactattgatgatgattacctagatctgttaatttattagggttttcaaaatgttgatattctatcactcttttttcatttttttattggcgttcttatataaccacctaagcaactctttggttatctgtttatagatgtttttgcacagaaaagtcaaaatattggttcctcttatttactggttttgtttcctcttattcatggtttgtttgatgtttgtttttttcttttgcatgcagggtctcttacttctgatagaaaaaattcatctcaggaaaaagtgttgctgagtctgttttgttttttctcattacctcacgtgggctacctgtacatgattgtcaaatctgttgaattaatgtcggtttaccaatatcccgagaaatctcagcaggcggtgcttaccccacagtttctgcatgtcatcacaaggtatgtcccagtcccttgctggcttttgagtcacttatttctctgtaaattcctgaggtgctttctgaatctttaaatgaaaattatgtgaaccagtggagagcactataaattaatgatatacacctggggtttgaaagtgaaagtgaagtcactcagtcgggtccgactctttgtgaccccatggactgtagcctaccaggcttctccatccatgggattttccagaaaagagtactggagtgggttgccatttccttctccagaggatcttcccgacccagggattgaacctgggtttattttatttatttattttttaaataatggctcataactgccttttcaacatcagagatttaaattctggttttgcctttgttttgttttcttaaactggatggggatctttctaagaatgggtaaggttcttcatgagggaagatgttcatagggaattctaatgaaaagtcagtgggggctcttgacaacagtcagggcatctcttcagttttagatttcctaaacttttttttcactgctgtcatatcttttctatgtgagttgagttcattgatatggtttaggactgtaaagggtccagaaagcctacctgattctaccctctgagtagtgtagatggggagagagtccagaggttggggttggtcaggctcatgtggctaatcggtggtgagtatcttctgagttgccttatcctcctagtaagctggcatgtaaactgggttcctgaatttaatctcatttccgtttatctcagcagctagtaatgcttgtggttttatttcctgtttttttgagttcaggttctaggcaaggcactgcattgaaccctctggccaaccaaccatgaataaggcacagcctctgctttatgcaaacagcaacgtaagagaggatgaaagacacgtacaagggacacaaacactgggagatttgtgaaaaatgtcctaagactacatggaagtgtcgtaggctctgggaagagggaaattacttccagccaagtcacacgggcaaggtttctgtgttgaaagtgaggcctgaaggctagttagatttgacagatagagactgatgaagggcgttccagatagaggggaagctacaagcaaagctatgtccaggtttcttggagtttctaataagagttgcataggacagtgctttttttttgtttttcccgactgagtggtaatagaatctccagcaggtgctgtggtgtatttcacacagtacaggacccacctgaagatgatgacacccgctcccagtggggttgctcccctctcttcctactctctggcatggggaacagtgtagaggtctctggtcttttcagtttccaaagggttgtgtagtaatgtcctttaaacgtaaagttgctgaaacaaaagtggggaaaacagtgcctgagagggaacttggggctttggaaattaaggaatttttttagattttgagcaaagaaaaggatgtgaatagagcattactttaggaaaatggatggtggccacagtggaggatggcttgaacatactaatgagctattgggatagttcagtgaggatagtgagggattgtatttgggcagagcaatagcagtgaaaagagaaggaagcatggagaagagagaattacaggacttgatgtctagtgggatactggggatggaggaggcatgagaaaacccatcagttttgagcctgctttctttttttattttttagacttttttttgtggggaaggggggatgtgtatcatttttaaaatctttattgaattttttatagtattgcttctgtttatgttttggtttttttggctataaggcttgtgagatcttagctccctgaccagggatcgaacccgcacaccctgcattgaaaggtggaagtcttaatcactggctgcccagggaagtcctgagcctacttttctgaaagactggaggctggtgtggtgtggggcaaaagaaaagtttggtttcgatattggagttcgaggtgcttagggaatatcagaaggaaacctatcaaggtttttgtacacaggcacttactgtgaagtctccagattgctttgctgtgcagaatgtagcctggagttgttaaaagaggagtgtgaagaatgaggagacctgggtctgatttgatttccattctccaaagaggacttggaccaaccatgtactttgcaggctctagtctttaaaaacaagcttctggactacatgattctgaagattccttcagagagtttgcctaacctaagtgtgttgcccagcacaacccaggctccatttcatcctgagataataataaacttgggttctaaccttggctttgatagtcacctgtctgaactttgggcaggtttcctagccatcattttgtaaataaaataagggtattgatccagatccatggttcttaactaggagtgtgtgtcataccaggagctttgtagaaatatacgtgtctagattgagcccccatgggcttccttggtggctcagacagaaaggaatccacttacagagagggagacctgggttgggaagatcccttggaggagggcatagcaacccactccagttttcttggctggagaattccatggacagaggagcctagtgggctacagtccatgagtcacaaagagtctgtgcgactgagtgactaagcacaacacagattcgaccccagaggttatgatttggtaggggtgcagtggggaccagttatgtgtttaaaaaaagcactccataggatttctgaggtaatctccttgttcagaagctgcctaacttgtcagcgcttgatgagtactggggtgttcagccacccgccttgtcgctccgtggtcctgtgacatcctcccagcagtgggcgtgttgattcctggcctccgcgttgctcagtggcctttctcctcttcctcagtaacaacctgcagtgttatacagtgcggtgcagcgcggcggccgcgagggaggaggacccgtatgtggacaccaccctgaaggtcagagctggctaatgacagtgcagcctaaagatcaaacatgagtgcttgcaaatttacgctctttgcgtttaagctgggcgaacattaaagtcttgttttgttcagttagagctttgggatgtaaagtggtaagcattttgcagtttgtggtttagatggtaatttttaagattactttgaaaacatgtcattcagaatttagatgtaatgcatgtttttaaaatttggtaaagaatatgtatagtgtaatttcatagagggcacatcacaactatagtatactacagttttattcattttgatcagaagtattgatattggcagttgtatagagctattaaaacagttcagaaatctgtatatctaagagcacagaagtgaatgcatgcattcagatgatttatttataccattatcagatatactaataattcttttgtcattttacaaagccttcaacaagtgttctgtatttccatagttttgatagagtgttattgatgttctagatcagtaacctcgtttttagtgaagtaatctgcttagtctctgaaaagcttttgatcaccaaatagacaattttatgatgaaattctctatttcccgaccttgaatttctgttctcagaaatgcactgatgatttgcatcgtgttcatcatgtgtaatttcacctctgagatggggatttgttatgcatatccatgcttcagggaacccccaagtcatgatggcctctgttcacacattattgtccatctggcacccggaacaccttcttctggaaaaaggagtgtccattgatgatggtgtttagtgcgtaatgtgtctgagacacttttccactatcactgtcacccaaattgtgtgctacctttttctggaaatcacatccaagttctcttttcttctgtgggctgcctgtcacattctgctgctgacaggcttactgcctaccttcagcctcttgggaaatcagaatcacagctttcccatgcccttctgtttatgtttaagatacacacatagccttttcaagagattattttaaaaataatggttatgtccctagtacccatggcaaggtgacagcctctttgtctcttgcttcctctctctccaccccaccttgccttgtcttttgttttaaacatcaggaagaccgaggcttgtgtaggtatgatggtggagtgaggggtacataacacattgaggcggcatcaatctgcatttgaaaataaatctcaattccaggccttctcatagtctcataaaaccagagggaagaaacacagaagagagaaagggagaaaagaggggagatgggcagctagtagaggacgctgcccctgaggctagtccttgaaggtggcagagggaaggacagtgatggtcacacctcctggctcccccttccctgcacttccaccaccctgaaatcctagatgcccctgaatggagcacgccatcattttgctcccttgctgactcaggctttggaagctgtggtgtctgagaaaggtttcacagcctcagagagaaggccataatgcatgctatctttatttccctttcccttgagactctggcttagcatcaccaaggccaccttaactattcataagtgaagtgaaagtgaagtctctcagtcgtgtccgactcttcgcgaccccatggactgtagcctatcaggctcctccgttcatgggattttctaggcaagagtgctggagtggattgccatttccttctccaaactattcatagcagtgaccaaaatagatggaaggttatccccatgcactttgtacaaaagggacaaggaagatgactttggaattgaaacaccattaatggaggagccagggagacctggcagcctcattttgtgagtcccagaaagagctcctcagttagcttcttatccattctgcttgggtgaatgtttccttacaaggacaggagcctgtctgctggtctagggtttcctccagtttgcctggcaaacctccagcctgttagccattctaggcagtgttcatacctgcagagctaacaggggccatctgaatgtgcctgcatttctacacacccatccactaagaaacctttttatgtattttacgagcagtagaatgcccttttatagtgtctgattttgactaaaagcccatttgaaggtaccacctgagccagcccactgttagtggggattccctgggtggcagtaacccgctcagggcagggctcctggaggctctctgctttcatgaagtcagtgtcagcacatactatggggctctttggcggacatatgaaagagatagtcagttatatagtttagataagatagcctcttgctctgataggaataggaatttggattatttgagtagcggggagagacaggaaagtagagattgtatccaatagattgatttttgaagtttttgaagttcatgcacttcattggctaaatttgtgaatttttccttattaggcttgcccacctatcagtatggatgtctgtgctttaagaatacagcttttcataggcttgaaagccatctgtcactttaaaaaccacgttgtacttctgaccaaggcagattctgaaaccgttccagagagaagagagtcacccaagaggtttctgtaagcatgcccatcacccccagacatccttgccaaagtttctggaatgaattgtgttactggtatattttgtgtacatcttcactaatctttttaaatcaaaaatttgaatatcagatgggttttctaggtgttcttttttcagagtaacaaaagaaggtttaatgttctctataatatcctttgtaattgactgtgagctttcagaagaaaataaattataaaactgtttcagtaaaaatctgtggtattgtataataagaatttaaaggacatgtttttctgtgtaattaatgagtgagatcgagcctcttaggctaatcgaaactacaaggctctttattatttttcttccttgacctttcagtggcgatatttttatccaaagttttttttttctggtatttcaacttgaaaagaaattaactaatgcatttcttacctgaaagcacatttgtgatgtataaactatctgttaatctaccttaaaataaaagtgcattcttctaatcttaggttaattctaacttcagttttctgctttcccattgtttgggataaaatggttatttccaaagtggttatgcttctagtcgatgtttcctaagttcctgtgaacttagtggttgggaatgcaatctaatttgaacattcctctatggaaattttaagtaggagagaaaactgctggggacagggggtgagaacatagagtgtatttcaaatcaaacactagtttttgcatttttgaattatttgtgtctgtgctttgttccatcagcagaaataaccaggttgccatgggtaactagtcgcctagaatgtgcacaaagtggtctaaaaatgactgatcctaaaagctttctggcaagaggaaaaataacttgcaatcttatacatttgatgtcttaatagtattatattttttttaatggtttaaaatttttaatttatttgaaaattcatttggccaaaactttgcattttagaaaagactgcatactacagaaaatgcttcgtacagtgaaagctggaaataagatagtgctttaagttgacttacagttctgtgttttacattttcccagcagccctggcctcacgaaggccacatgctggagagagccaggttgcagggattttcatggccaagtctctgttctttttgagaggtcttgcctgttctttgagcttattgcctatttaagaatacttgtggaatgaattggaagtgattggttgaccagtccacgagagtgtagtacatgaactgctgttaggcctacatagtgttgtacactaatgttctctaaaaatctactgtgtagttaagtcaccaaagtgaaagtgaagtcgctcagtcgtgtccaactctttgcgaccccatggactatagcctaccaggttcctccgtccatgggattttccaggcaagaatactggagtgggttgccatttccttctccaggagatcttcccaacccagggattgaacctgggtctcccgcataaatcaccaaagaaaatactaaatgaaaatggtatcagagttacaatattttaggtatctggtatttaccatttaaaatcgccatttattaatactatgtcttgtcttacaattcttgtcctttgttttgcttttagttctagaaaaggtaccagtgttaatcccaaaacacctcctgtagctgaagctgggtggaatttgtatattgtgaatacggtctcaccagtgcaactgtacaaagaaatggtactcctttcagacttcttatttgtagaagtttagagtctaattgatcattagaaattgattctaagtatcacacattcagaatgccacaaccagccagcttcaaggctcttacagaggactatatatcttcaccttcttgttttcacagctcgtgacatttgaggatctaagagaaattcccatcactaaaataagactcccttattcatacccactctcctatgggaattgattagccagtctaaacataaatagccttcgacctttactttgaaccctggcaagagaatcatgaaatggagcagaaagaaatctcagatcatatgtctgtgtctcacacttctttgaaatattaacagatggtcctagcataccacggcacttgtagtattgtcctgtggatatctttattccttttctaagagtgacagctacctgcttatccctgatgatttttataaactattttgaaataatttaaaatctacagaaaagttgcgagaataagaatagcacaaataaaatcattatattccccacatcaatttacctgtagtcaacagagtcaacattataccgcctatgcttctatctttctctttttttgtttttgatgtctgatcttatttatttctgactcttagaacatctcatttttgactggattcagactcagaaggaaaagttctcagagaggacagcctccatctctttctttctctcttttcaaatatttttatttatttatttttatttttggctgtgctgggtctttgatgctgtgcgggcttttctgtagttgcagcgagcaggagctgctctctagttggggtgcaagggcttctcattgcagttgcttctcttgttgtggagcacgggctctagggcctgcaggcctcagtagttggcggcatgtgagctcagtagttgaggaacatgggctcaagagcacaggctcagtagttgtggtgcacaggcttagttgtcctacagcttgtgggatcttcctggatcagggatcgaacccatgtctcccgtgttggcaagtggattcttttccactgagccgcctgggaagcccagcctctgtctcttgacagtctgttgctggtgtttttctttggtctccttcattctcttggccaaaagcttaggatattctgcagcctcttccatatatttcttagtacactgtttctttggagcagcacatccacgtttgtgctgcagaacacgtggagtaacagaacagtgaatcttgagtgctctggtcctaggttccttaccttcttggtttaagggctttcttacaacatactggcggacttcattttcttaggtgagattgaaaagttttcgagttcttctagttcttttggtccccaggcaatgaggcacagtagtatcagggagtccaagaatatccttttctccttttttttttacagtgacctaattgagaatactcaggtcagcatccaccatgcaaccccatcagacttgcactttctttctccagtccttcttggtctgtaacagaaatgctacttactcagcagcaggcagactcagccatgggtcaagacacctttcttcatggggaaaccctgtttatcgttcccagcactgactgggaccacatagcccttccattcttccagagcctcagcagcaacttctgtggccataagcttctcatagaaggtgtgaaatttttgttcatcatccatttcaatgagcttctggaaaccagtgaccagaaagagatgttcaacttcattctgaagcctctctctccctttttgcactcttgtactttctaaatgcacaatcatgcctgcatattttcttctgatccattggaatgtatattgcatacatcctagcccaatgcccctaaatatttcaatgcatgtttcctaagaatttagatgcttgcttatacaattatagcacacacatgtgtttcagtaaatttaacaatgacacaatactttatctagtctgtggttcacattccatttttgtcgattgattcagtaatggcctagtagcatttcccccatcctctggcccaggatccagtctagtactcaagtaatgtatttaactgtcatgtctctttagcctcctttcatccaaaatatgttcatagcctttgtttcattaaaaaaatttttcttgttttctttttgctgttgttgaagtatagttaatgtccaatattgtaagttacaggtataaacatagtgattcacaattttaaaggttatagcctgtttataattattataaaatgttggctgtattccctgtgtagtccagtatattcttgtagcttatttattttatatgtagtagtttgtacctcttattcttactcctttatctttttcttcccccgctggaaaccaccagtttgttctctgtatctgtaagactctttcttttgtgttttattcactatcttgttgcatttttagatttcactctttgttttataagttttgaaacatatttctcctcctccaccttttaaacatttattttttcatttcatttcattttgtttcttttctcatgattaaattgaggttatgtattcttggctgggttccctggtgactcagacagtaaagaatctgcctgccatgcaggagacgcaggtttgattcttgggttgggggcgtcccctggagaagggcatggttccctcctccaatattcttgcctggagaattccacggatagaggagccaggcgggctgcagtccatgggtcacaaagagttgggccagaactctgtgtagaggacgtatctttctcagaggttcatgtggggaggtgcagaatattcatttgtccttcaccagcagtgttcattttggtcatcaggtgaaggttttgcctgatttgtccctggcattttaatgctgataattttatcagctttctcctgtgttttcagtcttatttaattgaaagtcttagacatcatccagatgatttgcctattggagtctaaaaatactgattgactcagattagctagtgaaaatttttataagcccactatgagttatagagttagatgtagcagaatctaaattcaccaattgaaactaagatgaaggatgctcaatctgaatttgagaaagatttaaatcatagaactttaaaaatagttaagtctttcagatacgttcattagctgtatcaaattgtgatcaaattattgctcagttaacagtatcattagtattatagtactaattgctttctctgatgattagcgttgtttaacagagtatttataatcatgtatgtgataaattggctcatacattgtgggggaaaagaaagccattttagctaagccttatcagaatgatagataaccactttttatttcttaggatgtaatgtgttcagatagtaactttataaacaacttatagacctgggaaactttggggcgatgtcttcagcatcatgaactgcttgccttctttgtgtgtcaggtagactacagtaacgcctacaagactgcaaaaacccagagctgcatccaccttctcagcgaggctcacttgttagtgagagcagccctgatggatgccagtcagctggaacctggagaaaaggcagagcttttagaagcatttaaagaaagctgtgggcaccttggcgactgctatagcaggtgggtgatgctgcttggaagctcgttaaagaagccacctgagcttcaggtgtaacttaccaacgtttccacctctggcagttccctgacaaatgggacaacacatgaggggctgtgatttatttattcatttattccacagcacttgttgagcacatcctatgtgccaggtactgtgctaagcttagagagataaacatgacctgttcctactcaaggacttacagtttattagatgagcagtgtttatgtctccttcaaatttagaaatttgaagtttcttttcaggcctttgggtggtggtggggcatgaccagtgaaaatacctgagacaactgtattactcatctattgcctgttagctttgaggcagagatcctagttggacagtctgtgattttaatcttagtaatcaatggttttgtaatgtcagaaaaggatactaggaagaagaacgatttctatttctgagaatgatctttacaatttttttttaatataattttttaaaggcttacttgaaccacgggagtcattataaattaatgaaaggcttttcctacttatggtcttcccctggtggctcagatggtaaagaatctgcctgcagtgtaggagacccaggttcaatccctgggtcaggaagatgccctggagaagggaatggctacccacttcagtattcttgcctggagaatttcatggacagaggagcctggcgggctatggtccatgaggtcacacagagtcggagatgactgagcaactaccactttcctgcttataaacaccattattgtagagctgcattatgaatattgaaattcacttgtttctctgattttattatgagcaagcaaaaagaagctacattaattagaatgactttgcagaacaaaccttaggaatttgttccagctcctattggccacagaaaagtatttgtgtcttctggaaagcatgatctggtttattatcaaatgtgttagacatccagacttaaaactgacaaatctgaggggttttttttcccccacttccttccctttaggcttgaaacccagcattcccacctggccttgccatactataagatgtctggtttgtctatggcagaagttttggaccgagtggactgggcagtagaggatggatcacagaaatacgagcggggattaatcttctacattaatcattcactttatgaaaacctggatgaagaattaagtgaagtgaatacaacttcctgcttaattagatcgaatatttttaacttttcactttagctgtttatgcagttctgtttaaaaaattaagttcccagtattttcattggtagtatagtctttttttctaaaaaaggtaactagggtgtactttttcttcattaataatactcatagaattacagcttgaaaaagaacttagaatcatcttctcatactttctcatgacatagacagggagatgtggtccactgtggttgagtgacctgcccaatgtgacagtggcatgtctttagaagagtgtcagagaacctgggccttgcctgcctttttctcatccacagcccttttcaaaaccctagttgcccctctccccaagtgtctaaaacttttttataaaatcctggcccagtgacatttttaaggattgtttttagcccctgatgtatttttttatgttttggttgttctgggtctttgttcctgttcaggcttcccctcgttgcactgtgcggaggctgccctttgctgtggtacatggcctcattgtggtggtttccctcgtggagcacaggctcttgggtgcctgggcctcaatagttgcagctcttgggctccggagcatgggcgttagtagttgtggtgcatgagcttttagttgctccacagcatgtgggatcttcccagaccggggattgaacctgtgtcccctgagttgccaggtggattctcatctgctgcaccaccagggacgtcctccctttcgtgtatttttaaatagttgaatgcagatatacagagttgggtattgtgattccaaatattttaaggttttaagagaaatgaaattttcttctataaatattaagtatattttgtactaagtagtaattctttataatggacttttgagtggaatttaatccagtatttgtttttcttcttctgaacacctgttagtattagaaatactgaccacagcttggtacaaagagatcactttaggtcacctcagatttcccatgctatcatcatcaactctctttttaaatcaaaacatagtacaaaattttatattaattggaatgttgtatcttgcttgtttatccttttttttttttttttttgctgattttgtgctttctatcggctgactgaccttttatttctcgttttgctcaccgaaggaattgtcagcaaaagtagttcagatgttttatgtggctgagccgaagcaactgccacatattctctgtagtccttctatgaagaatattgatcctttaactgccataaaatatttaaggaagctggatacttctggattttcatcagttttagtgacattggccaaggcagcagtggctttgaaaatgggagatcttgacatgcacaggagtgaaatgaaaagccattcagaggtatggtgccgtgcccagcattaatgtccagctaacgtaggacccggtggtcctgagcctggtcagcttttttctggcttctgtgtagctcatttttccttagtggtaaaggaaaatagacttaatattatattaaaaggaagtgacccaaagtgggagtgcttgggctttggatttggaaatgaaaaagaataccaaatgataaatggtagctaggggtatccaaagacctttcaacttagtgtcagatttattcagagcacagtgcttggtactgaagagcatataggctctgccctaagctgacagtgtgacgtggcatgaggaggtgtggggtgtgtccctaaaaatagaacagtgctatatattcaagtacagcaagtgggatgttaaccttgagccttaggcatccagcagttgcagaaatagcctgcccttgagaagatcacaaatgactgtgaaagactggggatttgaatggtgtatcaaagaaaaggtggcttccccctggaagagtggccctttagggacgtgagccaaagaagttaatcagtcgaggaagaaatgaagaagagacattagctgagtacttatcgctcaggtgtaaccaagaagagcaggagttctttattgctgcacacatggcacattttgttatggtgaggagagcaagtcaacactgccatgtcctctactttgaagaggagaattctaggaagatgaactttcataattttgaagaatcctagatagacataaatttaaagctgtctataatatatgacactttgaagcttaactatgttaataacttctaggaagacagttattaatgatgttcttagaattgtctttatagttaaattaaaaattgagattataataaatttttaatggcttatcattgattcttaaattcattagcatgtatttccaagatgaatgcaatgtatatgttgttcctaaattttgtttttttaatctgaagatgaagttggtatgtggcttcattctggaacctcggctattgattcagcagaggaaaggacagattattccaactgagtttgcagttcacttgaaggagactcagcctggattgcttgtggcttcagtcctggccttacagaagaacaacaaaattggaattgaagaagcagattccttctttaaggtttgtcactttgaacatgttattttagatggcctgatgaagttgatgggaagtgaggagtagaataagagaagcaagttttcatttgtttattgaaataccagacttacacataaccacttaaaaaaatacaggttaaaaaaatgtttcttgaaaaattctgttcatgcaactggagtatgttaaaatgtttaaattggcttttcccatggcactaatgctagtggataaattgttgaacacgtggcccgcatgatggagtgctttttagaccagctgtaacttgatcagtgctatatttatctgagccataggggcttgtttcactgttctcaaggtgctttgtggtaaagatggagacacgatccctcagctcttagtggacttttgggaagctcagctggtagcctgtctcccagatgtggtgcttcaggaactttttttcaagctcacatcacagtacatctggagattatcgaagaggcagcctcctgacaccacaccattgagaacatcagaggacctggtaagataatggaatggtacagtgaatcaaactttatgtacattccctggagaaggaaatggcaacccactccagtattcttgcctggagaatcccatggatggaggagcttggtgggctacagtccgtgggtcgcagagagtcggacacgactgagcgactttactttcactttcatacattatgataatgtcacttatttttaacagtataacatcaaacataatattaccagacttttaaattttattatttaattttatttttggttgcactggatcttcattgctgtgtgcgtatttgctctaattgtggaaagcaggggctactttcttgttgcaatataggggattctcagtgcagtggcatctcttgttgtggagtacaggctcaatagttgcggtgcatggacttagttgctccatgatatgtggaatcttcctggaccagagatcgaacccatgtccgctgcattggcaggctgatccttatccactataccaccagggaagtcctaccagattctttctttaagcaggagttaaaaacacacctataacttgcctgcgagtgacatccacatttgaaattttatattctaaggagcgcctcctaccactcctttattatgtccttgtagtggtacctcagtagccaaagtgtggggaatagggctttcccccaaacccatctgcactcccttaggtgatggtcatgaagtagaacatgcgagaagagacacctgcagacctccctgctgggagacgaactgcagaagcgctgtgggagagagacttcctccctagacttccacttcctgtcggctgcacagactagagctcttttgcagtctgagccgctctgacaactctgctcttacgcttcctgttctcctcaccccctttaccccttattgatgcaaggctaatgtggattttcttgaataagggagtctttatgggaattctcttcagaacttatggaagaggttttgagtcccaaggaaagtagtagaaataaaaatcattttcaatgttactgttaactttttttttggccacactgcatggcacacagaacttgcctgatcatggattgaacccgtgctccctgcagtggaagcgcggagtcttaaccactggcccaccgtgacagtcccttattaactttttttaaatgtaattagtttaagagaagtattaccctttttgttagaaactgtctctttgcacccttttgaaagttaaaatattaggaaatatttagtaaagatttgttcattaagaagcagcaaggctgaaacatttcccaggggaatacattctaagactttcttcccattcccaagaaaatgtataactaattttgggacacagcagaaagttggagactgcttactttttgtgggatggatgaagaaaaccttgttttattgtactttgtttacagtaagtttcttttacattttagataaacacctgtagtcattatggcttaataaatccatgggttaatgtcttaatctcatctgaatctttagtcgacaaaaattatatggaagacctttcaaaattacaggtaaataaagatgcctctttttcttatgaatttgtatattataatatagtatagaacttaaatttggtaagctcccggttgtcctgttaactgagagtgtatagtttgggtgacagatctatagtgaggcatcctcagcagctctgcagggaattcctgctgcttctgcccgaaactgctgaaggaaggctggttttgttgctggtgggtgggcgagtgagcttcaccgagcccagtgacagtcttgcctcattttcaggatgtgcttgaaaatgctttgtgaaatgaaagtacggcaaatgcttcatggtgttttcattttgattcactttttttttaaatttagttaattaatcttttaaattttagcattcactcatacagtttaggcctctagcccaagccaagcgtgcctatctatcttatagaaaataaattaaagtggccagtttatctggttccttaaagggtttttttcccccagatatttattaatttatatattgggctacatggatcttagttgcagcatgtggtatcttcagtcttccttatggcatgtgggatctagttccctaaccaggggtcgaactcaggctcctgcactgggagcttggagcttagccactgggccaccagggaagtcccagatttttttttaattaattaatttattttaattggaggacagtcacttcacaaccctgtggtggcccctgccacacattgacacagatcacccatgggcacacatgtgccccagattttttttaaagtaagaaatatgatcaagagaatgtagcccatcccacaaggattctgacctcaacagtgttttgactgaaagtgagaaatgaagtccacatttgacctggtgggtggggctgggctgcatgtgtatgtgattttatttgatggagtcagcggcctgaggactgaatataatgctcacatctgttgtgtttggtctgcccgtgtaactgctaacatgtgaaagctgagatttcaaatgaagaagtgttgagtttctagtttctctttggaaacctcagcagcactttcatccagccgtaatcccgggccctcactgcctgagacctgtgggctggagcccctagtggtttccctccttacgcagggctcacgcagtcctggctgcctgaccagctcacgctcatctccagtctccctggtccagaggcggagtgtccggcatccattttccttatacccagctgcctctgtacattttcgtcatctggtttggccttgttaggctttttgcaacccctgatttatgctgggaacttggtgtaaatgtagttactgcttttagaaaccaaaatgtcaaattgggagtggaggtcaggaagggaaactcgagaccatattgctgttttagcctctagacagcctatgatgtctccagatagagaattacttaaatttttttaaaaattgccaaagaagattcttgcaggttcttatctctagtactcttatgatacagaggctgctgagggctgaatctcagatgtgttcattccacaaatagtcctcgatcataaactataaatgtgattgatgtatagcattaaatgaggcaggcaagaccttgccctcatagaatatatgtgttaattatatatttaaagtcataatatgtgctgttaagtatcccctataaagcttcaaagcatacttaaaatctcggcttgaaaaagtgtaattcattgacctttagaatccattttaaagtatttaaaagggagtctttactgatacaggacagaaggttcagttagcctaaatttttctaaatccttttcctaactcttaactcttttctaaattatctggggtcagtcaatcaatcttgtcatttagaaaaaaaggactatcaagaacaaaaagatctcatctcttcttacctcagaatgagattcagaatcacctggagagctttatcaaaattgtatgacctccctatacccaccagctaaccaccaccacacagatttaatttgtctctgtcacttgtcctcaaaaaacattgtaatagtatatttgtgcaaaaattaatataaaaacaatctataaatctatctataaaatctatcaaaacatctatgtgtcaaaaaaaaaaaatgcactactgtgtttagaacacagtagctagtaaatgcctaccttttacaagaattgtcctggtcccctcccctcacctttttgccatttcccccctcttggagccacaggtgtgattgtgtagagaattctgtgaattccagtcccaaggagatcagaaaagggaataaatagtgcctgtgttgagggtggagagtccatttccaatattggggtggggggaaaggaacacacaggtgagaagcagacaacattgagtattttaaagagtagtagtaacctgtgggccatttttttatccagtgatgcatgtctggttgtctggtaattttttggtttttggccacatcttgaagttgcaggatcttaattccccaaccaggaatcaaacctgtgccccctgcagtggacgcaccactagacctccagggaattctgtgtctggtgtttcttatttttaaacttcttgatgatatggattcaactatctaaaagttcctgggtaacccattttgtaccaagctttgattcatttcactttaatcatcttatttcatatttgctatgttactgtcagaaaattattcagatgaaagtgcatattgcaggaaggaaacagaccaaccttattctcctagccattctttgataattggagtaaaatcataatgctgactgtaaatggatagttcatgttccacattctcctgtgagtctgagaagatgctgtagtaaaaaaggataaaagaagaagaaaatcaggatatgactatttcatttttatccagaataaaggggaagcagagattattttggtggtataatcaaaagtagtattaatattagtagttcaaatgcttaaaagtaaaatgttggtcacgttctgaatactgaacagctgctctaagtcatttagcttgcagcaaatggtattgatacaaattattagttcttagtttgcttagttttcttaaatgttaaattttatttttggtttatatatggtacatgtgtattatagaaaccttggaaagtgtgaaaaagaaagcaaaagtgggctttatccttctatgcagtgaactggtttctatttcaaacttcaatgctcttccaaaggcatgtacctatgtagattttacaaaattgatcatgctttgaatataattttgtattttttttttactgatttgatcatgagcagcattttgtccttaactgcctttgaaaacaattttgatagctacaaaatattccataatttgaatgcaccataatttatttactcatcacttcttgatgaatgtttagatttcttctagtttttcaatattatggatattcttgagttgaacatcattgaacataaatcttgaccaccatgttgattatgtccttgggataaagtcttaaagctttcccgttcatttaagtatgcagtccactaaagcgtgtgctctaaaattgcgtgttttttttctttttttgacaaatgagacttagtcttttttaaaaaacttgtgttctgttatgttgtgctttagttttttgggtgcctcattccataacctttcacttttctgttcatagtctcttatatgtggtccttcatttgacatagcttccatcatcccattcttggagccactctcagaagatactgttgctggcctcagtatccatgtcctgtgtcacacgcgtttgaaagagtatgaacagtgcatagacaggctgttggagagatgcccggaggcagtcatcccatatgctaatcatgagctgaaagaagagaatcgggtatgcctttcagattgtgttttttagtctttatctgtgataatcaaatgataattttgttgccttatctgcaaaatggggacagattatgccagtccaacctcacaggactatgtgggtcaaaagagcatgtatgcctaatatgttatatgttttgagtaccatggcaccccagtccagtactcttgcctggaaaatcccatggacggaggagcctggtaggctgcgcaacatggggtcgctgagtgggacacgactgagtgacttcactttcactttcatgcattggagaaggaaatggcaacccactccagtgttcttgcctggtagaaccccagggatgggggagcctggtagagcctcccccgatgggaggccacatggggtcacacagagtcggacacgactgaagcgacttagcagcaacagcagcagaggctgtcaacatgtgttgtgctggtatgttatcttcactaaaaatctcttgtttggagatgaagtccgctattatctgaagattttgaaaacataatgaatgatgagaaaatcctttgtgggttatctggtctttagagattagaagagtttttgattttagaaatttttcttttgttcttccttctttcctgctacctgagagatgaaaacaagacatgcctatgtttcttcttgaaaatagtggtgtacatatatatgtacagtgtacatactgttaagactttcaaggtaaaaatctgacttacgttatagtttaagcagaagacttcaaacaaagtctttgccttaaccaaagtgatgtatttttgccctgtgcttccttgcacaatctttttcttcttgttggaaatctgagtataaaatgcatcaaactttaaaagtactcattttttcccaagatagactttgtggtggaaaaaattgctgcctgaactttgtcagagaataaaatgtggtggagagaaatatcaactttatttatcatcactaaaaggtaaaataatcttttttgctttattataaatttgggagtcttcatttccataatttgctgaaaccttgctttctcgtgtattttatgtgattctcaagtatggtgaagagggtctgagcttgagggtctgagaattacccagagagcttaccttattcatttatattttttagctcttccctgggcttccctggtagcttagacagtaaagtgtctgcctgcaatgcgcgagacccgggtgtgatccctgggtcgggaagataccctggagaaggaaatggcaacccactccagtactgttgcctggaaaatttccatggaccgaggagcctggtaggctacagtccatgcagtttgcaaagagttggacacgactgagagacttcacttgacttcacttttagctctagagctgattcctctaagttaattttttcaaacacttaccagtttatcatagagaaactcacagcctcagtattttaaaaattggaataactgttaagtccattttgttttaatgatctgggtgcttaatttacttcatgcaggaaattaagattatttattattattagttgtaattataagcaagtactgaggaatgacaagtttctcaaaaatttagaagcttagtatctctaaattacacagtattttatagcaaaggtagttactgtttaaatttttataatttatagtcatttataaatattgatagctatatggttttgtttctcttctcttgtgtgttaatatcacttgctaatggttggcttgatgacaaaggtatggttctattgataccaatgtgcctaaaatattagaagttgacagtgtgggaattgtattttccacctgaggtcactgactttaagtgttaggcaaagctagtggccattggatggtgcttttctggagatcctcatttaagtaaaggtgtgtatttgtgactgggaagacaaggaggagcgttcatactacttgtcctacccatctctctgtgtgatactttcatttttacaaggtagcagtgtcaggtgtggagaaggcagtggcaccccactccagtactcttgcctggaaaatcccatgggtggaggagcctggtgggctgcagtccatggggtcgctaagagtcagacactactgagcaacttccctttcacttttcactttcatgattggagaaggaaatggcaacccactccagtgttcttgcctggagaatcccagggacaggggagcctggggggctgccgtctatggggtcacacagagtcgaacaagattgaagcgacttagcagcagcagcagtgtcagctgtttgattgcccagtcccatctgcgtcacataattttgagctgattattcttgttggtggatctctttctggggcaggtacctcgcgtcttcacaccccagtagtgtcattatcttaggcaagactcttccttcttccttttctgatcctcattcacaaactctctacccatagcttaaccatagtcgttcctccacatgttcatttttctgtatctttaatatgtgcgtgttcacacacatgtgcatacagtgtgtgtgtggctcacggaactaagtgctgtgtgagatttaacctttatcagattgtatgtaataccttcagggctggaatcgtgttttaacatttttcatgttacactttccttgccagcaatgtgcttctccataggaagagtctataactagttactgatttgaagggaagacgcctgaataacctcaagtccatttttattggggggggggggcggggggagttgtccttatgttggcgcctgtggtatatccagaagagaccaggattggagttagaattggaggtgagttccaagccttctacttactgagtaagcctgaagcaagccagttttttaagtgcctgggactaatgagaagttcaagactgactatggagtaaaatgctaggcaaaaattgcaagatggtatggttgagatggagatcatgggtttatatattaataatataccattattaatataaatatttaatataaatataataatgtagatatataaagtttaatataataaaccaccaccagtatacttaggagcttggatttcttactttctagtgcagcatatctcagccttgtcagtactcacatcttggtactacttggtgtaggtgtctcctgtgcattttaggatgttaccagcatccctggcctctacccactaaataccagtaacacttgcccaggtaaaatagaaatgtctccagccattaccagatgtccctgggggtgggggtgtggcaaaattgtaattgttgagaaccattgcactaaaacagagccactaaaactagggttagtgattgacttgtttcaaggaaatacttattactatttttgagtcagtgaactgtgcttcttagtaaaagttctagcaagcactgtagtaaagtatgaagtttaaaaagtcagtttaaattctagccagagataaccatttttaacattcaacacatattttctagacacactggaggatttaaagtactctatggatttatgatattgaccttgttcttgtaatctgtataagtgaagtgaaaagtgaattcgctcagtcgtgtctgactctttgtgaccctatggactgtagcctagcaggcttatcagtccatgggattttctaggcaagagtactggagtgggttgccatttccttctccaggggatattcccgacccaggaatcaaacttgggtctctcacattgtaggcagacactttaccctctgagccaccagggaagccgcccagaaaatactggagtgggttgccatgccatcctccaggggaatcttcccaacccagggatcgaagccaggtctcctgtactgcaggcagattctttaccatctgagccaccagggaagtcctaacctgtataagcccctcactaattggcagaagaggagaatagggcagtggcaagatttttgttggctctataattacaatggttcccaaatcagtttttttgtatgtaggttattcttacaggttccacatttagaccaaataaactagtttaataggaaagtattgataattcatgagttttgcaagttagttagtaattattgtttattaagattctgttttatgtcagtatgtcagaatgcattactgtcttttaaataattctccaaggactctggaagctagtaggtggtaccactgcatgatagatgaggaatctgagactcaggagtttgaccttctcaaagttacccagagtgtaagtcgaagagtgatccctgcccaagtctgtcataattccagagccaggcatctttctcatatgttcctgtcataccattcactaactttttagcaacaagagcatgtcattcctttgtataaggggtgatttagattgtgtatattggacagctggctttggatggacgcacacatacctgagcaggaatttttatatttcagttactctgcaaataggataagtggtaggcatgcaagaatcaaacagagaatggcactgcagaaggtttagaaacattgttcttaaatgtcattcccttttcttcccagcagagggctgtgtgtatcaagaacaatagagtcataaaattagttacctttataaaaatgtttactaatttccttaatatttaatattcattagaacacatttttcagcttgagaaaaaaagtaaatggtcttgaaaacagatttatgcttattaacgtgaaaatcacaatagagaagaacagatttaggaaaatggcatctaacacttggggcttcccactagctcagatggtaaagtgcctgcccacaatgcgggagacctgggttcgatccctgggtggggacaatcccctggagaaggaaatggcaacccactccagtactcttgcctggaaaatcccatggacggaggagcctggtaggctacagtccatggggtcacaaagagtcggacacaactgagcaacttgactttcactttcatctaacagttaatgccctctgtgtgtgtgtgtgtgtgtgtgtgtgtgtgtgttcgggtgtgcacgtattcgtgtgtgcatgcatgcctgcttagtcatgtctgactctttgtgaccccatggactgtagcctgccaggctcctctgtccatggaatttcccaggcaagaatactctggtgggttgccatttcctactccagcggatcttcccaacccagggatcgaacccgtgtctcttgagtctcctgcattggcagacaggttctttaccactagcaccacgcagacagtctataaaggagctggaatatagtcttaacattaaaaacagtgttcagttgattgtattttcctacagatgattctggagagagtaaattgttagaattgtaaagcatttttagatttaaaagactgtttttttttttcctctctcttaccatatttataacattttgtcccctgcattagcttctcactggttgagtgatgagagaattgggtgaaaggcagaatctcagttctaactcagatattctttctcacaaacagaaacactgtcagttgttgctgtggaactagaactaagggatttcttaaacgtcctcccagaagatggcactgcagcgtttttcttgccgtatcttctttactgcagccgaaagaaatcattgacttgaaagtatcattttaaatgtaccacaatggcacatgactctgaatctcgaaaagctgaatgccatatgaaacatatatatataaagggtttttatattgaatgtgtacatacactgcaaatgctttcagtctgcttgctaagttgcttcagtcatgtccgactctgtgcgaccccatagacggtagcccaccaggcttccccgtccctgggattctccaggcaagaacactggagtgggttgccaactccttctccttcagtctacttacctcactgttattactaatttcataatttatgacctgagtccatttaattgtccagaatgttaaaaagctacaagacattgtaattccctcaaagaaagcatatattttgaaagatagaggctgacttttataccaagaaacatcagtttactgttgttggagccacgacagtctttttcatcccaggaacataaaacagtttgtaagtgtgttcaaaagaatgtccttccaa

SEQ ID NO: 171 - DNA, 23687 bp, Hippotragus leucophaeus
  source 1..23687: mol_type = genomic DNA
ccttgtgtttattttagggccaagggactgatctttgaacgggaagcttcaaactttaaaaaagaagccttcagactggctttgaagaagacaagctagacactgcttcagggcacggccttcagaatgcatctcgcctgtccaggggcgtccctggtgaggagctctttgaagggtttgttccacagagggccagagagctgatgctcatggaaccagattggtggatttgactttctggaacaatcgtcttgctttattttattctttctgagaggctggaggtactgatgggactgaagggcctccggggaagggaagcagcactttcatgctaaatgaaaactagacaagtgactgctggcgactgaagacacctaaacgccccacatccggattcagcagactggggacccagaggaattgccactgctggggagaataaagccagactggaaaagaaaacccaaatgaagagaatgagggccctcggagagtaaatggcggcctctacctccacagagagcaagttggcctcctggtgagtagcagggcctgcgggggtttagttcctgccaggctgctggacagatgttttgggtgaactgaaaatccccaactggattgtctaaatttaattaagcgggcgggaaccattttcctcagagccactaatcaagggccatttctctctgaagctgatgtgttgtgaccgctcaagcctcttgcagggtctagtgctgctggtagattgcagaaaggatagctgtggctggattctgcagctgggccgtgacagtaccacaggcgatcgagtcctcacttttgagagacaagcagaggtggccgtgtggaatttccccacgaggagaagtttggccagactggctcttgaggggtattacacaacacctgcctgaaacttttcttaaccctaaatgggttaagcctgtctgaatttggttcagtgaatgttaaatcgaagagaggaaagtgagaggcgtggtttcaaaagaatgagcagagtttatgacgtttatatgtgtgcagttcaaaatgacactcaagtgttttttgtgggcctgtcaagagtcggggcactttcatccagggaacatgaggaaaaggtggaatggagcccagcagtggggtttcattcgttcatcatgtatttatctacctacaggcttccagttccctgacatataattgacgttcagcactgtaactcacataatcatgaaaagattacagtcagtttagtgagcatccatcatctcacacagatacaaaataaaaggaaaaattttttccttgtaatgagaactcgggatttactctgttaacaactttcatgtataacacatggcagtgttcactacatttatcatactgtacattacaccaggcctttgctggtggatcagcagtaaagaatcctcctgccgatgcaggggccgtgtaagatatgcaggatctatccctaggctgggaagatcccctggaggaggagatggcaacccactccagtattcttgcctggagaatcccatggacagaggagcccggcaggctacagtccacggggtcgcaaagagtcggagacggcgccagcgagtaaacaacagcaacaacacgttacaaccctggcagtacttataactggaaggttgtacctttcctcatccgatccccacttcccccaccccctgcctctgataaccacaaatcccatctttttctatgacattttgtctgaagcataactgacggataacattgtacccaacacagtgatgtgctgtttctgtacgttacgttacaagaggctcaccacccggcaatggcgtttctgggctgcgcccgaggcatttttgatctgctcttgccctgaagctggtggcacattgagatctagaactcgggcaagcggaatgtgctggaaacagagttactgcttgtcacggggaggataaagtgggggccagggagggcagcagggggagggtgtagattggggagaagagtgcagtcactgctctggcctgacgggcatgctttcagagacagaggctgaacccagggccagcctggggagtttgccttgtggtcttaaggagataattatagtcatacctcagaggagaccccgagtctttagggaagagcagagggttgtgggaatggagagcttcctctgcagagaggaaatgagaagtttgatgaggggtcctgtcaaaggagggatgaggcttttagtttttgtcttgtaagttttttggctgagccaggtggcatgcgggatcttaacttcctcagccaggggttgaagctgcgccccctgcagtggaattacggcgtcttcaccagcggaccaccgcagagaggggtgcggtgcccccactttgccattacagacgtgctctcctgcctggagactgcagattccttgtgtgcctttgctcgccgtggccccagggctggcgaatgcagcgcacgccacaagccctcggcaagtgtgtgttaaacgactcagtggcaggaggtctcgtgcccagcagttgtgagggcagctaagacatccctaacttacttcgttatcagcatcttagaagacacgttaccaaaccgtgtgggtacggagttaaggcgcagtgtctcaaataagaggcgtcatcgtgggcgcactgtctttccttagctgctcactgtgttttggggcagagggtcggacagctggatggaggcgtgtttttagcttgagtcggccgcacttaacaaaatggtcttatctctttgtagctctcagcttccttctcctctggggcccccagaaggcttttcagataccaaggcatgagtccctgttgggctgggccaccggaagctgcgtgttacaaggccctgctcacgggatggaagggaacacggctcctttctcttctcttggcaggtggaactattttttcctctatgatggttcccaggtgaagggagaaggagatccaacccgagctggcatctgttacttttatcccccgcaggtaagccactcggctcactcggtggggaccccatgacctttcaaagggtttatatcttgacagttttcttcgcataatccaggcatttgccacttctactctctcattctttcttgattatgattatgattttggctatgcggggtctttctgctgcacacaggctttctctggttgcaccagtggcggctgccctctggctgtggcgcacaggctactcctttcggtggcttctcttgttgcggagcgtggctctagagcgtgggcttcagtacctgtggcccgtgggcttagttgctccgaggtatgtggactcgtcccaggccagggatcgaacccacatcccctgcactggcaggcagattcgtaacccctggaccgccagggaagccctgttcccttactcgtagctgtattctttgttgctgttctgatgttgaaatgccccagccagcggcccagtacttctgccttctctacctctctgttactgtcacgattttctgtctgctccattggaaaaaaaagaaaaaaacttttctctgaacatataccagagtaaagaggagtgagtcatcagccctcatgcccgacttcaacaaagatcaccacctgactagcctgttatgagccagcctaactcctccctactcttgtttttccccctggagtatttgaagcagatcctagacgtggtgtcatctcaccagcatcagggaacacctctaactggaaagggtatatttgggtaacatcccgctcggcgaaagttgccattggtgacaataataccatcctatatagtctgtgttcccatttcgcctttattatctgagatgtcgctcagcccttccttccctctccctttctctctcccttccttttctcctaatcagcatccaaacaagacccacgagccctgtgcggctgtatgacgctgctcaccccccccccatcctctcccccctgtgccactgaattactgaagacagcgggtccctgatgcaggggagcgtcagcacgtgtcccactcggactgggctggtcccttcctcacaatggggccattcggtgcttcctgcccagagcctttcctgtaagctaaaggatctagagccttgactgagtccaagttcagccctttgaggcaccagtgctccattctccgtggcatcacgtgctatctcccccgggggtttacttagcgtgaaggtgggtccggaggcccgtgtgtttgctcacatgattgtgctctgacttgcagagcggggattagcctgcaccactccggtctctccacggggatctgaatgggggtatgtgtgcaggcctgtaatcccgggaacaggaacgccattcctgggccatcatctcctgcattcactgtgggcgttctgtgacactccgggcaaggttcagccaacttggcctcaaaagggccaatgctttaggctttgtaagccacgcaaggtctctgtcacgtgttcttccttgttattttgacaacccttacaaaactgtaaaagccatcctgggctcacagattatagagagaaacaggcagcagagccgatctggcctccgggctgcagtctgccaaccccgactctgaggaacgacctgggagttaggaccttcagcctcatgtctggactggctcctctccccagaccccgctggaccaacaggagctgctgtgtggacagatcgccggggccgtccactgcgtttcccacatttccggctctcctcccgccctcgtccgcctgcggaaactgaagttcgccgtaaaggttgacggtgattacctctgggtgagtttgccaggctgaaccagtgccggcggggtcgcctctaccaagaggcgcttgtcttgctgagaggtgtcgtgacagcagggtttacaaggtaacccttgccgtggctcctgagcctgctgcctcgtcccctgcctctgtgtcatccacgatgcccgcgtcccgctctgcgggtgccatcggagctgagcgctctcccaaacgtcactatcacagcctgcattgcacaaggcggcgttcgccttgcttttgaaagacttcagtcgtcctgtggacgttctttttgctctgtgatgcaaactgagtttttaatctccatcttttcttgtttctcctctattcctccgtgtactttccacacttactggggaagggagctcgaaacttgaagacactggtgcatgtcggttaggtctccaaggaccattaagggaaaaaaacaaaacaaacccacttacagctcgtagtaccctttactctcaagtccctttgtctcctgcctactcttattttaaatttattcctgagggaaacagatgcttacatgtgaggaagtatcttcgcctttataggtattattttcaatgttttattgtgaaaatttcctaacataacaaacggttgaaagaactgtatggtgaatacccacatacctctgagattctacagtgaacccttcattgtcgttgctttatcacatactatctattcatccctttatcctctattttaatgctttctgaagttgcacatatgagtatataccttaccgcctggccccaaatacgccattgtgctgcacgttaactagagttcaatatgtgtttgtggttcttctgctcttttttgaggtaaaattcatttacatgcgatgaaatagacaaatcttgagtgtatgtggtgcgtttggataaatggtgcacctgtgtaacacaaatccctatcaagatgcagaatatgttagcatcacgccaggaggttcccttatgtccttaattccatcccctccccccacatcccaggtaacactgtttggagtgttcccaccaaagaagaattctgcctgttctagggtgtcatgtaagtggaataatactcacatcattcctctgtacagggtcctgtcctgctgcttaactgggattcatccacgttgttgcacagccccacggtgcattcctgtttatcactgagcagtattccacagtctaaatgtactggtctgcttactcagtctgctttttctggatacaggaactttgtgcagtttggggcacttaagattaataagggtctagagaaatgagtatcaaaactacaacgagttatcacctcacaccagtcagaacagccatcatcaaaagtctaccgataataaatgctagagtgggcgtggagaaaagggacgcctcctgcactgtcggtgggacggaaattggtgcagccactgtgggaaacggcttcccaggtggcgctcgtggtaaagaacccgcctgccagtgcaagagatggaagagatgtggtttgatccctgggttgggcacatccctgggaggagggtatggcaatattcttgcctggagaacgccatggacagaggagtctggtgggctgcggtccatagggctgcaaagagtcagacgcgaatgaagcgacttggcacgcacgcactgggtaagacagcacagaggctcctcagaaacccgaaaacagagctaccaaatggtccagcagtcctactctggggcacatatccatacaaaactctaattaagaaacatacttgacttccctggtggtccgggggctaagactccacactcccaatgtgggggccctgggttcgatccctggtcagggaactagatcccacaggctgcagctagagaagatttcacacgtcacagcaaagactggagatcccacgtgccacaactaaggcccggtacagccaaataaatatgggaggaaagaaagccacatgcaccaccgttcagggcagcactatttacagcagccaagacacggagaacgtccatggacaggtgaatgggtaaagagggtgtggcccgttgcatacagcggcccactgctcagccgtaaaaaagaagggactcatgccatttgcagcaacatggatcaaactagagattagcatactaagtgaaggaagtcagaaacgaaagttggaaagacaaataacacgtgatatcacttatacgtggcctctaaaatatgacacaaacaaacagctacaaaacagaaaaagtctcacagctacagggagcagacttgtggttgccaagggcgaggaggttaggggaggggagtcctgggagtttgcgagtagcagggcaaacacataggatggataaacaaggccctgctgtatagtaaaggggaactggactccatgtcctgcgataaaccataatggaaaacagtctgaaaaagaatatatgtggcttcccaggtagcactcgtggtaaagaacctgcttgccaatgcacgagacatttgtttgatccccggttgggaagaccccctgaaggagggcatggcaacccactccactattcttgcctggagaatcccatgaacagaggagcccggcaggctacagtccatagggtcacaaagagtcagacatgaatgaagcgacttagcgcagacatatgtatccctgaatcactttgctgtatggcaggaattaacaacattgcaaataaacgaaaagagtaaggctctaaaaacattgctatacaagtctttctgtggacatacatttccctttctcatgggtaaatacataggcgtgaagttgctaggtcttacggttggtgtgtgttgattttataagaaaccgccagacatttgcccaaagcggttgcactgtcttgcgttcccactgacagtctatgagaaggccaggtacttcacaccctcatcagcgggcatgtcagtctgtttattcacaattttagccactgagctggatgtgaagtggcatctcaatcggtgttaatttgcacccccgtgactagtcacagcagggcttcttcatgtgctttgtggacatttgggtgtcttcctttgagataatttcccccagtctctgggtgtgcttaagtttcttagtaatgtcttttgatgaggcgttttttggttttaatgaagtctatcagttttatcttttacagttattgctttctgtatcctgtctaaaaccactgcctacccattagagaagacattctccaattctggggggcggcagccggggggagcacgtttcatagtgctagcttttaaatttaggtctgtaatccaccttggataaatccttgtgaatagtatgagcagaggtcaaagggccttttctccttgtggatgtcccattgttctagcaccgctggtgaaaaacttgccttttcctatttgcttcctggggctcctttgttggagctcaaatgaccgtttaagtgcggctctgcttctgggcgtgctgttcttgcccactgggctttctgaagattctgtacacgtactgctctgtcttgttgtctgcagctttagaataagccttgaaatcagctgggggaagtcctccaaacttactcttctctgagacagcgtttgctcttttcagtcctttgtatttctgttgcagaatcagtttgtcagtctctgaaggaaagttggtgagattattaggatttctttcaatctgtagaataactgggggagaagtaagcacttaactgggcgccagactgtagacggcacttgagtggcgcttacattcagagagtatttgtttgtttacctgtttttgttcatagttggtttgttgaagtttctgatggttcccttaggagagattcctccaggtagaattagtgagtcaaagaagatgaagtgtttttcaagctccataaacagggggccagattacttcctaactgagcaagtgtctatcgtttgtggaacggaacaccgccgtcgctccgccctggcgtgacgatgcactgggtgcgggttatggaagggccccgtccagctggagaagggatggccactcctaaccgcctggatcccatgtttgctgtgaaacccaaatgaaacatccagtgtccagatcacagtggtgaccatacgggggttcaggagagaggtcacggttggctgcagtgatgagagcaggcctggggagctggaatctgtgtgtgttggcgggggctgagggggtggggatgcccaggcagatgagcaggaagcagggatgatgattccagctcaggtggcaggagtgggttcaaaacccacccgtttcctgtggagcgctgcatggctgggagagggtgtggggctgcacacagaggatggatctccaggggcccgtggagtctggcttagtgaaccttgggtaccaggacttcaggcttggcatccgagaacaggaaaacgctgtcctctgcaggtgctgggctgtgccatggagctccccgacgtcagctgcaggcagcttctgcaccggctcattggcttctttcattttcacaatgggcccatgtctctggcctgcaaggtacgaggagggcagcggggaggctcacgtggaacctctttagcaaaactgacactgccagggcacatccaggcatcgggaaccctttacacaaacacgacatgtcagcgacagggtcatgggcccccggaacccctcccagacgcctttcttccctggtggcctggggcccattcatccaccttctgtcctctccttgcctgggggtgtgggcaattcagaagatgccctccctgccagccgggtccgtgtgagggacagttctgcggggggctggagtccccactggagcgcgagtctcgggatcgcgggtactgacgccggctgttctgtttcagagctgcccgcgggaagaactgcgcaccgagtgggacacgctcatcgagtacatcctggggaacacgggcgacctgcacaagatcttcaactgcctctggcacctggaccgaaccaaagtaaccggctcggcacccctgcccgctgcatgtgtggatgggaactgggcttctggacgcgagtgcttccccttcgatgagctgtccctctgtccccatggctgttaagaatttaggttccaggcagtgcttgccagccgcgtgggctaggaccagtcaggtcacctgtctcagcctcgttctccttacccatggtggcgtgacacccacctcccaggactgttctggggctgaaactgggacagttacgtaaaggacagatgcccaggaaagagtgttattcctttgttaatgcccagacgtgctgaattcagtaatctgaaggcccccttctcagcgttatcattagttattctcagcatccagaaaggcccagggcggccactgtctgggacaggggggctgggcagggtctgtccctgagctgtcgcctcggcacatggagacgggaggccacctgcactgctgcgggctggtggcctttggccttggcagacgtcacatcctcaccatcacagcggggggcagtgtgagcggtgctatgaggagccctgcccgtgccccgagcatcttgggagtgggaccttccaccatgcgtggcctggctctctgcgggtggggaccgtgtccctgtccctggggtgtggcactggctcgatgctagaaacagggacgggttttcccgctcctgtttggagggcttcttggaagttggcccagagcgttccgaggggctgtgaaggaactaaccacccacggtaagggctccagcgtggctccttaacactcagtgctgactgctcccgggtaccgcaggttccggctgccaggcaggaacctggaggaggctggtggccactgctggcccttcgtgggcaggttcagatcctctgcctgtccctttagggacttttttataaggaccgaggaccgagacgtgcttccctgtgtgaaagactgtgatgcttccatttcccttctggctgagttaggggaccgggtcagacagtaagccacctgccacagggccttgggctgcaggggagggtgggttcacctgacctgaatctgaggggcgggctctcccctgcggctgcctcctggtctccgcgccaccgatcagggcctccttgacgatgtggacggttgcctgtgaagagccatatgcccagttctctctgcctcccggcttcagggaggcccccagtcccaagcagctggcgttttgtggtggcagctgtgcaggatgtcagaggcgtgacgtgaccagtgtgcggcatgccctccgtccgggctcgggctcccagcgatgcgtttgccctccgcagccccctgcccgtcccctcctgcccacaggggcgtgccaactggggcttgcctctcgccccacacaggtggagcccctgctcctgctcaaggcggccctcatcctgcagacctgccagcgcacgccccacgtgctcgccggctgcatcctctacgcgggactgtgagtagtacccccgccccttctccctcatccccaccccccgctgcagccctgaccacccggccacctcctgatcggggctggggagccgagagctctgtgtgtggccagtttcagccggtcttctttggcaactcgagggtagtttagattcgattgaggggccgtgcctgtccctagggaattggaagctgttgtgtccagagaagaggtaggagtgaacaaggcagctttgcagagatccatgtagctctcagctgggccatgcctgcggagtggtcggtctcccgccctgaccaccgtcaggagaggggtatgaggcccatggcacgccccctgctgcccagggccccagtgtaccagccgtggctcctgcttgggctccggcagctgtgtggttgggtctccctcgggctagcctcacagaggtctcattgcacctcttcgcctggctggagggcctcttagagagcctgggagcccgccatgcctcctccgggcctcaaggaggcttggccatcccggtcagaggcaggggagctggtgctctgtgtccagtgctatgatcctggagggatgtgccctgaagaagccctcctggcaccttaggaatattcttagtacaagtcggtccaagcatttcgccatttaaaactgatggggaacagccagagggcccctgtgagtgcctccccaggtgacactcccaccagctgtgtcccccagatccgagctgctgcgggtgctgggactgtcttgatgccaggtcctgactctgtttcttctctggtgttctggttcctgtccaggatcgtcagcacccagctcccgccctccgtcacggccaaggtcctgcttcatcacgtggcacatcaggaccaggtatcaaacccctctccccgagcaccctccccccggcggggagtctcccccagcgagtctgtctttgtgtcgggcaaggctgatcaccagcactggatggggcaggggggcagggggctgccatgtccttcttaggacccccgtccatccgtgtggtccccctcaagtgaggtcctggcaaagctggaagaaaatgtttcctcctgcgtggtcggcttggatggttggtttttcttccatccaggtggaactgtgagaatatggcttcccgcagggtgggctttatgtcaaagcaatgttggatttttttcagagagagactgtaaaagacggcttaggacgacagtggcttttaaaatacttctatcttatatttgcctaattgttttcataatgaaggaaaagtcataacgtgctcattgagaagaaaactgcccacagctgggccacatagagataatcacctctagcttcacttccttgagctcttttctcttttgttttgcaagttgattcttagtgtgtgaaactggttttaaatctgtcggaaggctagctttttgcacttgctatgtcagcagacatttaaaaacgcacgtggggctctattccggctccttctcactgtggtgcaggtggcgtgagaacacccctcctggtgaactgtctgataaggagagggccgaaggggtcttttcctttttcccccttgttcagctccgagaatcaatactaaggaagtcatccgactgctggaaaaggtttatactcaaaactcttgtcacagtaagatttatgaaagtgaaaaatcagattatcacttagacatctaaggtaggagctgcctgccatgttttcttggcctgctttactgccacggctgcagcttgagtagctggacggagacctacagccgcagtgcccaaaacactgactggcctgccctttccagacaggttgctgatggtggtctcaagtcagggagtgctgaattctcctgcaccacggtgaacttcctatgactttagtcagccgttaaaaatggccgaaggtgctctcatgacagaaactgtgagtccctttttcgagcagagaaatagaactttatgtaatgtgtgctcaaagtattttaaaaatgcacggactttacaggaaaatgtgcctcgtgttcacaggattggcttgtggaagaggggattctgtgtgatttttttgaaaagaatttttgtctggagttagcttctgtgaaagaaaccacatcctttcagaggagggcaagtcattttggctagaagagcagtttttggttttcctcttgctttgctgggtcctttcggtggagacggccggaaagctcttttgaggagattccccgggtttcccgccttggttgtaaacgcagaggccagccagcctcgcctcgggtttaggctgaggccttcgctgtgagggtcacaggcccctcacgctgctgtcacaatggggcctgtgtggacttcagccagggctgcgggagacgtggccgtattctgggagatgacttccctgcaggtctggaagcacaggaacacttgctgtccttccccaagaggaggaacgagaggttggaaaggggggatgccggtatgcgcctgggtggcgtggccgccttagccggcgtggccgccttagccggcgtgaccccagccccggcggggagcaggcagcctggggggatttgttccatccgcgttgctgtgggcgagcggctgggcccagcacccgggcctcggccacgtttcagggacagatggcagcatgcggtcccgatgggcgggtcagggagagcacgcggtgccccgcaccgacacctgtctgtttattttcagaggaaacctacgggaggggacgccctgcaggaatgtggtgagtagacgggtgtcctgccacggtttggaaatggcctgtaagcagcctggccctatccaagtcacgtggaaggcggagcagtcccaaacagttatcctgtcggctcgtgagatcagggaaatattaacaacgctgcaagggcaaagttactctcaaaatcccagttgtaaagcctctgattttaggcacagcttttaaatcctccctttcagctcctccttaaccctcagcaccatgaggctgctcagacgagttccaaaaggtgacaatggggagagggtgacggcagggccactgccaggaagacctttggcagcagaggggggtttagtttgaagcctaagttcgggcagacccctttggtcagttagaagtgcttttgatccaggttctgtcttaagtgccggtcagttttcttccaccaaacgtcactctgggagcagagtggcccacatgggctttcccttgctgacagcagaaactgtagctgcagctttgtggcttctgttctggggaacggagcccagagctgcttgctgggctggcctgcgggctggaggcatcatgccaaaaacacttcctgccccctcttctctggcccagagagggccctgaccacattgctctgcacttctaggagtggcgctccctcccaacgttcagatcatgcctgttttcctgactgaagaggaagccgccagtctccgcgagttcccctgggagcccccagccaggtaagggggctcaaaagaggctgctctgaacccacatgtcgggcagtccctcccaggggctcatccagaagccccgtgcatcccatcctctcacgattccctcttctccacgctctgccctggcagggggtgggggtgagggatggacaatcggaccttcagcagagatgaggggcatctggcagagtgagacgagcgtaggtttcagatctgagatccgtggcttacctgctgtgtgaccgtgggcaagtccattccctgcccgagcctcagtttttccatctgtaaaatggatccagtaatgcctacgtcttgggttcatcgtgaaaggtgaaaacagcattcgtgcagcgcccatataggacctgactcgcaattaagccccagacctgggtgcctctgatccagggggctctgccacttccagcagtgaccctggtgttaccgtgtggcagcacatgtcaccagtgcctgttatttgtaagggagctgctttagtcccccaggcagggccttgaccacactcaagtcgtctgcccttcctcaccagcactccggtgcctccagccagactccaggagccttcagccgctctgaaagaaaacgcccccggacacatgggctccaaggctcagacctcaacgaccacacctgaacccccgtctcctgatgccgcctgggcagatggcagcagggagaacggacactggcccggccctgacctgaagatcacgctgcccgcgatgcggcaccgcactgctgcgggcaggggttcgggtttattcagggggaatgaggacctggacttgtctgaaatccacatcccagaggctcaggaaacagaagcatccccgggccatcctgctgcagatggcgggggttctggttgtgaggaatctgtccacaaccccagcagtcccggagccaagccgcacggggccctgcccctgggccgcctccctgcttccgctcctgaggtggtcccccagaacggagccctcgagcagcccgcagaccttcctggcaatggcggccaagcccccgtccccagggaagaccacgtccccagcaggacgagcgggcctgggcgggcaccttgcttggttttgaggcagaggggcactgaactgcccccggaggaacatggtggagagcagcgccgcagtggggctcccaagggctgcttgacccccggcccggactccacagacccctcagacaaaggcccctctgcagacagaaccgcgtccagggtgagcccggcctcctgcaaggggctcgtgcggatgaacctctacacacacagcgtcaagggcctggtgctgtcgctgctggccgaggagccgctgctgggggaccgcgcggccgtggaggaggtggtgagtgtgcagcggggttgggggctggggcggggtcgggctcagccgtcagctgcacggcccagtacaaacgcccttgtttatatggtggggtgcagggagtgcccacctccctgtttgtgggcggtgagcgtccagtgccaagcacagagccaagtgcaaaggcagccaccagggctgccctctccagcgtccccactttctcggggtctctggttcgtagtgacctgggagggtgctgggcactgaccacacatggcctcgcccccgcccggcagccctcacatctctgtgtggccagagtctgcacgtgttaccacctgggttgggtttctccacgagccccaattcctgtccatctgaagctccttcctaggagcctgggccctctgaaatgctgactggctccagaaggcaccactcaaacccatgcagctctccccccacgcctagaggctcactgacctctgggctggggtccatgctggatgcagttgccatagtaacagccctgctttagttgccagggaagcagcggaggtaagagcagctggttgagactgctgcagggcgaacggcgtcctggggcctgccgtgtttctcttcttcaatctgtgttgtgctaagctcatcttattagcatgcagggcccatgaccctttgtaaaggagcgggtcccccttggagtgcagtggaggagggaaggcgggtccctgcactgagccctcccgcacctgcctggcccctctcccctttccccaggccccaggtcaccctctccacctccatctccctggctctgaccaacatcccccccgccccccgcctcattgtaacagctcggggaccaggggtgcagttccgcacatccatcctccccctccccccacaccttggtctcatggtctgtttggcttagcgcccagctcagatgaggccccccaagatagaaagaagaactaccacaggctgctcagagagaaggaggtaaattagggttcatgctacatttgctgtatgtaaataatttacatctgctacttctaccaagccttgaacagcgctggggcccagcacggtgacgcccatctcgccctgaagtagcgatggagacctagctaacgcacggggcgggtccacacctcttgcttgtttcccggcccccaccccgacccctctgtcccccgtgggcctgaccatggcccggcaggtgggaaggtgaaggactgaaggcctgccttccatggccctttatatgtggacatggcacttggtctgtcacggcccatcctggtgtcaggacaatgacttccctgggctttcatggacaggacggtttggggtctgggaggagagagaacacagctttacagaaaaggagaaccagtctttcctaaaaagagaagggtgtaacagactttgatcagcttgctggtttgagaggggagtcggttgatcagacctggaggccgtctcctttataactggcagagagctttcactgccttttggtcctgacctgcacacaaaacagttgacctgatttccccccggactctgctgctgtcagaaaagctaggccccaccccccccaccctcccagccgggtgcacgacactcagacgtgagcgtgagcacagtccccccgggtaggactcgtcgccatggctccgtgtcgttttgccatcacgtctttgcgtggaccagctgccaccgtttctgcttgctgagggtgggtcagggccctgggtgaccggggtgagtggggagcagccagggagaggtcccccctggttcagagggaacagagtcggctcctcccaccagggggcagcagagagccaccgacagtttcctgctcagaaccctgagatcatctcagtgactttcagccacagtgatgggatcaattattcattgctacagcaggatggggaactgtgagcgtagagcagacgaggcccgaggttagtgtgttggcagaaaatacgaaaaaccttcctctcccctgaaactcgtgcttctgagtacatgggtgtccctgcagcgactcttccgcatgtttgggtgtgcactgacagtgagccactaacttagctgtggactaaaaggcagggggtcccggcacagcctcagctccgtgtgctctagtgtgttgtgcaggtcatgtatgtggcagcgtgtcttggggttggcaaactctaatgtgaagggatacacagcagatgttttctgctttgtacagcttttcccctctgctgttataatacaaaaacagccatgaacagtatgtaaactggggctgtgttccagcaaactgttatggacacaaaaattggaacttcatatgatttcacatcacaatattattattttgactcttttttctaaccatataaaaatataaaaaccagtcctagttgtcaggctgtaaaaatggtccacgggccatgtttgccaacccctggtctcctcctggacactgcctgtcattcacacctgtgactgagtcacagcctgcagctgacggtgcctagttcacgctcacagtccagtcaccaagtggctgtggaccgggcacctcctgggagccaggctgtctgctgggccctggggacgccgcgtaaaccttgtagccagacctaatgcctgagtttcatttctgcaacatgggccagaaatactaatttaagtccagggtgctttccaagatgacgcctgagctttctgacattcacctcagaacattctctctgcatcactgagcctttttattgcgcatagtgttttgcacagctgttgtgaaataagtcagcccacagacacatcttgttagtccagggacgggtgctcgtggaagagagagcgcttcttcaaggacgatgattttcatattcttgacttcaggaaaacgcctccctccagggagcactttagaatggacagagtgtccatatgttatttgacttccgccagtcagcagtgatattcctgttttacagatgaaaagaacaaggtgcaaaaacctctgtaactggccctggtggtctggctaggaagaggctgagacacgggctcgttcacctgggcactagccactgtctccttgtgacttcagtagcccccggggcggccccatggggccctatttcaggtccatcgggtgtgacatccctgcttgatgggccccagagctcagccgttggtcattggaaaatgtcgttgtgggaaaacagattgaagagggaagttcatgctatatcgttaggtcgcaaaactagcgtcagtcgttgcttacagtctgacgcccatctttagcttataaacaacgactcatacgaaaggggacagtcctgtgttcccacggcacctgcacgtgacatcccccccagaggcgatggaacatagaggtgcctgggcctcagccctgcacggccttcttcccctgggtcctcccctgggccagtgagcggagagccgcccgcccacgcccctagctcctctggggttcccgggagggagggggcgcgctgcacatgcggatgacgtcatgacgtctcagtctggctgagacgcgccggtcaaccggcgcgggcggcagcgtggtgaggagggggcgggccgcctgccagcagctctgcctggatgctgaggttctgggctgttcttcttagcttgttttcctttttaccgcttcttttactttttggcttccctctatgttctcatttttctacaagtttgaaaaggtctctctgtggtggctcagacggtaaagaatttgcctgcaatgttgtagaccggggttcgatccctgggtcgggaagatcccctggagaagggaatggcaacccactccgttattcctgcctggagaattccatggacagaggagcctggtgggctacagtccacggggtcgcaaagagtcagacaggactgagcgatgaacgctttgaagaggtttaggacctcagggcagaagtcgggacctctccaaacacgggtcctagcccccgtggcgctaagtcgggcggccaggcggctctcctcgggtggcctgctgagtggcggcggcctgtcccctcccgccccgcagtaccacggcagcctggcgtccctcaacgggctggaggtgcacctgagcgagacactgccccgggaccaagcggcccccgcggtcagaacctacagcttcgcacactacgaccgcgtccagaacttgctagcaggtaagggccgcctccaggaagtgggtgaggggtcagcacccgggcccagctccctggctgggcgggaggtaccctgtggtcaggatgctctttctctctcggagcccagctcccaccgggtttaactactctcggcaaactcttcccggctggtctctttctagccctttctccagtgttttgagagaagcacccgcgtccagactgatggggttgcctcccgacttggacccgcgtgtgccgagacaagtgctgaccaccatcaggggcggtgggagggcccagcaccgcggcctctgtcccgctgcctctgggcacccacgctcctgcctgggggggcctcacttcatcccagcttttggtggttctgggtttgggtgtactggggggcggcactctgccacgcatgacgacttccgtgtcctcttccggaagccaacctgccgcaggtgaccacagcgcaggaccgccgcttcctccaggctgtcagcctgatgcattccgacttcgcccggctgcccacgctgtacgaggtgactgtgaggtgagtgtccccaggccgcccccagcccagcacccggggtccctggcagagcctcactcacaaccagatgaagaccagtgcgaggactggcccgggccttcctgacccgccctgcgggctgctgtcatccaccctcaggcttcccggagtcctgtacatgctgggtcctttctggggctcgggctgctccagacactgagggacagcagggaggggacccaaggccctccccgtctcggtgtttccatcagtcactgggggcggaggaggggctgtcgtctgtctgccaactggataggtcccgcgtgctcctgaccacaacatccagatgtccccacctcaaaggtctcccaagggcagcgtgtcctccccgcaccagcatgtgcccccggatgctcacagtcagcagcatggtgtatcacaccccgggttttcttggcgttagttgggttttttttgcacataagaggtgctgctgctcagtccctcagtcgcgtctgactcttgcgaccccgtggtctgtagccaccaggctcctctgtccatgggattctccaggcaggaatactggagtgggtcgccattcccttctccaggggatcttcccaatacagggatcgaacccctcatctcttgcattggcaggcaaggattctttaccactgaaccactggggtagcccatataaaaaacatgatcagtattttttattattttactggtctgtcttcttaaaaaaaacaaacaaactggagcacatgcacttgctgttttttaagttcctttttcactttgttgcgtctcttgaacaccttcaggccagcagatctagacctgttaattagtggcatttacagtctttaaccaactaaactctactttttctctctacatgcttctcttatgaaaccagtagcagaaaagaaggcaagttagaggatcagaaggggagtgcttgctgtgtgtgtggtgtgtgtgtgtactgtactctggagtgggttggtcgggtacattctttgtaacctcatttcacagacaaggaaactgagacacaagtatgcagtagggtgaatgagtcgccccagatcagaggctgagtcaggatttgcgcccaggtgtctcgtctccgtggcgtgcgccccgccacgcacgcttgtggttggggcgtgcgtgcgtgcgtgtgtgtgtgtgtgtgtgtgtgtgtgtgcgcgtgcgtgtgtgtgtgtgtgtgtgcgcgcgcgcgtgtgtgtgtgtgtgtgtgtgtgtgtgtgtgtgtgtgtgtgtgtgtgtgtgtgtgtgtgtgtcagtgtagttgagaggcgggctgtggggcgtgggctctgggcctggctgaccaggttctaatgtctgtcagctgccacacaggagtgtgggcgtttctgctgcccagcgctgtctccagccaatatttctgtgtatctttccacaataaatgtgcctcctctggctttaagtcagagctgcccacgctggcaacccagacccaccccccacttgtggacctgcagcgtctcaccttcctcggagctgagacttttcatggtgggatacgtagctcatctgagtaacagtaatggaaacaacagcctccatttctgaaccatcccaccatgggctgagcgatttgtatccattcctaactcatttactccgtgaagtctcagtgagggaattgactgctgtcatctattcttctgatgagaaagctgagactcccacagccagaagtctcagggctggggtgagcacccaggttgcgtgggacctccagacccgtgctcggaaccctgaggcaccccttctctgtggccacagtgactgggcccatgcttgtcctgctgggccagagacctcgcggggtctctggggtctgagatctgcatggtgccagactgtggtctcctctctccgcccccgaacaggaacgcttccacggctgtatacgcctgctgcaaccctgttcaggaaacctacttccagcagttggccacagcggcgcggagctctggcttcccgaacccgcaggacggtgtcttcggcctcccaggcaaagccaaacagaagctgctgaagcatggagtgaacctgctctgaaccgtgggtcgctcctgaccctcgcggtgcctctcaaatcaaaccccagcaaaggaagtgccgtcttgttaagtggaaagcccctctattttacttttcctggaatagtcctctttggggactgcagtttttgagtgttactccttctgtggatcagggctggagggggtcgttcctcaggttggcagacctagagcttgtggtaagaacttgacagcgtgggtggtgtgggggccagggtggggccacggctctttccaccccaggggctcaggtcagtgactcccccattacacggaggccggggcgcccgacgtttcctggggctgctccaccccagccttgactcgtatacagagactgaggctggtgttccttctagaacgccgttgtccctggtctagagtgcgtgtccctcgctgtctgcagggggtgggtctgaggtgactgcacagccaggagacggatctgtctgtctgcaagcacaccgtgcgcccact

SEQ ID NO: 172 - DNA, 46959 bp, Hippotragus leucophaeus
  source 1..46959: mol_type = genomic DNA
tgtcagctcatcacccacccgtccacccccatttttcggtctaaacttaccaggtgggagacggccctgggcagggactaagttactgcgctgtgtcgagtcgagttccgctgagcttcttagagacgctgcgggaaagaggctgaaacccagtagccgccgccaccgccaccgcctctgttaccagggggtctcgcctccatcgctggctgcgagaactctgagggcacgtgaccggaagtacgaaggcgggcctgaggggcacgtgaccccagagcacggccgccatgacaccttccgctagttccctccctcctccgccggtgcccgcctgtttcatttcctctcgccggctttaagcggtgagaggtcccaggaacttggctgtctcacccctttggcctagagctcctccggtcccgttcggcgctgcgtcttcggccggcagcgggcaggccgcagagagcgtaatcgcgaccgcggccggagggggagggaccacgcgcaagcagggcgtaacccgtcacgtgacgaggaagtaccgttaacagctttgtcccggcgtccccggcgctccgggatgacgtaagcctgggaggggaggagtaggagggaagactgaagctcaggtgcggctcttagcgcgcggtaagtgtgcgggcgcctaaccgggagagaggctgtgacccacacaaagtggggggctgccggcctagaggtggtggagaggggctgagacttacaggctgtgagcctggctttgaaaacttgattaccgcctcttctttcaagagacctgaatgtagtattaaagttaactgctgttgagttaggagttcgcgaggcagggagctagcttgtggtcagatgtctgcaatgatgcgtgcaagacatgttgagtgcatgagtgagtgagtcgccatttcttggcctaaggtagagaggagttctctattacttgagtagtagttgttgagtcactcagtcgtgtccgactttgcgaccccatgggctgcaacacgccaggcttcgctgtcctccactgtgtcccagagttagctcaaattcatgtccattgagtcggtgatgctatccaaccttctcatcctctgtcttcccttctcctgccctcagtctttcccaggatcagagtcctttccaaagagtcggctctttgcatcatgtggccaaagtattggggcttcagcttcagcatcactccttctaatgaatattcaaggttgatttcctttaggattgactggtttgatctggctgtccattggactctcaagagtgttttccagcaccacagttcgaaagacatcaattctttggcgttcagccttctttatagaaagatcccattatgaggaaatccccaacttccccttggcataatatctttaatttttcttccttttccctctctcttgccttttcttccttcgtcgcatctagtggggaaaagagaacgctgtgatttgcgttgggtgttcgcacagcaaacactggttcagtaaaatgagtactaggccgagagaaaaacccatttttgatcctattgctttttatgttgccatcaagcaataggggaaatggaaaggtaattagatttggactcaagattagtggattttagtctcacctctgcttatgagctctgtgacctttagtaaacaagctcttcaaaaggttttttcattgactttggtaagcatttatggccaccctctgtttgcttagtgttttgctaggctaactgtgacagaagtaatagttaaactcagttttgtggacagaccagtttttcttatctggaggaagattccagaaacagtatatattaaaccatggaggcatagaaagtttatatagaatgaaagatttggacagagattcttgttaaatatttacttaagtcttgaatacatatatgtgtatgactaagtcattttgctgtacccttgaaactaacacagcattgtaatttaactatatgtacctcaataaaaaatcttgtttagtaaaatttcaaacacagacagaatagtacaatgaaccctcatgtatacctaaccaaactttaacaagtatcaacattctactgttcttgtttgaacagcttaaaaatttcagggtactttttatatccattgttgaatttgattaatagcagctttcaatttgagctcaattctactgtatctaggtactaagttgtctccaactctttcttgactccattgattacagctccccaagcgcctctatccgtgggatttcccaggcaagaatattggagtgggttgccgtttccttctccaggagatcttcccaacccaaggatcgaatctgtgtctcctgcattggcaggcgtattctttaccactaagtcaccagtgaagcccaggtactagctaggaagattatattaattttgtttgacaatttctttgggtgttagttagcttcttcctctgttgaatcagaagtgtgacatggctattttaaaaacacacctggaaaaaaacacacaaaaactgcctctgatactattttagaacgtaatattgaaacttagtgtccaggtcaaggaagttagtgtttctactctgttctggttattaacctactgaagagttttatgttcagttctggacaggacatgttcaggcacactaaaggccctgtgtggaaggcttaccagaactgagaggaatttggaaattgtcaggtcagaatgagtgaagaactggtgttgttaaatttttagaagacctcatgacatttttcaaatactgaaggactgttttgtatggcgtaaacatttccttgagcttcccaggtggcactcttggtaaagaacctgcctatcaaaatgcaggagacataggtttgatccctgggtaaagaagatcccctggaggagggcatgcaacacactccagtactcttgcctggagaatcccatggacagaagagcctggccggctacagtacatagggttgcaataagtcagacactactgaagtgacttagcatgcatgcagacattttcttaaactgtagaagccacagttgggaataaaagttccaagtcatcaggtttcagcccagtagtaaagaagtaccttataatggtgtgagctgtggaggagtggactgtgcagcttcatgagagggagcacttcctttcccttcctgaacatgttcagggatccagaaccttaattcagattaatttttgaattatgtggatgtgtgcaccgagttatctatgagtcttccactttgagatttatgagaactgggacttattctggacctgaaagcctgggaagattttggtaagtaggtctgggaggtaaggagtctattcagagatagtaagcgcagttcagttcagttcggtcgctcagtcttgtctgactctttgcgacaccatgaatcacagcacaccaggcctccctgtccatcaccaactcccgcagttcactcagactcacgtcaatcgagtcagtgatgccatccagccatctcatcctctgtcgtccccttctcctcctgcccccactccctcccagcatcagagtcttttccaatgagtcaattcttcgcatgaggtggccaaagtactggagtttcagcttcagcatcatttcctccaaagaaatcccagggctaatctccttcagaatgaactggttgaatatccttggagtccaagggactctcaagagttttctccaacaccacagttcaaaagcatcaattcttcagcgctaagctttcttctcagtccaactctcacatccatacatgactactggaaaaactatagccttgacttagacaaagctatgtcaaataatacaagtaatggcaaagtaatgtctctgcttttcaatatgctatctaggttggtcataacttttcttccaaggagtaagcgtcttttaattttatggctgcagtcaccatctgcagtgattttggagccctccaaaataaagtctgacactgtttccactgtttcaccatctgttttccatgaagtgatgggaccagatgccatgatcttcgttttctgaatgttgagctttaagccaactttttcactctccactttcactttcatcaagaggctttttagttcctcttcactttctgccataaggatggtgtcatctgcatatctgaggttattgatatttctcccggcaatcttgattccagcttgtgcttcttccagcccagcgtctttcatgatgtactctgcatagaagttaaataagcagggtgacaatatacagccttggcgtactccttttcctatttggaaccagtctgttgttccatgtccagttctaactgttgcttcctgacttgcatataggtttctcaagaggcaggtcaggtggtctgggattcccatctctttcatagttttccacagtttattgtgatccacccagtcaaaggctttggcatagtcaataaagcagaaatagatgtttttctggaactctcttgcttcttcgatgatccagcagatgttggcaatttgatctctggttcctctgccttttctaaaaccagcctagacatctggaagttcacagttcacatactgctgaaacctggcttggagaattttgagcattactttactagcgtgttggagaagctctatgtagtctacaaaaacaagaccaggagctgactgtggctcagatcatgaactccttattgtcaaatacagacttaaattgaagaaagtatggaaaaccactagaccattcaggtatgacctaaatcaaatcccttgtgattatacagtggaagtgagaagtagatataagggcctagatctgatagatagagtgcctgatgaactatggacagaggtttgtgacattgtacaggagacagggatcaagaccatcctcatggaaaagaaatgcaaaaaagcaaaatggctttctgaggaggccttacaaatagctgtgaaaaaagaagcaaaaagcaaaggagaaaaggaaagatataagcatctgaatgcagagttcaaagaatagcaagaagagatgagaaagcctttcttagctatcagtgcagagaaatagacgaaaacaacagaatgggaaaaactagagatctcttcaagaaaattagagacaccaagggaacatttcatgcaaagatgggctcggtaaaggtcagaaatggtatggacctaacagaagcagaagatattaagaagaggtggcaagaatacacagaagaactatacaaaaaagatcttcacaaccaagataatcacgatggtgtgatcacttacctagagccagacatcctggaatgtgaagtcaggtgggccttagaaagcatcactacagacacagctagtggaagtgatggaattccagttgagctatttcaaatcctgaaagatgatgctgtcaaagtgctgcactcaagatgccagcaaatttggaaaactcagcagtggccacaggactggaaaattccaatcccaaagaaaggcagtgccaaagtaagtgcaagggaaggtataaatttggaatggtgtaacactcttacccggagaaggcaatggcacccaactccagtattcttgcctggaaaatccatggacagaggaggctggtaggctgcagtccatggggtcggtaagagttggacatgactgaggacttcactttcactttttactttcatgcattggagaaggaaatggcaacccactccagtgttcttgcctggagaatcccagggacgggggagcctggtgggctgctgtctctggggtcgcacagagtcggacatgactgaagtgacttagtagcagcagcagcagcaacactatcattgggcttccctgatagctcaagatggcaaaaaatctgtgtgcaatgcaggagactgagtttgatccctgggttgggaagatccccaaaagaagggaacagctactcactccagtattctggtttggaaaattccatggacagaggagcctggcgggctacagtccatggggtctcaaacagtcaagacatgactgagcaactttcactttcactaacactcagcaacttcacttgcgaactgacattgtatatgctgttccctttttgttctcatctccattgaagtctttttaagagaaatagaaactaggttttttacctgattaggtcataatttccaggtcattctgtcttcagtgagatcaatgccaaatggtctatccatatcagaatttaaatttgcaagtggaagagatggccactgtggtcttgatgtcattcctttctatcttccttaggaccttacacagtgattcatcttctttttcttgtatcttcagtccctatcattttaaattctgtttgagtctcccctgctcataaggtcaagagaggttttctccttctcctcaaaatgtcttgagtaactaaaagactttatctttagtttctcacttctaaccgcttttcttaagtccttggtttctagtgtctgcccacagcactttacagaaattatcttgtctaccagtactaaatccttcaatgtctttctgttgcttaccaaattataatttgttcaggttccttggtttgagattcatagtgctttgaaacttgtacctcaactaatatccaggtttatctttttttattccgttgcttgtatcctgtgtttcaaccaaagacttatattctccaaatatatcgtctgacttgccagtgcaggagacacggattcaatccctgagttgggaagatcccctggagaaggaaatggcaacacactccagtattgcctgggaaatcccatggacagaggagcctggtgggctgcagtctatggggtcgcaaagactaggacacgactgagtgactgaacaacagtaaatacttggcttcttgctgccttgttaccctttccatttcctcagctctagtgctgcttcccttagagaggtttctgtggttacttttaactcagtgtgatccgtctgtcctctgtgttccaacgtattactttgcttttgttccccttatgaggtctgtgtgtgtgtatgaggtgtgtgtgtgtatgaggtgtgtgtgtgtgtgtatgaggtgtgtgtgtgtatgaggtgtgtgtgtgtatgaggtgtgtgtgtatgaggtgtgtgtgtgtgtgtatgaggtgtgtgtgtatgaggtgtgtgtgtgtgaggtgtgtgtgtgtgtgaggtgtgtgtgtgtgtgaggtgtgtgtgtgtgtgaggggtgtgtgtgtatgaggggtgtgtgtgtatgaggtgtgtgtgtgtgtgtgtgtgtgtgatgaggggtgtgtgtgtgtgtatggggtgtgtgtgtgtatgaggggtatgaggtgtgtgtgtgtgtgtgtgaggtgtgtgtgtgtgtgtatggggggggtgtgtgtgtgtgatttgtctttcctcagttgattataaagtgctttctggaattattttgtcttgttagcaccactgtgcctcatattttactagaagcttttgatttggagaaaaacacaccagaattatgagtttacattttactcaggggcttgctgaggactttagcctgggcgatagccactcagttagctctgaggaaactgctctgaagaggtaggagagaagacagttcacatgtgaattttagctaggaaataagtgcaggcaagcctatatcttggtaaaagactactcctaatcataaagaatagattttagtgcttttttatgtatggggatatataaaaatctgaggtgattaaaattcttcctgggatatacatctaactatctgaggggcctgttgtcagcagcagcgggcctcatcctcttgacttaatttattctcagagtgccctggtggtcagcaactgcagcgggttgggacttaacccttgtagaactggatggtgagcagagctgtttgtctggtgatcctgatttttctgtgtcagtaatacttaataatgtgaatgggtgaaagaatgagagaaggtttttaaataatattttgagtataggagaactactaaagattttttttttccagaacaccattcttgcacagatcaagctgtattaaaaacagcattaatagcagaaaataaaactatgttatgtgtatgcagtaaaaagtattgtaagcttcgatatgtgttttgcccctggaaagtatgcttcatgaatgttaggacttgttttgtcctctgttgtatctgtgggatctaaaaggatgcctggcacatagttggtgctaagtacatatttgttgaataaatgagtgagtgaatacatgtgtttttggaaaaaaaaaaaaaacaccaaaaccacaaggtataaataattaaaaacaagtataaacaattatttctgaaattttccatggtatttgatttttattcttaacttggtaggtaacaaaagattgaggaaaagttaaaattaatgggtagaattttcttaaattctgtttctttttttctggaaactcgtataatttgacagaaacatacacttgggtgttgttgaacaggtaagaatgcttttgttagtttacaaagtcttcactgggtggttggcatttgctcccttgtattcttttgtttagtcactaagttgtgtctgacttttgcgatcccagggatgtgaatttttactcctgttttttcctatcaggtctgatactgaagctctcattccccttggtgtgctaattctctgcatccgacttcccacaggctggaggaagccatccagaggccctttcctgttaaacactgttgaattgtgggctcataaccattgaatgtagtgagagacttaaagacagatgctttacagctcaaagaattgcagctggagttgctattttgccacagaggagcttgacaaaatttttccttgtgttctgcaagtgtctattctatactgttagataaatagagtaggataggattatggagaaccttgagagtctggattttttctctgggagttttggagtcaaggaatgatacagtacaagctgactgtctcatataatgtcacttgtacatgttttctttccacctaggtgccaggcacctccagagcaggggatccttgtccctttctcatgtttccttgttttctccacttgttcctgagtccagacttgctctgctcgccgcatgacaggccagtaaatcggagacagaagtgttgaggcaaagaataactgcatttgaaaaggcagctgaccgagacaatggcagacttgagtctcaaaataaccatctcattggggtctggataccagattgttttataggcgtggggaggaaggtgaggaagtaaagtaaaaaggctattaatcttgcaaatatctcctggaatggccagtgtcagggaggagactgttaatttctcccttcctgtagccatccacaggtggagagggtcctgaagaaaggcattttggtttaagattcaggcagaggtgcagggttccttgaggcaggccattatgtatggatcgcaacagcagtggggagcaaaggttaaaaggaacagatccaacacggggtcagattttgttcttcgctgtaacacctgttcatttaatgcttgctgaaagagtggtgcgcttcttaaattctatttctgcaggttttattcaggatcactgtgcctgtccctcaacgtagtctcatctgtttgggtaaatgacttttgtgccagtgataccagagtcctacagccatgttcttgcagaatttgagtctctggatccattactttcagccctgagactggactccactcgtctaaaggtgattttcttgatccatatatcagttttattttcatattcatattttggtttgttctctgttacatgtgtgcacccccccgccaccccaaacattttttatgttttatagactcctgggtattcttacctgtgctgtaatactttgcatagaagtagtattttcttagcgctttcttgatttatttttcaagcagttgattgactccttctttcccatccttaaagatcatgatattgattactgaatccaccccctcccccaaatcttactgcgttccctcagaaagtaatgtatttgattgaaaataatgtagtttaaatgagtatacctcattgccttttgaacaataagaaccattgcagttctatgaagttcatttcaaaacaacgaatttgacgtaccccctctgtttaagggaacagagctaaaaattaacattacaaaattagccaaaaattagttctgtgggaaggactatgtgcttctctcaaactcttgaggtcatttgataaactcaggaatgacatggtaaagaacagtctcataaccaattcctcaccccagagcacccttctagcctctgagcaaaggaacaggaagtaataggcaaagtaatatgagcaacaattatgagggttgatagctgacatttttttagctgcaagttacagaaaatcttctcagtaatggctcaagcaataaatgtgtttataacctggtttgaggtcattgtttctgggtttagtgtggtggccactgatattccttaggacccaggctctccatctttcctgttctgctagcttctgtatattgaccgttggtcacatttgcaggataagcaggctggcttcaagtcttgaatatctccagtagcagctcaagtgagatggagctgcctgagacaaaggcttttttccccttcagattttaccgtttatctgagagggcagagttttccaggatgcccccacagggtttagtctcattagctagacttgagtcccagggctccccctagctgcagaagaaactgggtaagtgaagatttggattttccagcttctatggtagaaagaaacaagattgaagaggattgggaatatgtttgtttgccagtcagtaatttttaccaagtgtactaggcacagcatgcccactgctgcttgtggataaggagcggaaggtgtggggggacgtaatagtacagcgacttgtatttgcgtcatctacagtctcacttgatctcagagctgtgggttttctgtgctcatcatacagactagaaaggatttacctgaacagatggttaaagtggttgctttatcccttgggtacttgatcttccatcattgtggtcagcactggaatgacctagctgaattgcccagaagatgaactagccagtaactggcttctgccaagggggaaattactcatttgtacagttgagcctattcagctattttgagattcagttaaaaagttaaaaccgaaatgtcctttcttctgtgtctttcactattctacaataagagcttgagtcctgttggatggtatctaactgggcagtgggtaggctggtgaggaggagcctgacacagattctgagtatctttatttccagtagtgtgatttgctaagtgactgagagtctctcacttgtccgtttccatgtttccagtgcacgagcatagccgtgtcgcgaaaatggttggttttgggcagttcaggaggaggactcaacctcattcagaaagaaggctggaagcacaggctttttctttctcacagggtaagattaagggttgccctgtcatgtaccatctggagtatctgtcataaatgtgagttctccattgtaaatatcatttggataaaagaagaaggtaaaactggagattgagtagtaaattacccatttttgaggagctgcctaatactttcccttctgtgctctaggaaggtgcaatttctcagatcgcctgctgtttacatgatgacgattatgttgccgtggctaccaggtgagacactgttctgaaactatctgatctttcccagatgcatctgaaattgaaaaatgtggttgtgtgtttattagggtgaccaaccatcctggtgtgcctgggcctcaccctgttttagcattgaaagtcctgtgacctgggaaaccatttagacccaagcaaaccaagatgggcaattggcagttgataggatttgtggaaaacactaatataaggcaacatttctgagacctcaaagtagaaaggtaacataatttagaacctcagagttctctatttgtatttgattggtggactaaagcaaggagattaatatcgtggctttctacttcctcttttctgaagaataagaatatgcttatgtatttaatatagttgatactgtgatgcagtgaaattgtacctttttcactactgccaaaaatttgcttctgtgtctccattctttcagtcaaggtcttgtagttgtttgggaattaaatcaagagcgtcgtgggaaaccagaacgaatttatgtgtcttcagaacacaaaggccgaaaagttacagctctctgttgggatacagctattcttagagtatttgtaggtgatcatttgggaaaagtttctgccatcaaactcaacacttctaagcaagcaaaggtgagaaacagttcagtgctttgtataagtgggtgaatatataaggtattgtctcacagaatttctgttaaagaacacagtttgatctgtgtgtctttcagggttatctagagctcagactattaattttgagaaaacttgtttgcatgtaatatgtatggtaccctagtttatcttggtcgtgttgcagaatggctgtgagctaactttcataatttgcatgttgtctatcacattactccataattcacctggatggcccaattaaacaaagcgttctttaatagttggctgtcaagaaagaacagatgcctgtttattagttatgtgaataaaatggcagacatggaggaatggtaccagttgcccaggctcctagtctcctggtccccattttgaagaaattcttgagtgcaggtatactttctttcagaatagaggtaacttgtgaatggaatcttaaaggcactccctggattgggcttagcaatttgggtcctgaggcttcgtggaatgctctagtttgccgttaagacagcggacctgcttttcactgtcctccttttccaaagctgttacatcagaagtggggaacttgtctctcgttggcttatttccttggaggatcgtggcatattagaagagatctaaataccattgcctaattattcttttagttaacacatcagagtattcttgatgtgttaatgaaatattcacaatgacccatcacagttaccgcttgattcataacgtatttttcattgaaatacatttgggattcttagccctagtttgtctctttttccaagtggagaattactgtctactggtgaacagttctctcacatattccaaaacttattttgtctttttcattccaacttctaagaatagataatcataaacagagccttaagaattctctgcagttacgtagatccattcgttgaatggatgaaactgatagtctaacaggcaaattacttttggcctgtttaaaatttttgttttgctctctaagctgttttcgtttaaaaggtaaagagaggaggatcatgtgtatacagaaagataaattttattttctcatcacatcccctttaggcagccgctgcctttgtgatgtttcctgttcagacaatcacgacagttgattcctgtgtcgtccagttagattatttggatggaagactccttgtatcttcgcttactcgatccttcttgtgtgacactgagaggtacatttactaaccatgagtcattgggaatacagaatttcagagctggaagggacttagaagtcatctcgcccaatttcttcaattcagttatacaaatattaataaggaaccagctctgtgcaagttgatgttagagagcagagaggatattgaggagagtgaccgtagtccagtgggtgactaaggcacaaactcagttctaccaagaagcctggtctgagtgccatgaaggaaggctaaacaaaggcctgttcctgtatggggaatcagggcgtcttctttgattgagtttgttgttgttgaaattggctatgtagtttttttctttttttcttttgctggaaaagcaagagacttttcgggaaaggttcccaggtggagagcaaggataatggaacccaggagagctgctctcccacatggctcagagtctcagattttatggtgatgtggaattttgctgtgtatttaatagaattttactaaaaggtagaactgggtgaagactaagtaagaactttgtgaagctgacaaatatttactgaaatctcaaagatcaagccaagtgggcttccctggtggctcagaggttaaagcgtctgcctgcgatgcgggagacctgggttcgatccctgggtcgggaagatcccctggagaaggaaatggtaacctactccagtattcttgcctggagaatcccatggacagaggagcctggtgggctacagtccacggggttgcaacgagtcggatacgactgagcgaattcactttcacaagggtcaagccaaagggccggtgaatggcaaaggagtgtattggtagtggctgtgaaataccagaacaggaaatggcttgaaatgaataaatcttgtgtatcactgtgcttaagttcctcagccattctcactgcatagaaatattcactgccccccaccccgccttttcccttctagtagccttggccagctaccatattcctctgaacccatcccctcttttagaaatttattatgaagaattttgagcacacacaaaagaagagagaattgcttaataaacccctgtgagtctgctagccagcttcagtgatttgatgaggaggtttagtaggtgaagtttgaaggcagaaaggtaggaggggagaggctgttctagtaggaaggtgcagcctcttggggagcagcaagaaagaattaagcatattccaagatgtgtcctggcttgagatggaagttgctggggatcccgttggtaagtttgcaccatactgagagtgacagctgtaaatgtcactctaactaagtacatgggccctcagatcattttaaggaagtgtacatgtgaaaaatcagggtttgaagttggtcctcttagaactatccaggattggaagctttttatgtctttctaggggttcttctatctcgtgagaaggtgagaagaggttgcactttgttttcttgggatgagaaagacttgtggaaaggagaccagtaataggaggtggcaggtgtctggcatcagaacctaggtatacagctgtggagcaagactttgagacacaaagcatctgtatacctggaactagtaggaaggggaatgtacttggttctgacttatttcagtctgtggatcagtgatgaagttagacttacagaactggacatcatccaatgtcacccgttcacttttagcctagacctagtgagtaattgagcttgcctgacatcatgcagctggaggaggcagactagaatctttctgtcttgattttgtgccttttctgtacctcagtcacttctagtatatcctttgacattggaccttttggccattaaatctacccttgagattttgataaaatattagttaatctcacaaatttcgtaactattcttcatttgtggtttttgctatttactacacagtccagttcagaaatctgactgacattctgacaagtggtcagaccactggactgaattaacatcttactggggttgttttgagaatcttgtgaaatggtataaagaactaaataaataaagggaggtttatttttatctctgtgcaaatgagaaatgcttggttggatgaagcacaaggtggaatcaagattgccgggagaaatatcagtaacctcagatatgcagatgacaccacccttatggcagaaagtgaaggggaactaaaaagcctcttgatgaaagtgaaagaggagagtgaaaaagttggcttaaagctcaacattcagaaaatgaagatcatggcatctggccccatgacttcttgggaaatagatggggaaacagtggaaacagtgtcagactttatttttttgggctccaaaatcactgcagatggtgactgcagccatgaaattaaaagacacttacttcttggaagaaaagctgtgaccaacttagatagcatattcaaaagcggagacattactttgccgactaaggtctgtctagtcaaggctatggtttttccagtggtcgtgtatggatgtgagagttggactgtgaagaaagctgagtgccaaagaattgatgcttttgaactgtggtgttggagaagactcttgtgagtcccttggactgcaaggagaccaaagcagtcaaacctcaaggaaatcagtcctgggtattctttggaaggaatgatgctgaagctgaaactccagtactttggccacctcatgtgaagagttgacttattggaaaagactctgatgctgggagggatggggggaaggaggagaagggaacgacagaggatgagatggctggatggcatcaccaactcaatggacatgagtttgagtgaactccgggagttgttgatggacagggagacctggcgtgctgcgattcatggggtcgcaaagagtcggacatgactgagcaactgaaccgaatatagttgctaattcccatttcacaggattgtgactagagttggttataaggatagccaactgcaaaaataacatgttttagaaatgccttcttcattagctagaattcagtttgggggatcatggatagtacaataattaaaattttttatttatgttaaagttttgtttgtttcaagttatattcctttccaaacaaacacgtttttttgttcaaaccaaggctcccgataactgacccaagtgagatacgaggttgcttttcctacagctttctgtcagtgttgttaatgagctttactagaagaattatgtatgtgaaagtgctttgaagtgcatacagggcaatacaggaagttatggtttcattacttacgttccttatttgggaaataaaatacatttctggcttattttagttaatccttaaaactattcttctagtaaagctgatgttttgttttattcatgaagcaagttgagtgcagggtgcgtgtgcgggtgctaagtcactttagttgtgtctgactctttgcgaccctatggactgtagcctgccaggctcctccatccatggggattctgtatacaagaatactggcgagggttgccatgccctcctccagggatcttccctacctagggatcaaaatccctacccagggatggaaccagagtctcttgtgtctcctacatgggtaggtgggttctttgctactagcacctaccgttcaagtagacaccactgccacatgtaatgcggtgaatgctttgaaaacatggcgtgggaagcctgaaattctgcttgtaggagtcagagaagactgtcagaggaggaagaatgcaagttagctcatgaaaaataaaggagtgtttgggaagaggcatactcattgtcaccctccatgttctcaggcagttttgtatgtgcagttcttttatatatctagtttgtgtaatcctaagggaacggaatgttctaaggtacaggctttcagaaggagttagcgttttgaggaaagagtgaggcgtttattgggtatttgtgacagacgagtggcctggaggcaggattggagagtatcagtggcctccacggggtaggtgaaaaacaagatgagccatcagtaggatttaaggatgtaggaaatggtttggtagcactcatcttttagttttgaaaaagagccttcacattaactctgactgtggctaataaactgagtactaacctggagtgttttgcttcctataacagaaatagttaatggcaaatgagagttgtagccctgttttgatctttccattctgttgttcattccagtaaattgctaacatgaagaaagggaggaccctatgggtggggttcttatggccatgtggatttgcagtgccagtgcttttgatgtttctgtcagtaaacatgatttttctttttttgtggggggtatcagagaaaaattttggaaaattggaaacaaggaaagagatggagaatatggagcttgtttcttcccgggaaggtgttctgcaggccagcagcccctaatatactgtgctcgccccggctccaggatgtgggaggtgaactttgatggagaagttttaagcacacatcagtttaagaaactcctctcctcgccacctcttcctgtgattaatctaaggtaatgacttatatgttcagcaggaagtatttgaggaacttacatggggtgggggttgggttgaaatctctgacgttctatatgcatcaaagattttatcataccttttaagagtgaagtagaatttttaataaaagattcagagaaacctaaaactctttaatcagttattttttacacggttaaagcaaattgaacaagagcaaatgcagtgaactggctcttgaatttgttttgtaggcagaaattttcctgtgtatcgaaaaaggtacttttatattgtgattaaatcatgaatcgtgtttacttcctagatcagaacctcagtatgatcatacgattggatcctcccagtctttgtctttccgcaaactcttacatgttgggtaagtttctctctttgatccttaaaaaacaaacaaacaaaccaaaaacttattctgtttcttgttcagaggcagttagctttttaagtttgtttttgtactaaatcatttttagaaaatcaggaaatgactgtgtaaagtgctatatataagagggatggtaaaaaagcatagaaatacacttccctttctggtttgaactgccctaaaccacttgaacactttatagttgttgggtacatctgacaattagagctcagagctataggtacacattctttcataacctcccctccctggtgggatacaacaatgaaagcaagcctcagactgaaatctgctgcatatgtatatttcttagcaagtgcagaagtagttgtagaatttgttcttgtaaatgtgaaatttcagctccctgttctttaggtgctttgcatgaaaaatctgctcaagttggatccagccagccatattctaatgtcagagtttagctagctttctatttgggttaggtacaaaaaagtctactattaagtggtagcacagagtgccacttagagctgttagctgctgggcttgccagttcttaacagcttgttctacaagcatgggagtgagtgcccactgtatggtttccagtcagtctgtatgtcttgaacttctcttatttcagcaataggatattatttctaatatcccttaagctaattaacaagatcgttaatacagattcaggaaacattctgtagagctcttattgggtagtctggagtttggctcctgattgagttttttcaaagacaaactaacctctttttgaatgtaattaaaaaaacaaaaaacaaaacacttgaaatgtcaactaactgcccctaactaaagtatgtatatgttgcactatctccactgaaatatttggaagtcaattgtaaagagtgtaactctttgataaatccataattcaccctgaaagttactggagaaagctatttatttgcccatagatgaagcatattaaaaactctttctttatggcacttatcacagtttataattacacattcaaacctatgtatgcctatcttattcctagacggtaaggtccatgagggcttggtgtctgttttattcactgtgtttttttaagtgtttggcataatgcctggcccatcatagacacttaagcatttgttgactgtgtgtgatgtgttgggtgtaggcaagtcccttaccccagagtatgttttttaatgtaaggccacagtctgcttggttctcctggtagtgttagttttttgagttaagctgtttaaagctcccgttagagtcctgcctagttaacaaactcctgggtgatctggctctgcctactcctcagcttaagtaataattagtgccactctgaagcctttcctggctcctccagtggcttccgtcagacgcttgcccccttgctctgctgtcgcttttgttcgttcctccatcaccatcctgtctcactgtactgtgcatatccgtcccagcaccgcaccgttagctcctttactgctggcacagtgcttggcacatagaaagttctcaaataatgactaagtaaaaaaaatcagtaagagggcttgttgttactttttctccccatttgtgtcatgataactttcactgttatacccacgaatcccacaaggaagtcctacaaggaagcaaatttgtacacttaatttccttttcggtacactggtatcacattcctgtttttaacttaaaaaaaaaattgtatttatttacttggctgtgctgggtctcagttgtggcacgcaggatctttgatctgcattgcaggctcttttgttgcatcctgtgaacccttagttgtgcacgtgctgggtctcagttgtggcacgcaggatctttgatctgcattgcaggctcttttgttgcatcatgtgaacccttggttgtacacgtgctgggtctcagttgtggcatgcaggatctttgatctgcattgcaggctcttttgttgcatcctgtgaacccttagttgtacacgtgctgggtctcagttgtggcatgcaggatctttgatctgcattgcaggctcttttgttgcaccatgtgaactcttagttgtgcatgtgggatctagctccctgaccagggattgaacatggggcattggaagcatggagtctaagccacaggaccaccagggaaatccctcccttctttaactttttaaacaatgttgttaggcttgtgtcgctttctgtttattataaggggatgaaggctgtataaatgacaaagtctcagctcttatgtaagtccccctcccctgccccagcccataactatttctatggaatttttccaacctgagtatgaagttcagtatcaaaaccgtgatcctgtatccctgtattcaaggatcttctggtctgatttttttcccctctggctcctaaaggcaaccttccaattttagttttaactatggttctgatgatttctttcttctttgtgataaaggttacttttctgtagggacagtgatctgatcttacattggcaaagtgtttaatatttgtgtgatgacccagttcctattaaatatcactcttggttttgtaaacacctggtacctaccatttgtagtacacttggaggcataaactaaataaaagtccatgttctcaagatcataatttttggagagacatagtttatttctagaaagtgtttaacagcaatgaaaactaagagttgtgagcaatggctgagggctgtcacagaggatttcaaaggggagtaaagctgctgctaatccttgagaggtggttaggatgagaatgttatatatggagattgctttgaccaggaacaagaagtagggattaccaacggtgtataaaaaagcaatagcagcctggagagggtaaatgagatacatgagcaaaggagtatagaaggaaatgagccaagatggagagcgccagaggactggaaagggaggtggatgaagaagcagtgtccagagtctaggaagtgagattcaggaaggaagggacagtatggagggttggcccctgctgggggctcaagaaggaaaatgaagaaggaggttattgggtttggtagctagaaaatctgtgacctttcaagactataggtaagtggaatgttcagaattccagataacagtgggtggatcattgaggatcagtgagggtagcagtagattctatgaggtgtggagaaaaaagtccaggttttggacccagactccttgggataaatttggactcttgtatagtcatgctgaatggccttcgacatattatttatctctctgggcttcagtttttctttcttacaaaataggaataatgcttctatcttaatgagttgctgcaaggttagataataataggtatagcctttaataaaaacaaaaaaaaaacctcccagagttgactgggaattttcaaccttttattgcccacataaagctaaggacatcaaattatttccctccctaaaagtagctcaccagagcagtgaggaatggtaaaatgttatgtttagtctttgttttaaatgggccctgtcataccagatatgagaggtttagctattttaacaaacatcaggtaagacaccagcgttttatttttgtagaatgtatttagtgtatctgaatttttcccgttttggcatcatgttatgatatctttcagtgggcttttgtcacagacaaaagaggtgctaggacatgattagctgaatttattgttgggttttctctgtataggcagatcttgctttaatagctaacgtgagggtctgaattcagggaattataaacttctgagtccgagcaaactagaattctcttgacctcttccatgttttcttgcagtgagcattgtgtgttgacttggacagaaagaggaatttatattttcattcctcagaatgttcaagttcttctttggagtgaagtcaaaggtaattaggtttttttttccttatataatttttaattgcatggttgtgaaagatttaattattgtaggaggattctcttgcagtgttaagaagtagaaagtagaaagaggtgacattcttttaaagattaacatcataggtgtattccattgtaaggtacttcccaagtatacatttgtgaatttatagttagttattttaaataaaattttcatttattcttaagtattagcaaccactgctaaagattgaatgagttaattttccccttctacttacccttagtctttatctctgttagaaaacttgctttaactcttgttttgtggcttaataatttggggttgacatattggggaagccctgagttaataaacactcttcgtgtgcaaaaaacagggcggagggcaggggaggggggaatttgaaaagtccttgtgggaacaatagctattttatgtggctgaggcaaagactatccgtcgctgtattcttgtttaagccagaaatggaggaaataaatctaagatttttagtatgattgcccagagattgtatcttgacttacaagtcattttgtactttgtaaaaacataaaaaagataaatgaaccattatctcatgatctgatcaacattgatttcttgtgaattaagtttcctgagggtctcctgtgaaaactagtgttttagattctttcatgatgttctgccaagacaggtatttttttaggaacagtttgttgattaacatatgtgttaaagtctgtttattgacatcaaatttattactctcagaaatgtgatagtctggtctcaaaagtaccctcttttaaagtgcccttcttttcacaaaaaaatagcattttaaaatatagtgttttaggtcagacaggtattcctcttattcttgatctttttagaatagtgtctaaaatatgattttctctttgaaatgaaaatataaaaatagaggtgaaattcgatcaaaccaaactgtataaaatgaatttattaaagtaattttgtccagtcacaaaaatggaaaagaaatatttggttagcgtcctgcatgttcacccctgtggtttttgtagatattcacgatgtggctgtttgcaagaatgagctgttctgtttacacctgaatgggaaggtctcacatctctccctgttgtctgtggagcgctgtgtggaacgtctgataaggagaggcctgtggaacctggctgctcgaacttgctgtcttttccaaaattctgtcattgccagcagagtgagtcagtcagcttacatgttcatctgggttgttaagatcagtctggcttgcgggattatgctatacagttgcttatacttattagtctgcagggggcttcacaggtggctgaggagtaaataatccgtctgccaatgcaggagacgtgagtttgacccctgggttgggaagagcccctggaggagggcatggcaacccactccagtattcttgcctggaaaatcccatggacagaggagcctgctgggctacggtccatagggttgtaaagagccggagacaactgagcaactgtgaacagcacattagcttgcagattaagcagtaataaatccccaaaggaagcatgacctgtaagtctggagtggggagtgggggcaagaaaaaccgtacgtgtgtgtgttagtcacttagtcctgtcctactctttgtgaccctatggactgtagctctccaggctcctctgtccatgtaattctccaggaaaggatactggagtgggtagtcattcccttctctaggggatcttcccgatccagggatcaaacctgggtcttctatattacaggcagattcttcactatctgtgccaccaggaaagcccccaaataaaatttacccacaaatttattttagtttcaggccttgttttaagtgaaattattatgtgtacagtaactcttaattaaatgcttaattcctaagaaaattctcattaagtcttttactagcttttaaagcccctttaaagcacctttgaggttttatgttctatgttagacttctgtcaatgtattagcactttgaatatggaattagttacaaatggaaagctctcctattgggtttctacttgtttttattagggaagaaaaactttaactgtagataaattggaacacttgaaatctcagctggacttaacaacctatggtgatctagtttcccaactggaagagttgatcttaaaattggaacctttggattcagcctgtagcagtagaaggagctccatttcatcacatgtaggtattcgcacttttcaaagggttttgctctacagtgagatgttctccatgaggttgtcctcacttacttccaggatcccaaaacttagcttctttccagtgtttatactggaggggaggtggcgggtgtcaagagggggctttctttcagctcttggacagctctctgaagcacttctttgtgtgtgtcttagaactgtgttttgttttgtcattgtttattatatcttgtttgaaaatgtacattacgtagcctctggtacaagttaaattgcccctaatatgtggtttcagatgcttcatgttagcttgagtcttagggcagctcaggattgtctcgtttaatcctcattctccctgccaggcttggtggagactggctggagaaatctggtcgtgtgatgctgcaggcatgtcagagggacaggctgccaggcatcgagaccttgcttaccgttttgttctaataaaccataattgtcattaatgacttactgcttttattgttgattttttccttaaaagagctatatcatgttataaacattttaatttttctttaattctttttctttttaggaaagtttcagcatcttggactctggtatttatcgtatcattaatagtagaagaggcagtcagtcagatgaagactcttgttcccttcacagccaaacactctcagaagatgagagacttaaagagttcgcctcacatcaagaagaggaccagccagatcattgctgtggctcccagggaagtgaaggtgaggaaaggaaagtgtttttattgattgctgatgtgaagcagttattttctgtggcttctttatttttcctttacgaggtattaataatttttattaagttgatagagtttccatccagactgattgatctcttcaccattagaggaatgggtttatgtttagttggaatttttccctctcatgtttaagctaaatttggtaaagttcctaatattgatcttgtattaaagagcgggaaaggttaagagaggaagtcattaaccaaaagagtggaacaattttatcctgactaaccgaattatttttcattaggaatgaaaaattactacagttttgggggtcattgccttcacttttcgatgttcaagtattcctgtggccgaactcttgagaagagattaatagagactctaaacttcctttatgactatggggattcagggttagtaggaaaaactaaggtacctgtctgagtgttttatatgtggaccatcttgagcatcttgtaaacctgtgttccactcatttgtatttgggtcagttgtgattttggtattgaatcttttatttcttttggtttattcatttcagaatttctttaaagagtaaaaaactctttgtgtgattagattttgtttcttttccctgattccattcatccagatcacgtttctcacgcatccgtggcgcttgagacggataaaagtgaaacttttctccccttcggcattccattatcatttcgttctccatctcctcttgtgtctcttcaggccgtcaaggagaggtaagctcattagtcttgtcatttaatcccatttctggttttacttctgttgtcatgtcaggcatgtctgtgctgagaatagaaagacattttaaatgacttaaaaggaagtcactaggttatccctcatatagcctgttatgtgaagttgttaacttctcatttcagttttggggaatgtaactaccctcaagattgtttgagtagctggatatttgaattgttacaaatgtgcttcccacctcccccttctcccccagactgggcaaaagtttaaaaatcttttttccccctcatccttgataggaaaagtttccacatagcattagtcgtttcttaatcatttctcagtttgggctcagagttggagactcctcagaaatctttctaactactctgtgggcctgggattgaccatgaaagagaagactttgtgccagggctgctaaactgagttctactggatacatatttgctttccaagaaggataaatgtgacagattagcagtttcatggagaaattctatggcttaggatgatcacatgcagaaacattgcaggcgcagctggaattaaagaccttttctttagggctgaatcaaagtaggttagtaaatgatgtgcatcctttttatattataaaacttatgtgagccttatgtgaaatatgtagtttggttagggaagttgcaataaacagagtcttgttagtaagtcccggttccgttcagagactaacaggaacgtagagaactcgtgtactgaaatttttattcttggcagtaatgagacctttttcatgttagtttattggtatttgacctccagtgtttccagctttgtgcgtaaaactactgagaagattggcacccttcatacaagccctgatctgaaagtgagacaagaacctaggggtgatgagcagtcctgtgaagaggatgtgggtccagtcacttgcccaaaggaggaagacactgagtaagttgttgctgagaagtctgtgtaaattctagaggacatagttgtcagtttgaagagagccataaactacattttttttaaagaaggcacacaataactctcttcattgtagattgtgtagcttataaaaattgtaaatactgcaaagtaagtattggaaaattacatcaaccaatagcaagtctgttgagacaaatttttttttgtggccgtgctgtgcagcatgcaggatcgtaagttccttgatcagatatcaaacccatgtcccctgcagtggaagcaaagtcctaagagtcctaaccactggactgctaggaaagaattcctgagacagaattttaattgagcgcctcttctatctttcccctgaacaacttcccccacctccagatctcttcagatgtctagggtgttaacaaaggtgtattagaataggatgaccagggatcgaggccttgttctgattctgcttctgactagcacagtgatgttggtgagtaatgctctctggccataagacaagagctttggcattgatgatgttgtgtatcttccaatgatatgctggtggcttagtccttgtgttatggagttgcagcagagctcttggactggcacagtgtatcttatcttttctctgccttttctcatagttcaggtgatctgggcattggaagtacacaagctcagcatcaccaggaactgagatagacccatggagccagtgtgtattggacagacagatgagattaaagggtgttacctttagagtggcttagttatgaaaccatatatataaatgtcagaaaaaagtagatagtgctgtggcatttgtatttaaggcagccctcagtctgacctgagccgacctttccagcctcatttctagccatatccttctaagcacttggaattctagtcccgtcagaggactgggtgtggatacctcactgcttttcttcacgccatttctcccacctgcagtattttctccccttgtttcctaaggcaaatactacctccttggggatcttgattgcctgtgtgctgtgctaagttgctcagttgggtctgactctttgtgactccatgggctatagcctgccaggatcctccatccatgggattctccaggcaagaatactggagtgggttgcatgcccttctccaggggatcctcctgacccagggattgaacccgtgtctcttacatcttctgcaggggcaggcgggttctttaccattcgccctgcctggaaagccctcttgattgcctagtcagagtaattattcctttttctgtgcccagagtacagtgcttattctgctctttagcatttattttgttctctttggtaatagagttattttttcatgcctttctttctgacttgagcttactcatcttaaagccatggaccatttttttttatacttgtatgtttgcttcatgtaacattaagtacaataggtaccatttagtgagcacttagaagtatttacccaaggaagttctaatcccctgtaacttttttcatacttttctagagaaaaagaagaaataattagttgccctccagaagaggacaagttccaagagctcacaatggcaacagcagaagcaatgtgagtatttgtgaatgaagttttatagtaagtaagaatgactttttgagatcataagtagtggttctgggacagtatggggcagaggtagcttcacttggcattggaattcaagaagtagtctaagttaatgttctctgtgttgtgtttatactaagatcatttttatttaaagagttgaaaaaaaatagtgaaaagtaacatttattcagataagtaatgttgtctgtgttaggcttatttaacatgaaacaatttgtttttgaaaaaccacataaaatgtaagtttcatacttgtctgtcttgtataggaccaagctacaggacccactggttttatttgaaccgaagtccctgagaatggttttacgagagtggctttcacagttagaaaagacatttgccatgaaggacttttcaggcatttcagatactggcagctcatccacggaatcaaaccaggatatgctattgcttgatgagtcaaaaaagggaatattagatgaagaatatgaaaaagaagaaagggactctttaggcaatgaagaaactgttgatcaaatagcatgtgaatctgtaaatagtctgagggagcccttggatgatgacattttccagatatgttctccttggagtatagcagacagtcttcagaaggatctggctgaattgacaacattgtgtttggaactgagtgtattcaattctgagatcgaaggtgccagtgggcgtggggaccaccctctgcaggagtgctctcttgaaatgctgacttgtcagttcctaaagaagtacttttttcttctggatttgaaaagagcaaaggagagcatcaagctgagttaccctaaaagtcattgtgtttgggatacttttattgaaggattgaaaggtaatagattgccttactaaagataaaaatttgtatagaggtccataacatgttgacatgcttaagtttaaagaaaaatatataagtagaaatcatctctgttctggtcaaccatccatttagttttctactcaatttaattttgttttctgttgagactgttcccttttttaagaaattgatctacaactcaatttagttttaaatagtttttgcagctattataagaaattggttttatttttctcacagtcattgggaaaatgagatagcagtgttggagaagttggatttaagcaaaatttcataaatgttgatatgtgaaaaccagaaaatccctaacataacttactgatagagagatcgtatgtcctgtttattaagtacttacatgttgctagttattaacgctaaacccttttctggcatcatttcatttcttccttccaacacttggagtggatggtggcattctctttagtaggtgaggaaagtcaggcacagagagatcatagtagctgagtaggctcaagtgctgtgatactacatagtaatgcagatagaatagtttatttcttgctaatatatccacccaggacagacgttccaaaagatggattggggataccagttctagaaaaaaaattaaagaatttggcattaatggtacatatgtactaggtatatatactatatagcttatatatgtaatatggataacacatgtaaaaaggctttttcaatagtaatagtcacttacatattggttatctgttcctttgtcttattgactatgctttgtctcccagtttgattttaaggttcttaaaagcagagattgtctctcttgtgttttttgtctctcctgtgatgctttacaaatgttttgggacttgcacacagtaggtagaggactagtgattgttgattaatgtgttcgtgaattaagttttttcagctgctatgagatgaagggaaaagggtgtgctttgtcttttagaaatggtgagttccagtcctacacatataaagatggaagaaggagaccttccaacaagattaaagttattggagggcttggttccttttgacagtcctttgttgattgtgtatgctgcccggtgagtggtcctgtatattgttcatgtgcattaaagcccaggcattttcttggtcttagtctctaaagttttcctctatcacatgttgagcagcttcctgttagtatatttattttcatttctaataaatatgtagataatgtaaccaggttatgttatcttactgaagttggagactaacgtgttttgtttttaaatgcagattgtacgagaaatttggagaatcagcccttcgatccttaatcaggttttacccatccattttgccttcagatgtcatgcaactttgtcatcataatcctgttcagtttttggcctatttagacagtctggtgaaatcaaggcccgaagatcaacggtgagaaggaaagaatatttgcagactctctctctttttttataaagactttcctttcctttgtggctcagctggtaaagaatccacctgcaatgtgggggatgtgggtttgatccctgggttgggaagatcccctggagaagggaacagctacccactccagcattctggcctggagaattccatggactgtatagtccatgggttcgcagagtcggacaggactgagtgactttgagtttctcttgatagagcattgtttctttcatataatcagttgaagcctgtttactgttgactgccacagaattgaggtacctgctgtagaagaggaggattttggcagtcatgtaccactctttcacagatcacagtacgcatcacacgtgtgcccgtaaccacacttctctgtcctgcccctctccctctcagagagtctcagatcaacagtgtgaagttaaactcctgcttcagggcctaggctaagactgataagcttccttgttttctctgccagtgagtggattttctgccacctttttgtgatgatatcccagctttctgggggtggctctcagttccagctctctcagcctctttgggctgaggcctcttttcctatctctccgtggcagtaaacgcacatgtttactgtgtgttttgattattgagaatggcaacttcccctctccccttttctgattggttcacatttgatatactagtatttttttctttctttctttttttgctctttggtgttttcctttttatcttgaagctcagctgttcatttaaaaagctactagattttcaccagcacttctatccgttttgtagcagaaggtttttcaagttgtttcgtccactatattgatcccttaataacattcttgtcacatctgcacattttatctttcctttctcaacgtgaatattggtaatttttctctccactttctcttaggccatccttccttgagtcccttctacaaccagagtctttaaggttggattggctgctgttggctgtgtcccatgatgctcccccaagcaccagcactatggatgatgaaggaaaccccaggtataaaggagtcatttctaagcttggctgctcctttggaatggagctagtttattcacatagagcattcagggcttgctttaggaacagctgtggaagagagttacccaagtcatgttagtaatcagactgagtgtactgcctagtagttctgaacatttgttttgaatcacagaccctttgagaatctgaagattcctgtcagaaaaatacacattcatagagaattttgcacatgatttcagagaattaaacttggcctctgaaactcttccatggaccaacattaagaacttggtgattaaacttgcgttagagggaaaagtgtgtgtgtatttgtttgtgtgttttcttcctagaaatttgccaaggaatttctagacaatacgtaatctaggaattttttttcttttttaaattgtgaaagtaagataatacctttataggagacttggaaaatacagaacaaagttacatatagttccactgtatgttacaattattttttagttggagtttcaatatcaaactcggaataattaatagaatgaatagaaaagtcagaaggatttagtagacctgaaaagcactatgaaccaattcaacatagttaagattcatacaattttcacacaaaagcagggtataaattctgttcagattctgaaagagtataaaccaggagacactggaacatatccagggacataaaacaaggtggaaaaatttcatggtctaaaggtattgaaatcatagagtctgttctcttaccactgtgaaattatgttagaaagcagtatcaaaagatatttgaaaataacccgtgtattttcaagtgcaatgttacatttatggagagagatttttgattcagccattggaaagccttaataaagttaaaagacagaaaagacatagatggtggttgcagaggagaagcatttaatgagaaattaatataaaaatgagaaattaatatcaaggatactttaaaagccccatatatttggaaattaagtgtccactttggaatgatgggtatagctaagaatctgtaacaaggaaaattaaaaaacatttgtaacagaacaaaaatgaaaagagaatttatcagaatttgttgcatgcagctgaagctgttcagtgcaaccaaatacaatatagaatcttgaataaggtatttaaaaaacccagaattcataaaaaaatacatattgatgcttgtaatatatcaaatatgttccttatgtttttttctaaagaaactttttaaaagttcccaaaatgcctgtcttacatgcctagaaaaaaggtctgaagatataaaatggctatctgtgaatgatagaatattgaattttcttttgatttttaaaatgtataattaaaaaaagtaaacaggtatttgtcataggaaagacagtgattttgatgttttgaaagtcaggtagaaatgtttgaaaaatataatgatggaaaaaatataattaaactctattcttacctattagctgacaaataagcatttttgtagagtttatttcctatctaatttactgatattttttcaattctcaggcctcattcccacttgttttcctggggttacagtcagctcatccttcatctgattaaacttcctgcagattttacaacaaaagagaaaatgactgacatctgtagatgtcatgggtaagtgagaactttcctagaagctgaagttaaggttagagtcgttttagttaataactttgtagttaagggactgaaggtatatgctttgtcttttttttttttttggctaaagtgctttttggttttaagtgctaataagcatctttttttgttttaaattgtgagcatattttattttgtgtgtacatgagactggtccttgcttgttcctctctccctcttctgcttagttggtcattccagttctcaggtatatttagttaagtaccaggctgtgtgatacaagttgtaattgatacagtttctgggaagggagagatcagaatgggctcagtagaacttctggtgaaggacttcaccagaggaggtaagacatggaggtaagccctaagaatggggagggtctgtatttaaaaatgagccaggtagagggcaggtcaggtgagacaaacagcaagatcaaggccatgaaaactgacatggctttttatctgcatcacgtattagtcagttatttatagcccaaaggtgttatctcatgttatctttggcatccccaggattacagtcttttggagagagggacattcatcttccttttccctgggtgcacagttcataaagtagtaggcacttgatgcatatttgttcattggtaatgaggggtgcttcccagaggttaaagcgtctgcctgcaatgcaggagacctgggtttgatccctgggtcgggaagatcccctggagaaggaaatggcaacccactccagtgttcttgcctggagaatcccatggacggaggagccttgggggctacagtccacggggttgcaaagagttggacacgacttcactttcactaatgaggggtgagactggtcaggtggtaggtcatgagatcatattagaccttgaaaggtggttaaaagaatttatgatcagtggagacccttttaaactttttggtacaaaaatggcatgacaaataaaggcttttggttcatacatgaggaagattggagacaagaaataaaggccagctaggaacctggtgcagtaattcaggtatgattgaattgattccagggcaacagaaggagcacggccggtgggacatgtcaaaggaacacacagtgggagctgtaggtactggtataggaagtgaggaaggggagagtgaaggagagctgccaaagtttgcatgtttgtggaagaaatatgctcgttttgtgttaaaccttaaagtttataaagtacatgagcttaaaaaagtctgatagttggggcttggccttgagtgcatgcttagttgctcagttgtgtctgactctttgtgaccctatggaccatggcccaccaggctcctctgtctatgggatttcccaggcaataatactggaatgggttgccattttctcccctgggggttcttcccaacccagggattaaacacaagtctcctgcattgcaggcagattctttagtgtctgagccaccagggaattagtatttatcactaactttaatttttgttttttcataagtgctctagtttctgagggaatgaaagtattctaaaaatattttatcacgctgtccaatatggtagtcactagtcacatgtggccattaagtccttgaaatacgtactggtcaactgaagaactggcttttaaattttatttaatttaaatgtaaatagggacttccctgtggcagtccagtggatgagactctatgcttccaaggtgcagggagcgtgggaactagttgggaaattaagatcccacatgcctcatggcacagccaaagataaatcaatgtaaatagccacacgtggctaatattactgtgttggacagcacaatgccatataaattcactgtcttttattcttctcaccaactttggtctctttaaagtttctggcctggatatcttattctctgtttggagctggagagaagaagagaggccttcaccaacattgtgtatctgaatgatatgagcctgatggaaggggacaatggtatgtaaattccaattggttactcttggttatagtattttagaagtcactacagactttccggtaaagaaatgtggtaaacatttcagtgatcatattctttattctagctacttgtcagattcgtggagtttttttgatccttgctatttggtatattgtgaaattgtaaccagaaataagctgcaggcaacttttctatttcatgagtgcctaatgtgtgaggcattctactagatgcttttccatctagtttaaatgaaataacaaacctgtgggatagttactattacttctattttacagaaagtgtaattgagactcagaaaaaggacagttagtttccccacagtcatacagctggttactgctggaactgatgttcaggccaggtccaaccatctctaaagcttatgctcaggtttttttctctgcatcatgttgcctttttacacagcccaaagttagagatcattaagatgaacttagagtagcagtcagattttcctaagcctttacaagtatttaggtacttttttttttaattttaattttcatcaattcagtacagataaaatgacaggaggccaggattttgacacattgaagtctgagagtttatcctacactcagagaggtggtcttggtctgatttgtagtgttgctttattcatctcaatgcagaggtacccacagcatgacatcaggatccttcatgtagcaacgtgacctactggctttttcgtttcagagctgttggtatagaagaaggaaagttagaactgagcaaagaaaccaggtgactggcaagggttagcttcagatgtcacaactatagcaataataactgaaaatatcacctaaaattcttcctacccagataaaagtactctttttagttaatataataataataatagctgttctcacccttggtatattaaatgaggatcttttcttgacatttctctctcctaactcattttatcactttaaagcttgttgatcttactgcccaatatatatctcataagtttttccaattaaaacttttttattgaggtaacattggtttatcacattttataagttttatgtgtacaatgcttttcacttttttgtagtttatggagtggccactgctaaagatttactttccatccgtcatcaggtttattccatttacccccgaccctgccctggctccaccccctccagtgcccactgctctggtctctgcagctgcatgtttggttttgtttggtttgttcatttatttgtttgtgtgtgtgtgtattccacctatgagtgaaatcctgtagtctttttatttcacttagcataatagcctcaaggtccacctatgttccgccaatggcaagattccttcttttttttaatggctgagaagtattccgtcgtctgtgtgtgaatcacgtcttctttatccattcatctattgaggggcacttaggttgattccacatcttggctattgtaaatagtgctgcagtgagcacaggggtgcatgtatcttttccagtttccatattctttggataaatattataagtgggattgctggatcagatggtagttctgttttcaggttttttgagagaccttcctgtttttgacagtggctgtgtcagtttacattcccaacagtatacagagttcctttttctctgcatccgtgccaatatttgctattcgtagacttcttgatgatagctattatgtatgaagtggtatcgcatatggttttgatttgcatttctctagtaatcagtgatgtgtaacatcttttcacatgcttttcacgtgtatgtcatctttggggaaatgtttatttagcacctgtggccaatttttcatctggttgtgtatttttgcttattaaccccgtaccgttttaaatatcttctcccgtttggtagatcatcttttcattttaaggatggtttcttctgctgtgcagaagctttttagtttgatgtagtcctgtttgcttatttttgctagtttcccttgcctgaggagacctatctagaaagatattgctaagactgatgtcaaagagagctctgtctttgttttcttctagtttaatggttttgagtctatttaagtctttaatccatttggagttggttcttgtgtatggtgtgaggtagtggtctgctttttttgtgcctcatgcaaaaaaaagtccccaacagtgtccccagcaccatttatttaagacactaccctttctccgttcgatgtgccttgttcctttgttttgtgttaattgtccatacatgtatgggtttatttctggactctcagttttattccattgatctatgtatctgtttttctgccactaccatgcagttttaattactatggttttgtaatatagtttgaaatcaaggcgtgtgatatctccagctttgttcttttcattcaggattgttttggctatttggggtctttcatggttacgtataaatcttagaatattttgtcttatttctgtgaaaaaatgtttctgggatttcagtaaggattgcattgaatctatagcatgctttggaaatatggacattttaacagtattaattctttcagtccctgagcagacagtatctttccatttatttgtgcctccgtcagtttctttcaactttgtcttatacttttcagtgtacaggtttttcacctccttggttaagtcagttcagttcagttgctcagtcgtgtctgactctttgcatccccatgaatcgcggcacgccaggcctccctgtccatcactaactcccggagttcactcagactcacgtcagtcgagtcagtgatgccatccagccatctcatcctctgtcgtccccttctcctcctacccccaatccttcccagcatcagagtcttttccaatgagtcaactcttcacatgaggtggccaaagtactggagttttagctttagcatcattccttccaaagaaatcccagggctgatctccttcagaatggactggttggatctccttgcagtccaagggactctcaagagtcttcttcagcaccacagttcaaaagcatcaattctctggcgcttagccttcttcacagtccagctctcacatccatacatgaccacaggaaaaaccatagccttaactagacggaccttagtcggcaaagtaatgtctctgcttttgaatatactatctaggttggtcataacttttcttccaaggagtaagcgtcttttaatttcatggctgcagtcaccatctgcagtgattttggagccccccaaaataaagtctgacactgtttccactgtttccccatctatttcccaagaagtgatgggaccggatgccatgatcttcgttttctgaatgttgagctttaagccaactttttcactctccactttcactttcatcaagaggctttttagttcctcttcactttctgccataagggtggtgtcatctgcatatctgaggttattgctatttctcctgacagtcttgattccagcttgtgtttcttccagtccagcatttctcatgatgtactctgcatataagttaaataagcagggtgacaatacacagccttgacgtactccttttcctatttcgaaccagtctgttgttccatgtccagttctaactgctgcttcctgacctgcatacagatttctcaagaggcaggtcaggtggtctggtattcccatctctctcagaattctccacagtttattgtgatccacccagtcaaaggctttggcatagtcaataaagcagaaatagatgtttttctggaactcttttgctttttcgatgatccagtggatgttggcaatttgatctctggttcctctgccttttctaaaaccagcttgaacatcagggagttcacggttcacgtattgctgaagcctggcttggagaattttgagcattactttactagcatgtgagatgagtgcaattgtgtggtagtttgagcattctttggcattgcctttctttggaattggaatgaaaactgaccttttctggtcctgtggccactgctgagttttccaaatttgctggcatattgagtgcagcactttcacagcatcatctttcaggatttgaaacagctcaactggaattccatcacctccactagctttgttcgtagcgatgctttccgaggcccacttgacttcacattccaggatgtctgactgtgattagtgatcacatcatcatgattatctgggtcgtgaagatcttttttgtacagttcttctgtgtattcttgccacctcttcttaatatcttctgcttctgttaggtccagaccatttctgtcctttatcgagcccatctttgcatgaagtgttcccttggtatctctaattttcttgaagagatccctagtctttcccattctgttgttttcctctatttctttgcattgatcgctgaagaaggctttcttatctcttcttgctattctttggaacttcgcattcagatgcttatatctttccttttctcctttgcttttcgcttctcttcttttcacagctatttgtaaggcctccccagacagccattttgcttttttgcatttcttttctatggggatggtcttggtccctgtctcctgtacaatgtcacgaacctcattccatagttcatcaggcactctttgtctatcagatgtaggcccttaaatctattactcacttccactgtataatcataagggatttgatttaggtcatacctgaatggtctagcggttttccctactttcttcaagttgagtctgaatttggcaataaggagttcatgatctgagccacagtcagctcctggtcttgtttttgttgactgtatagagcttctccatctttcgctgcagagaatataatcaatctgattttggtgttgaccatctggtgatgtccatgtgtagagtcttctcttgtgttgttggaagagggtgtttgctatgaccagtgcattttcttggcaaaactctattagtctttgccctgcttcattctgcattccgaggccaaatttgcctgttactccaggtgtttcttgacttcctacttttgcattccagtcccctataatgaaaaggacatcttttttgggtgttagttctagaaggtcttgtaggtcttcataaaaccgttcaacttcagcttcttcagcattactggttggggcatagacttggataactgtgatattgaatggtttgccttggatacaaacagagatcactctgtcgtttttgagattgcatccaagtactgcattttggactctcttgttgaccatgatggctactccatttcttctgagggattcctgcctgcagtagtagatataatggtcatctgagttaaattcacccattccagtccattttagttcgctgattcctagcatgtcgatgttcactcttgccatctcttggttaagcctatttataaatattttattctttttgttttcattgtaaattgagttgttttcttaatttctttttctgctagctcattgttaatgtatagaaatgcaacaggttttttaaaaaaattttatttagctacttagtagtagctgtgctaggtcttcattgctgcatgggtttctctttgtgggtttctcttgttgtggagcacaggctctaagtgcccaggcttcagtagttggcagcatgtaggctcagtagttgcatctcccggactctggagcacagtaccggctcagtagttgtggtgcgtagacttagttgctctgtggcatgtgggatcttcctgacccaggaatcgaaccctcaactccttcattgacagatggattctttaccattgagccaccagggaagcccgtgcaacagattttttgaatgttgatttgtaccctgcaactttattcattttttatttctaatagttcttgtcttcacggttttctgtatataaaatcacgtcatccacaaatagtgagtttcacttcttcctttccaacttgcatgcctttgatttctttttcttgcctgattgctctaccagaagacttccagtactatgctgaataagaatggtaagagtgggcatccttatcttgttcctgattttagaggactagctttcagtttttcatcattgaaaatggtattagttgtggatttgtcatatatggcctttttatgttgcgttatgttctttctatacccactttattgaatttttttttatcataaatgggcattgaatcttgtcatatgctttttctgcatctattgaaatgatcttatggttttcgtccttgattttgttaatgtggtgttcatgtgaattgatttgtggacacaaccttccttgcatcccatgacatgtgtgtcccttgcattggaaatggagagtcttaatcactggatcactgaagaagtcctccttttttagatttttaaactctttgtaaagtattcctctgttcattttttcccctctgttcacttttattcctgagttcattgaactgcctctctgttttgctctttttttgtagctcttggactttcttcatgaaggctgttttgaattctcttatcagttagctcacaatattctgtaacttgaagtttggttactggaaaattgccattgtccttttgtgataaagtgttactatggttcttcatgatgcttgatgaaattgttctctactggcaagtaacctctctgcttgattcaaacacaatagattagagactagaggcctttcctttgtcttccagcagatggcgccgtagcacacattttgggtctcttgcctcagctgcttctgttcatgtttgaaagtccgcacttagtgcccaccacctctgactgccccgtggccttcattatcacttcttgtacctgcggggccatggatgccttacttctgccagtgttgctggcatagccgcctggcgcacctcctgctcagggtcccttgagtggcaggctccactgctgttgtggaggaggcgggagtaggaaggggtagccgtgtccagtgtcgtaagattcctgggctctgcggcttcgggggtgattggagcgtgtgcagcgcctcccccgctcctccagcctctctggggctggaggtctgggcgctgcgggccccgtctctattgtttcttggttctgccgcctctctgtgttcccgttcaccaccttcagtcgtgcatttatgtgggaaattctccagtgtctcggtgtgctggatgcaggcacctttgtggtgtgaatgtttatgtaggatgaatgggggggacaaaggtagcttttcgctccaccatgttactgaggctcagaatggttcttttaaagaaaagttgggttatgtggctctcctccttgaaactccttacacttgactcgaagtctagattcttatgctggtcccttatggcctggccctatcatcttattctcaatcctcaccaccacctttgagttccttgaaatcacctagtttcttcctgtgtcatcgtccacgtttccttgatcagaaacataagctctttcgctcctccttcccgacaccttccctgcacgtatgtcacatgcagatgggtcatatgcacacacttggtaaacttgtctcatcaaaaattaaaaaaaagaaaaaaaaagctatccaaaacttgctagtctctcagatggctctttgatcttttcctttatagcaagtacatagcacaatttataagcgtagatttgtttgcgggtttactaagttctttctcctttactagaccatgagctccacagcagtgcagggctcatcatgtctgtttcacgttcatattcagtgcctagcatggagtgtgccctgggttattactgcgtgagcaaatgaaagaatgtagaggctaatttcatggcttctccttgtcttgagctatttattcaacaaatattcagaaaacagctttgtgtcgggacagtgagattatgttcttttaatatttttatgttttggtatgagacatttttccgaatggtttctcctgtgtgcaggcagagtgctcagagcccacattgtttctgtgtgtttgagtaggttggatcccagaaactgtggaagagtggaagcttctcctgcatctggtgcagaacgcaagcacaaagccagccccccagcagtcaccagatgggaacttcagcgatgggccttcccctatcactgtggagaatgtggccctcctgctggctaaggccatgggcccagaccgggcctggtcactgctccaggaatgtggtttgaccctggagctgtcagagaggtttaccagaacctgcgatatcctgagaattgccgagaagaggcagaggtaattaatgtctgtctgtcctgcccttgtcctgccctgtccacaagcacttggggagtgtagaatcccacagattttcagaggggacaggactgtattgatcacatagtcccaacccctcacagatggggggacggagacttctctgttgacttaggtgattaagagaagaggctaaagtaatactttgttcatagttgtgaccaagacacttgtaggtcaatgtgactacccaaatatgatgtatactcaattcttggagaatattatttgtactgcatacctaatacctgctgtgcaggagaccagggtttgagccctgggtcgggaagatcccctggagaagggaaaggcaatccactccagttttcttgcctggagaatcccatgagtggaggagcctggcgggctacagtccacggggtcgcaaagagtcggacatgactgagacacacacacacccacctaatcatctcagttttttttttttttaatttttagtttaaaaaattgtggtaaaatacagataacatgaaatttactgtcaaccatttttaagtagttggttcagtagtgttaatatatttgtgtcattgtgcagttaatttccagaactttttcatcttagagaactgaaaatctgtccccacgattccccctcctccctctgccccctccctggcaagcactgttctttctgtctgggaccatagtgtgtgtctttttgtggctggcttatttcacttaacataatgtccttaactgtgttgcagcatttgtcagagtttcctttttttctgggactgagtaatatttcgttgtgtgtatataaccacattttgtttatccgctcatctcttgatagacacttgggttgcttctgcctcttgctattttgagtaatgctgctgtgaacatgaggatacaaatctctctttgagaccctgctttcagttcttttgggtgtatacccaggtgtggaattgctggatcagatggtacttctgtttttagttttttgagacactcctagactagtttccatggatcccgcaccattctgcatttccaccagtgacgcacgagggttcctgttactccacgcccccagcaacactatttattactattattttttgatagttagctatcctaatgggcatgaggtaatacctcattatggtttttatttgcattttcctagtgatgagtggtgttgaacacgttttcatatgctcgttggccatttgaatgtcatctttggaaaagtacctgttcaagttttttgtccatttttaaattgcattatttttttttgtcgtatgagttatttacatattgtggatattaacctctgagatatatgatttacaaatattttctcttattgtataggacaaggtgttgaattcataggatgccttttcactgttagttttgtcttttgatgcacagagtgtcagctttttgaatcctttacttctgaaaagaatgaacaatgacaactaaatttgcttgtttcttttctttgggatttcagagccttgatacaaagcatgctcgagaaatgtgatcggtttctctggtcccagcaggcctagtgaagagtatgcagcagggcgtcacgacatgttgagaaagactgagctgtgctcccgagcctcctgaacatacttgttcttgaaggaaaggccccaccggggatcccagcaccttgttgggagcaccttcatccctgtctgttacctctgcatttgtggctcaatttgtgacctcagtgtttttcaaccaaagttggattttgaaaggaatcagtccttgtttgccaaaacaaaatgctctggaaggaagcagaatatgaatatccccagctgtgcagcccttatgctggacaatagaattattggttccttgttggtggactagggtaattcttttcctgtcatgactgctatgcagggagcaaaagtttctcaacctggtcatatgaagacatacaatgtagttgatagaaattgaattcctttcttatcttttctgggatacttgagaaattaccaaagtaagacctagtagaatgtaattaacacataaaataagt

SEQ ID NO: 173 - DNA, 3406 bp, Hippotragus leucophaeus
  source 1..3406: mol_type = genomic DNA
gttccagcaccttagtgtgttcaccaagccagttcatcaaatgtccctgttcaggagtttttatagagcttaatctctagtcccattcccctcccaggaggctgaggatgggctgaagctttcaaccctttcaccacttagtctttctgctgaccagcccttatcctgatgctaggggtccccacttttagtagcagtataaatttatcttattagtataaatgcaggtttgatataaaggagtttgttataacaaagacacttctttcacgcataccactcaggaaattctacgagttttagaagctctgtgccaagacggaaacctaaggacaaaaaccaaacatgtttattataccattttatatatatgtacacacacacatatacatatatatataaactgctcggaagagaggtgtattgcacacacaagtcccactctggctcctccaactcctaggcacctttccctgatcactgtgtgctagagacaattttcagcctgtgtcagtcacatagagaccctgtccagatggtgcccaggcctccaggcctgggtggtctgatgcctggagggctgacacccgaggtggggtggggggtggagtgtctgggtcccatagaatgtcctcatataagcttagaactgggccagaggctcgtccttgagtcccagtctgcttcagcagggctctgagcaagcccacagtgagagggggctctgccccaggctcagggaatggggcagggggctccaactcatctgggaggtatgtccgcagtagaagcaggagttcagctggagctaggtctggtgggcacaggcggcaaaggagggggagatgagcgtcaagccggcgatgccgggcaaattcggccaacagcagtttgaagatctcacctcgaagcagggggctagagaggctgagggccaggccagcctctaaagcccgttcccactgttccttttgcaccagctgccccacagcttggagcacagctttgggccgcccactgcccaagagtaggtctagctccagtgcttcaggcctagtcccctcttcacctagtactgccagggctcggcgatagaggggcagccctgggcctcctgccccccagccaggccccccctgttgctgggccagctccacaaagggtggcagccattgtggctccagccggcagaggcactggcacaggagttcaaaggggggcagtatgccattgggtggttcttttccagctgctctaacccccagtaccttcttccacacatccgggggagcttgggacctcagatggccattgccatctggctggagctgcaggaccctgaggatggcaccccaggctgctgtagggagggcttggaaaatggtgttgagctgggccagctggtctcccatcaactcagtcctcagcagccgtgccacttcgtgctctgccaactcagtccagccagcctcctcctcatccccagccacaagctgggctttgagctgttctaagccccggtaatcccgaagctcggccctcagtgtggtcaacagtgctgatggggacacatggccctggaggatggatgccagggcctgaggtgctcggaatgtgctgttgtgtcgcagttcctctggggtgagctgggcaccccgcaggctccgtcgctggtagtacttgcaggcctcctcaaacaccatatcttcagctgaaggcagctcaaggctttgtggggttttccagcctacttgaaacagacccacagctgaaagtaaacgaagaccccctcgagcctccagctcttcctgatcttccatgccaggggtgggggtttccagcagatgtactcggtctgtactcaggatcttcttctccagcagctgcccactgcccatgtccagcagttccaatgtggaacccagcacacaggccagagtgccatgaaatgtgcccagtgctgcagaccctgccaggctagcaggtgcctcctgcagggtgccaacagtccgggagccaccgtggggctgtaccaggctcacagtgcccctgaagtcaagccacatcaggccctggggagttggggcccaggtatgtacagtcaatggctgcctgggggacagcagtccaggaaggcctcggagcagggtcctgaagtcccatgtgtcccctcttccaggattcaggcttttactgtgggagaggccaagacatggggcagccaccactaccttgcccttgcttgggctccagatgagtagaatatgacccaagccaggccaggtgttggcagtgggcacaaggaagaggtccttgcgggaggtcagcagcccgaaagcggggcagtggtgcagcagtatgtgtgtactgcccaggttggtgccggcctcaccgctgggctcgagggtcctgacgcacacacagtggctgaaagccacagcaggaggccctaactggccctcagcgccggcctgccgctcctcgcaccacaccaggcggcctcggggcgccgccacggccaccacacgggctccatctccaggacacagctcggtgctctgcagcagccgccagccgggccccacccccgagccccacacctcgactaggccactctcccacactaggactagcgccgatcgcgccggccacggcaggatgaaggcgtctagcggtgagggctggccaggcggccaggcactttccagctccgcaccgggtccacgcaccgcgaccagcagttgcggggctggtgaccccggaggtcgcagcaacaataggtggcggccgtctgggctgcagcgaactcggacggctgggtccccggctagcaactcccggagccgggccgcgccgctgaagttgctcagatctgagagcaggcgcagagtccccgcacgcttcatggtgttctccgcgccggagcacgcctaggtccgccgcactgtagggcaaagcccgtctctcagtcccgggttcccgcgggaagtcgaggatggggttgagacttccgtcccgggtcgactaggcgagccaaggccgggctaagactcagccccgcccagccccgcccagccccgcccctcacggctagctagagacctgcgcctgttttacgcccagcaggcaaaacaccgcccatcaaggggcgggggtgctacagggagataggaggagctaggtctggtggccgactgcctcaggccccaggaagccgggaagtggcccaaagaatccagattccagccctttcagcatccaactcccaacgcttcccttccctccaagccacgctttctcattccaatttattcatgaaatttttattgagcacctactaagtgcctggctctggggagacaaccccgaacaaaagagaaaacctcagcttcacggaatgacaatc

SEQ ID NO: 174 - DNA, 143659 bp, Hippotragus leucophaeus
  source 1..143659: mol_type = genomic DNA
gctcaaagacagcaataatcaagtcctgaattctctccccttatccttccctttttggggggaggggcgggtgtgtgtgttatcttggcagaaaactttaaaaaatataatcttttagagcaaattttatgtaaacaattaactaatttaaattctactaggattttttgggggaataatagaaaataatagaaaacagaaatagatgttaagtttttctttagactccactatggaaaaaaaaacttcaaggatatgattttaatttactctgccaaacttcaaccttgatacaactctccagatcatcactaaattagaacaaaactttcctttcaggaccttgtgaggcagcagaattttgtggagatgtatagactgtatcattacttggatttgtttggtcatccctgtcttcaggtttgacctcctgaaactggcgaagtcagtaaacgtagcctggagttaaagtgctgtggagagtgcagagttctcatcactcatccggctgcgtagctgctgaggaaggaatagaacattggatgtttcaagcgctgctggtccttccgacaccaggcgatcacagtcccatcgctgttcgctgtgtacaaatggtggccatcacaggaaaatgtaaggctgttaaaaaaaaaagtcccatttctacgttgtgtctctgaaaattgtatcagcatattggtgatcatgtggaaattggtgtaagaagttaagagcctttactggagcagagagacagataaaacgaccacctacaagtggttttgactgtaataatatagtttaatggttctgctgccaagtttgtgatgctcattctaaccagctgatacagactaaaaccaagataaaaagattggcatattctgatccctctttgcatgttttcttttcctttcctatttagggttattacttaacaaatacatgggtatcggaaacttcaaaaaatataacagtactacattttctctatatagaaataaatgagaattattttatggaggtattttatttccctgaaagaggaaaagataaaaaatgtgttattaatatataatttcatttcattacactttacatttagtggactaaaaataaatttattttaatgcagtaaaatttgaatcacttactgcaattgagtttttaaagtcatatttgttaatggagcagagaggtaacaggttgtttatcagtcttgtctagcacactcctgtagctatcagtcaccatcatggtattttcaataatgaaaggaaaaaatatataacttccacagttcaagaggccttcccaggcatgatcccagcatgcccttctgtgaggctctgagctcctgacccagattttaagctccatgaacacaaacgctttgcctcctcctgccatggggtcccatacatcctggtgttcgataaatggccagttgtttataatgatcctccttatgttcctctttacttctatgtgctttactatctctccaacaaaaacagtcaaagagtatagtgtgaaacagggaagggtgggggaggttttaccttacaataggtttatttgatttaggaaacgtaatttcccgcacaggctttaagtcccaagtactccataacctagaggaagaaaaaaagtcatcatctaattacacaaactcaagtttcctttactaaaaatttaacctatgtgtttatttgttaaaaatcatctggtaaggaaacacaataaacaattaatatggttaattctaggcagtttgctcaggtgggtatgggattaagaatactttgtgtattttcatattgttaatctcaacaattaaaaaatgaagatcatggcattcagtcctatcacttcatggcaaatagatgagcaaacaatggaacagtgacacactttattttcttgggctccaaaatcactgcagatggtaactgcagccatgaaactgaaagatgattgctccttggaagaaaggctatgacgaacctagatagcatattaaaaagcaaagatgttactttgccaacaaaggcccatcttgtcaaagctatggttttccagtagtcacgtatgcatatcagagttggaccataaagaaagctgagtgctgaagaactgatgcttttgaactgtgatattgaagaagcctcttgagagtcccttggactgcaaggagatcaagccagtcagtcataaaggaaattagtcctgaatagtcactggaaggactgatgctgaagctgaagctccaatactttggccacctgatgcaaagaactgacactttggaaaagaccctgatgctgggaaagactgaaggtgggagaaggggatgacagctcatgagacggttggatggcatcaccaactcgatggacatgagtctgagtaagctccaggagttggtgatggacagggaagcctggcgtgctgtagtccacggggttgcaaagagtcagacacgactgagtgactgaactgaactgaaccatttatagttaaacaatataaaatttcaaaaatgtacaaattactatttagtaataaaaaggaaacaccagaagaacctatatcctaaggtaattttaaatctctaaatattaaatattattatgtttagatagtaaaaaaatattttttgaaactgctatgtccttatgagcaaaaggacacaaagaaatcaaactcctcttaccttacaattccattttctaatcccccagcaatcacattgatagatattccctcaggctggttagagaaagccacggaacaaatgatctctctgcagtggacgtgtccaacgaggtccccattcactgtccagagtctgaggtcactgcctccaccagctaaaacaccacaaaaacccacaggtcaccagggtgtgcgtgttgcagagcccccccacattgggccccagaggggaatccctgagggcctcgcttgtctgtttgatgaagttcataggcaactcatgactggagtgtgtaagtgaaattactgcataaggcacacagagttggcctatttatctagagatgatgactagtgaaaaaaataaaaataaaaaattaacctacaaggtagagcaacaatgcaaattaaccatgaatttctttgtagtcataatatcttagcatatatgctaaactgccaaatctaattctaaaagtacctataaagctaagtaacctccaaaaagagaagaaaatattctgtgaaactacagtatctttaagaagtgagttatgggacttctgaagaaaaaataagttacagtaaaagttgagttaaaaactaattcttaaaaagaaagctaattcttcagaatgtccaagagtaaatcttataaatcaatgtcttattaaatgaatttttcttttcaaagatcaggagtaatcaattttttgtagttttccaggagatggaagaggcagtaattgctagccatcctcaataaactggggctggtggtctggagcctatggtgatgtgtccagcctttctggagaaatgttctcatactgataaagaaagagaagggttaagaggcatgataaagttgggatgacatagtatgtgttaccacactttatctctccattagaactaacattaaagtagagaatttatttctctcctttattaaggcagtgaaaggatttcatattttatagcaaagaaataagtattagaaatacttcttcacctacagaaatgctaaagaccatcaaataccacagaccaaaatgcctagtgtgttgcagtattattcacaacagccaaaaggtgggaacaacccagatgttcatcaagaggtgaatggataaacaaaatgtggtatatctaaacaatggaattcatttttattcagccagaaaaagtaatgaagttctgacaacaacatggataaatcttgaaaatgttatgctcagtcaagtaactgagggggtaggagaactacccactactctgaattttacaatattatattaactttatagtaccactggtgacaggaaaaggctatgaactctagttgaaatgcatgtaattttgatatagtggcagaatgattttttaaagtacagaaaccatctactataatatttatagtttaataaattttatatcttatcactataaaaaccacatcccataataagccctggaaaatcaggataaggaaagaatgagtttgccagtgtgtctttagctgcaatacagaaaaatttgagattatatatgtgtatatacacacatatacatattatatattgtatacatacatatatatttatcttaaattttgattttaaagttacttggatggttctcactaaagtcaagattttttgataggttaaatctgattaactttcttcccttcctagagtataagaataggagaatgaaaggtagtccaggtcactaaacatgaatttgtcctcttttaaaaagtcattacttttatcatgctctctaccaaatgctctttatgactcctcttgtatatgtatcgagaggcctcaaacaagttgagaaggcctttttgttcaaagtgggaagaaagttctacccattactctattatactgtgtatactgcctacggacacttgaaataccctgctagtgatctggtaaatataagcaaaagttacttaatttggtttcttgttcccatatgactagctgatataatatcatagatatatatcactactggcagcaggaaagtaattaactttacaaaattcagctccttcagggtcagttctaacttccaaatgttgccaaaacaagaaagtagagaactctagataagtcatcactatctttcccccccagattccctcttgatatgtgtgacacactaaaagcctccaatgtacaaatcaaggaagaatggttagcaaagtcatcaaccatctgtgcacacttttattaccaaagtcaactgtttaagatctttccctttagttatgctgactggggaataagaatgtgttcatgacattcattactttatgactgggggctaaagcctggcaaatattaatacttcacatctaaaatcttgaagcatgactgaagacattacttttcttgaatataagaatgatgagtgttttgtaaaatagaaaaaattcaaagagataaatatatatatatatatatatatatatttgaactttgacccacgaccctggcatagagctcctaaactcttgttaatttactgtcttttgtattagggagatgactcctggggaggtcctagacagattcaagtgggggctggccagcagagaaactgcccttacagcacctcccacctctggggaggggagaggggctacaggcaaaggtcagttcctaatggccaatgattgaatataccaggcgtacataatggaacctcagaaaaacccctaaacaacagggaggagactgatgaaaacagtcatgggccaggagggtggtgccttctgacgccacgggaacagacctctggaccttttcttgtggctgttcactttgtaatgaactacagtagtaagtacagtgttttattgagttttgtgagttgtcagagagaattactgaaactggtgggggccctgagactcccaagtttgccaacttcaactagttagtgtcagaattgaattgcactgttggacacccatttggtgtcacagaaccggagaagagtttagtgtctggaaagaccacacatttggtgtcaggaaaaaacaatataaaaaatgcaagcaaaggataaaagaccacccactgcagatgtgtcaaagatacctgttctgagtggacaaaaagaaacagttttttgaagaatgctttcaattaatggaaatgcaaacagaaaacttatgagcttgccaactgttcttacctactggatatatcaagttttttaatacatatacatgaaactaaaactaaaagtcagacctttgattaggagatctatctttctcatgtaaatttggggcacattatacctccattgttattctgtaatactgtcttgcaggaactagaagacacatataatacaaagctgatcctctgctgatgccctggaggagggtatggcaacccactccagtattctcacctggagaatccccatagagaagcctggcagcctacagtccatggggtcgcaaaaagtcggacacaactgagcaactaagcacagcacaaacctaaattgatggactcaatcttctttattgcattttaatacacatacgacagaggatgagatggttggatggcatcaccgactcaatgtacataactttgagtaagttctgggagttggtgatggacagggaagccttgcatgctgctgtccttggggtcgcaagagtcagacaggactgagcaactgaactgaactgaatacacatacatggtattccctaagtattcaggtctggcagggaccagagggctgtaacggacggtttaacctatgatgatgtaacctatgatgatttaagctagctgagcacacgttagtgcaagcgctctgtgctttgggtctggggccagctcacctgagtcacacactgtagcaatgtcacctgtagtctcgctggcagagacagccgtgactgggcttttgtgtcccgccagactttgtacgtagcataatctgaaagaccaaagacatgaatttgtgtatgaacattaaatataattacattcttttatttatataattcttttggtcagtatatgtacctactatttataagggattcctgactctattcataactgatctattaattcaatcagattacaaaggtaaagtctgtatttcatgcttaaagttattataatgtaaagatattattttacattaataaaaatgcatctgtttctcacagtaagaactggaacattaaaaacagctattttagagttggaaatcttccgcacctgttcaaatcccatacgatgcaggttccatctctgctcacacttatcattatactatacggtttgcagacacataaactggttatctcttctgtgtgcccatacagatgtatctgagactccatttctatctctgaaggctaaaatttaaaaaataagtataagataaaagccgtgacaaaaggtattctagtactgttatctcaaaaacaaaacaacccaagtgactcaaacattcttctcaaacaaattttttcaacctagctcaactttttctaaagagtagaactagttaaacattaaaaaaagttttaattgaccgtaatctcatcaactgataagcttttcatttttgtctattcttttccagtctggccgaatatacatgtactttaatagctgtgattatctccatatgaatagttctctatttcatttcatacattctcccataagcatttctcatttttgacagtgtattcaaaatgatttttaagtgttatgatattctatacagttagtataccataatttacttgaacatcctttattgacagatatttaaaattgtttccaatgttttcaaaatgttagatgccataaataaataaattttatttttatttatctcataatttttaaatttatgtacgtaagttttgttcctcctctatatcactcctttagaataaatttccagaatcctcatagtggatcagtgaatattaataattttacagtattgatagtgtacttgcaaaggctttgcactgactcctgatgctaccaatggcaatgtattactcatcaatagttgtggactgattttcagaatcaaagcttgcaaactggtgttccaaggtccacattgttcacagatgccggatgtccacagggtataatatttgttttatactaggtttatactgtcataaagtatttcaatatttcaaagaatatagaaaagtagaaagtataaatacaatgaaaatctgtatactgaccactcagttaaactaatcctaacattttataatatcagcttattttttaaatatagaaaacattaaatattacatagtgtgtatactgttttacatcttatttcctctcccttctcagaagctattatcctgaattttgcatgtttcctgtgtatttagaatttatgtcctactatatgctactataacaataaacaacatattgggtttcatgtcgataaactttataaatatggtacttattgttctttaggcatccgatctattttgccttttttgatcaccattgtttttaaaacatacctatgttgactttattagctgcagctcatctgttttaagtgcttcatagtccagtgtcttattcacataacaatatatattttttacttaaagactcaaatgaccaggcaataccagtcttccttggaaccactggcctaagttgtgtggcagtggcttctgtttagctagggcatgtggccttcaactgaacacaatcacagcaacaagatggctctgaacaagggcatgagtcctgggtctgggccccttctggtttgcctctgggaccctccccacagggccaggagtctgtggggccacggaaatgtgccagcatccttgcagaccatgcttcagggtgcctgggactgaagaactgactgttcagaaaggcttaagccctttccttctctgcttggatttgtgtctcagtggtcactctaaatctttgaaaatttcccaagttttaaatggcaatcaaggttgcttttaattgcatttctcttattataactattaataagcttaactttttcacatattcattgtttatctgtaaattgtgtgcttggttttgtatatttgttactacattagaaaattatttgtagggattcctctattagtggaatagaatgcaagcaccttcctcgtttctcctggatgacctggatcaccatgccagtctagggatgccttattcaaagtttagtctcaaggatcctggaccgcccagggaattccaacccaggctgtatatccaggcaagagttggccccatctgattcatcctcactctccgggaccggccttttgggcgagaacctccctgggactgccccctccaacatcattttgctctgtcccttgttgctgttttctactcctcttataaggggctgtctcaaggtcagtgtcaatattctaggactgacagttaatccaagaatatctaactcaaggctagagctccctccttgcttgttaaaatatatatacatatgtatgtgtatttttttacttcatgactatgaataatatttatagggtaaacagaaaataggtaccctacagtgggtgttgaaattttagattttgcactttaaaatgattctaagagtcagtgttactagatgattccctgagggatcagaaaataatttccatgggtagaacagaaatcttctgctggcctacttcttcacaaaatgttcttgaatggtttgatactaccttggataaactgtatatttattctccctgccatcaatttagagaatagaaatacaggtgttcacttatataaagatgacatgggcacattaattagtgaaaaatgactcaaaatcagttattttaggatcagttatcacctttgaagacattcttctctaatatataaagggcttataggtaacagttccctataaccaatcaacgtattcatcattaggtatgtagaatgcatcttagcagactatcttgggagattcaacagaaacaatactcaaagttagatgtgcttcgctagcttaggaaagtatttcataagattcccttgaaaatattttcaagcaacaattattttagttatagccttcatggcacttggaagcctgtcttttgctgtgttaagggcaacacaaacaagaacataaatacttttagaaccatggcattcagtgggtttgggcaacggaaactagtgaacatgaggtgcttcctgccaacctcacaggtacagggtcacatctgcaacttcatggacccccaaatgatgagatggtgcccaagaaaaagcgacaacaatacccacaaaatcccaggtaaccttcccttagatcaaccaatgataaaatcacacagctaagatacacttttggacatggtttaaatagttaactgtttatctcatgacttgattacctattaggagaaaaagaaaacccttatatataagctgaaaaatcaacttttgggaaagggtagaactgaggaaaggtatgcaacataagacttcacaagcctacaataacttcaaactaaaagaagcacacatcttgctgtattcaaatgataacagctacacctttgatctgctgcttcagagctatgctgtgtacaattactcctatattgacaacttaatcctttttttaaaaaaaaaaacccaatactgcatactgtgttagtgtacaattaaaaatttaaattgtagggagaatggaagtaaggaaaactaagaacaagactgttcaaagtgttgggaaaagaaataaaagatggaagatagtttttggatgacaaggaacaaatgatctgagcacacaagcagaggactactctgcagatcagaatgtatgtgtaggaaaaaggaaacagaaaggtgtgctcagcagcggaaaggcaatggcagcagtaaatatcagagacattaccaaactgacatctgatttaggccttggggagtaaaaagaaaatgagacactccaaaagtgaaggcacacccctctgcccagactccctagcactcttctcgttgtggcctatgtatgagaccctcacccctctctactctcctgccactcctcccagcagtcccactctgaactacaaagtatctgccactcccgaactaccatgcctttaattccaagtggtgagtgtactctgatgaaatactctttcctcttttctccacttagtaaaatgatcctttaagatccagctcaagtgtaatttttcaggctccttgacacctggttgggcccacttctggctcttttaccctgtgtgtcagtcttagagcacacaccccgctcttctgcaataatctgtaggagcccacctcctgctatagagtcctcgggatagctgccagcatcaccacagcaccttttaactggtacccttccttccagtctcatggccctttaaatatttttccttgcaggctctacaatgatagtcttaaaatgctgattggatcatatcacttctgcttcaaccattttaatgactcgttagactgagacagaaacaatattatggtcacatttataccctaaggaaggtggcaaagaaccttaacaggggtttaaaactgaataaacttgctcaaaaaagtaaggaacctagtgtcaccctatgctaggaaaacaggtttcacccagtagaacatgttttataaaataatggagaaaactgtaatttaaaaaaaaaaaggcacatagaatgttctagaacagaatgtttatcactgagttatcactctaaacttgcctctactcttcaatggcaccacagacagctgattcaataaagaaatgagagtaaattaagagaagtatggcataatgtcttcttcactagactgttttaataatttaactcacaaatcttaaaagattcagtgaacggctgaaaaaatttcttccagtaagtggtagaatagagactggctacttggatttttctgtcatttaattcactcagagtattaggaatgttaggagttctgcacttctaaattttacagaatcttgtgggataccctttaagcattcaggtcggtactgagaacagaaggaaccatcaaaatgtcacgaaaaagcagagcataactcaaaatactttctgtttctgtccgtatacagttattttaaaaattcttttatgatcctaataaaagagttagatattgaccttttacattatcagagcttctgtgaagaagagattaaagtacaaaaaatgtaagttgctcttatactaaataaattatactttatacagggtttcttcccctcactgacatgaaaatcccacaaatgtgcccaggacctaccgtgccgcttgtgaacctgtttgagtaagctgtgatgacaccacatttgctcccagtgaacagctggcagctgtcagggacccaagcacaactagtcacctaggaaaaggacaagtcaaagatgaacatgcttaaaaagcatgagaatgcttctacttttctgacatttattttaaaaatatatgctcatgaaattaagataaatattttacttgaaatgattagaatggtgcaagacatagtaagagagtattatgtaactttgagatgtctaaaagctgtaaaatgtgatataaactgtcatcttttggttctcttattgcattgtcgaaagaatgctgtcatcttttgagaaagtataaaagaagactagagacactgtttttttcagttattgaacacagttgggaattcagaatttttcattttccagtgataacagaaaagaaaagaaaattgacaggagtatgtttcacagttaagagatcaatcagcagatgaggcaaagagagagcaggactctaatatgtaataatgacaataatgaaattgatcagataagcgaaatcacagagtgtgggtctttgcatgataatatcctggacaaattttctcaaactaaagaattaataagtgaatgacatattccaagaacaaaatgaaatatgatattctgatctaggtagtcatttgattggaagtactttatcacaccacatttgctcaaaatctggatcatcctgttttgctgaaaggacttgaggagagtgtgttttttcatctttaatgatgtttctctgcccaattttacatgacggaaataattttgcagtgtttaaattcttactaaaacttctaataaggttgtttttcactgtccttttattcttacttttgttagtttactagtaagccagatgacaaaagccagtgatgtgaccttttttcaggcatactgaagattaagcaaacaagtcattgctctcctttttttcactgccaaaaattccctacaagtagctgactccgtttctttcttctttttcttttaaacacttctatttatttacttctggctgtgcggagtctttgttgctgcacgagatctctagttgtggagagaggaggctactctcaagctgcggtgcacacttctcattgcgggggcttctcttgtgcagagcacgggttctagatgggcagcagtttcagctcctgggctctagagcacaggttcagcaattgtggtgcacgggcttagttgctccaaggcatgggggatctttccagatcagaggctgaagccatgtctcctgcattggcaggcggattcttcgccactgagctacctgggaagcgttccgttgactccatttctaaggtgctcagtgaatggtgacaaacattaggatgtgtgagtacgcactgactccatttctaaggtgcttggggaatggtgacagatgttaggatgcgtgagtaggcaccaggtttatgtaggtaatggaagtcagaaagcagtaaaagaacttcctatggaaagacagtcaaagagagaaggtttagcatacaatttagtcctggaaaaagttgtggcagtactgtgtgtgtgtgtttgtgtgtgtatatcgtgttttatagtttacaatatactttcacaaacactggagacatttttacaacagttttatgagagagtagtgggagtatgactactcccgttttaagcaggaggaaagaaactcaagctgggaaaggttaagtcacttgcgaaagcctacatagtaagtaacagagctggacactaacatagatcacagggatggcagggctttagcaaggcccaaggctctttctaccatacggtgatgcctgaattctcggtccatttaaaaaagccaggtacagtagatgatgctctggttattgaaaatgacatataacaaaaggcaagttaacactgagaaaaaaatcaattgtgattttgttccaacactgctgtgagctgatgccgagtaggagattatgatacagtctcaacaagagatgggaagagcaggggtcccccactcctgggccacagaccagtagcagtccatggccacacagaagcaggtgactggctggcaagtgagcgaaacttcatctgtatttacatccgctccccatcactcatattactgcctgagctccacctcctgtcaggtcagtggcacttgattctcacaggaacacgaatgctactgtgagctacatatgcaagggatctacgttgtgggatccttaggagaatcatcctgaaaccacccccctattcccttctctgtggaacaagagtcttctgtgaaaccaatccctggtgccaaaaaggctggggactgctggggtagagaacaaactttggggatatagtcagtacagcagcagttaggaaggctgtcagcactgtaaacaaggcatatgtctagcgtcatcagcttctcgactaactacaggatattaaatactagctgtcatcagtctgactcccttctaaagcattatgtttaattattattataaagtacttcataaaaatgtttacctgatattgctgtgaactttgtataaagtttattggaggctcgctttgtttactcttcaaccttaaaatgttatcagcatatccccagctcaggatggctgaccactgaatgtcagtactgttcatgcttctcacacctcaagaaagagaaatgaaagtattagttgccactgaacagttatcattggacagcccactgaaatggcaggttaaagattattctggcctttaaggcctgaagttcacatagcagaacatggtcattccagtgcaaaatcatctttatagccataggatggacctatttatgttagtttcatttctttaaggctaataggactctaaggttggaactgtattctttttcacctgtgttattttagtagggatttatttgacttagaaaaatttctattaagaaatttttataaaacacaatgataactatttatgttctgtgatgctttttcttctaataataaatatgaactaggtaacgtttaaataactttctagatacgccatactgaaaaatcaatatggagaactactaatgctaaagagggaccattgctggagcagaagcaatcctgagaagaataatttaatcctgcaactgcaaggattttgtatgggggaagttcatataatgaggttctgttcttctcttgttctactctcaacataatactacatccttttgggataaaggtctggacattctgacatccttttccagtgtttctcataatctacagcttgttggcacactgactagggcaaatgcagcataaaagctgcaggtagctggtgctgcctgtacaactaagaagctttgagttccttaaggagaatgtgagtacctcacttaatatatagctgtatctataatatatagaatgtgagtactcagcataatatatagcataaaatatagcacaatataacataatataaagcaataaaacaaataaatatttgtttaatgaatcaagagcacattaaaaatgtagttcacagattcctttttgctttgttgagtataattccaaatgtggatatcagttttgcaatacagaaattaggatagccttgctacatatatactcctctctagataagcctcaggacttcccagattttactatgaatcctggcatgtggtaagaactcaataactgtcccagatttctcattccagcaacacaagatgcaccatggtttttttaaaagaaaaataaacttcttctttacttattagaatagtagatcttaaataagtgtttgcaagaaaatgacttttgcagcatgtgcagatttagactcaagccccagagattctaatttggtgtgtcttcagtggtatactcagtaaaccaactgagtatacttgggaaaaaagcacctcagacaattttgaggcattgttagttctcaagtaattggcctgtactgagctaaagatcattaaaccatggcagtttagttgctacactgtattacacatgtgtaactagagggcagttatttaatataacagtgctcgacacacatgacctcccatctgccagctgccctctcagtcactaggaaatgcccctgtggatggttctgcactgagtatggcagtgaatgctcagagtccctggctccagagtgttcatagtctgatggacatttatttattaagcacaccagagtcaggtgttaaccattccttatgttatttcatttaataattatagtgaattaccctgtgaagtaagtccttttatcattcccatttcatagattaaaagccaggactcaagaagcataagtaattttctcaaaactacacaaaaatacacaggtattaggcagcagaactggggtgcaaattcaggcactgtgccatgtgagctcatggccataacttgtatgataccacttcctggacacacctagattctgtcaaatcccacttacattctatgaggaaataaagtgtaatttgaatgaacacagctatcacttgtgactgtagggcacaaataaggtaggttagctattatattggacatatttaagtcccaccatgctaagtaataataacagcccctttctctctgatcaacagagataaacttcaatccactctaattaatttcttaaagccaaattattcacacatttcgatcctctaagtgttattagtagtaaactacttgtgacgcatctcatagctgactgcaacatgctagtgagaataaactactgatattacaatgataattaaacagatttaccttcccctcttagttcactaaactttgataaaatggtatgtggcttcttttattactggcaactataaaggtaaccattcatctcatgacagaagggggagtgagctttttaaaagaactgtggtccagccagcacactaaattccttgaagtggctgatgctggggcacgggtgctccagtggtgggcggggccgtgaggactggaggagcacagcgcacagaaccaacaccaagaggcgtcaggcccacactctggtttccaggcaaattctgcatacccctgacaggcacagatgggtgccctcagtcattcattttagtgcttaaagcccaggcctaggaagtagggagagttctttcacattaagtaaaatgattaatttggaagggctgaggaactgcttgaatggaaaatgtcactagttttccagtgtataggtgacatttagaaatatcaagagggcctctactgacagcattttcccatgtgttgcttttagtgagtcagtgcagagaggtgagaaaaagattgctttccagacatatgtatttttaaaacctattttcaaggctatcatgatttcctcattttgttttactttcatgattgtctcttctgaggtactagaactgttggtcaagtaagtcattattctgggattcaagaacctcaaagtatatatttctataaaattgataatgttttcatcttgtgagacatttatttattcttgtctccttcaattcttcctctcatttcaaatgacactgcctttagttctcatttttttcacgtagtatgttttaattcctactttgcattaaatgaacacaaatttgagtctggtttttcaccaaggactcagaaaactcagaaatgaaacaaaatagcacatagatgaggggaaacattcaaatctcttgaaacatagacctaggatgattttcatgttttattttaccttgttctttgctatatgtcatcagaagacagaaattttgggacaaaccacatattgctctagtgggcagagcctggagacaaccaaatctttctccgtggggctggctgaagcagaccacaggaactggagcacttggggaaccaacatactccccccatttcaagccttttatccatgacaaaggactctaaaaccaagaaaagtaaaaagtacatttaaaaaatggtagtaaatatagaatcactcacggaaatatgtgttcctggtggttagatacagtgataaacaagacagatgaggaacacatatttccaaaggtggtgcaaatgctatgaacaaagtctaaggagggggagaggactgagaaagagagttgctagttagatgaggggctgggaaagagtctctgaggcaagcagacacctgagtgaaataaaagcacaccagggctctatccagggacagggcaggccaagtgaagggaacaggcagtgtgaaagtcctgaggtgggaaggaggcagttcagcatctgttcctattacaaacagacatcctgctcaggtcctgcatatgcaccaactttaattagctaatgagcaataagtatagtggcaaatgaaatggtatttattacttttcaggactgtactgttaaattattttgacatgttaaaataatagattctagttaaaaataatgaccctggtactgataatgactaaaatgatttgtaaggcttcaaaatcatgagttacactgacaagtacacataaaaccagaaacacagctttcaactatggaaaacaacatgggtgatctgggttcagcaaaacaatactgtctatcgtactgatcttttacaatttcaatcttactagttatgtaagttctgcttgcatttaacatgcaaacatatgcaaatttgatatacatgagctatgagcataaagagtttacatttagtgttctacatctggtgtatttaagtaactttataataagaaacagttgtcaaaacaaggtctctaaaaaccatttcctcttaaagtggatcacagatgactgcaatctgagatctctgctttatcttacaacctctttcccttttcattttctatgattcccttctgcaaacctctttaacactttacaactcacaggctcccaccttaagctgctttaataatgaagaatttagctgaggattagaatccattttactcttaaggcttgcttgctttatttttctatttcagaatataaattaatacttaattcctactttaagaggcagtatttcttatcatgacaatctagaggggccaaaaaatcctgtgatattttccccttaattgtaaactcaaacattgacacttctggtcactacttctggtggaagctgacaaccaggaccatgctaggcatgcttgcactggttccttccctctcatttgcaatgcctgttatgtcactgcctggtggggctttctccataatagccctcaggaaggtcacaatctgacctgagctcccagagcacactcttcatgtcactaacgcagcatcttctacacacacaactagtaatgcgggcatctgtatttaccgcctggtgcacaccttcaggctgggaccatggtactcaattcccggcctctaaagcttgggagaaggtctgatgtctcaggagttgagccatattttcctgaattctattaaaatccaaatgacataccggataggtaatttccttgacctgttctctggtttccctgaaagcaaactgcactaacaaccccacggcggcaggaagctccccttcgatgttgagcttggagccaggtctgctcgcgtgggctgattggaacagctgacgaggggtctggccataggtttttatcatggtttctagtgctcgtctttgaactggatcttcaactgcagagacatccattccaaaatatgtctgaagagaaaaagagaatgaaaggaatgtaaaaagcaagacttggtgatagtaccaaaggggaaacaacttgttttattctccaggcaatggacaatggaaaggatttcctttctcaaatttcaaatggaaaggatttttaaatgtttttgaacagggtgataatcattaatagtctcaaagagatcagaataggaatcatcaatgcttttgaatggatgaaacaaaaataatgtatcttgactagtgttagttaggtaattttataaaattaatttctaatttaagagaatatcatgtaagacgtcatttatttgcacagcaaaaggaaaccatcaataaaatgaagacagcctactgaaggagagaaattgtttacaaatcatgtactgataaagggttaatatccaaaacatataaacaactcaacagcaaagatctaattaaaaaggggcagacgacctgaatacttttctgaaaaagacatacagatagccaagaggtacatgaaaatattctcagcatcactaatcatcaggaaaatgcaaatcaaaaccacaatgaagtatcatctcacacttgttagaatggatagtataaaaaagacagagacaataaatgttggcaaggatgtggagaaaaggaagcctctgtgcactgctggtgggagtgtaaattgatgcagccagtatggaaaacggtatggaggtgcctcaaaaaattaaaaattgaactatcatatgatcagcatttccacttctgggcatttgaaagtgaaagtgaaagttgctcagttgtgtccgactctttgcaacaccatggactatacagtccatagaattctccaggccagaatattggagtgggtagcctttcccttctccaggggatcttcccaacccaggggttgaacccaggtctcccacactgcaggcagattctttaccagctgagccacaaaggaagccctctgggcatttacacaacattaatttgaaaagatgtatgtacccctatgttcattacagccttatttataacagccaagatatggaagcaacttaagcatgtacacatggaatggataaagaagaggtagtaaatatatgcaactaaatattattcagtcataaaaaagaatgaaatcttgttccaacatggatggaacttaaaggcattatgctaagtgatataagtcagacagtcagttcagtcgctcagcagtgtctgattctttgcgatcccatgaattgcagcacgccaggcctccctgtacatcaccaaggaaaataccaaacaagtatgatttcatttatatgtggaatctaaacaaaagaccaagctcataggactggtagttaccaaaggtgtgggttgggcaaaatgagtaaagggggcccacaaggtacaaatttccagttatacaacaaataagtcatggagatgtaatgtgcagcatgataactacaattaacaacactgtactgcacatttgaaaagttgctaagagagtaaatcttaaaagtcttgatcacaagaaaaaaatttttgtaactaagtagggggtggatgttaactagacttattgtggtgataatttcacaaataactgaatcagtatggttcagttaactggaaattaatataatgtatgtcaattatacttcaaattgaaaaaaaaaaacaaaatgaggtttttctttggtcttgtcttttagtaagaactcattaaaaaaaataaatttttcaattaagttgatccaaaatagcttctgcaggcaattagtaagtggatccattttttctgtggctgtctgtcagatattggtcagaaaactgagtcaacatcatttcaggtggtccacaaaatcaaaagagataacagaattcaaggatatgacaacatggagtctgaagaaaaccagaggatcctgccccactccaactttctcaattcataaggatgagaactcgaagttcaaagccacatgtgtctgcctgaaattgtgtgatattcggatgcccttttgttctttgtgtgaatatgctcaaagaaagagttggattcctctcaagacacaatggctggcgtcacaggatgactttgtgttgctaactgatatcacatcccccgcatcttgaagatgtctacaaatatcaattattgagatatgttttcttacatacagagacattagtaaggaacctagatttttgtatgtctatgtctcttctcttgtctgggttgaagaatcaagagtctaaacaccagtaacactgaaacccaagcaaagtctttgtggtttccatcttgtaagctcaagggcaacacaaccgtccttggaaaggattcttttaattccaattccctctctgtgtgtttgcttttgaggtttccacatatactgctgaacctgacaagaacctggcagtgagaagactgtaatatgatgtatattctttcagcctccccagacaactcggtgaggttgtcagtggaggaggaaggacagcttcacctcccaggcaaggggcagaagactggctgagaaacagtcaatatattctatctttaaccacaacaccgcagaaaggtcagcacacagtattcctgggactggtgtcctccacgcggtcacccttcttaggacatgaagctaaagagaaaggtgggttagggcagtaataagtctagaaagggagtaaaaattcaggatttgccatgccactgtccttttctttcccacctaatgttggtagatatatctttcaaaaaagacttcatctgtaatactacattgttgaaaaagtcacttgtccaaaacgatatataggaaaaggcaaaaatgaaactgagatacaatgctgccaggtagcttaagatagtattatttaggttctatagaaaactaaaagagaatctctaagagtagcagtgagaactgcaacctcttcgatgtaaagggtgttattacacttttgttcttagtgttagagtcagacggagagtgaggtgcatttttttaaagtgaggtgcatatttttaaagctgggtacagatctgtcatgtttgtgtatcctgcttgtataatttaactttcagtatttaatcaggaagcaaattccattttcatatctacaaataacatttctgtaaatgccaaaataaagtttcaaaggttcttcagaatcttcgacatctcctccccttgcccaccacactcccaccaccacaagcgctccaacagctgttatagatgcttatctaagcaggctcattcttcacggttgtttaatttaatagactcaaaaattcaagagatcggaataaccttatagccagagctcttaaaatttactttaaaatagtacttctttaccttctgtgtatcagtttctagtgaacctcgtatactagtgaatgatgaattaagatcaaaatgcatttttacattccttttttttatacttaattggatggcaggcattaccctgtaggcattttcttatttatgaggttggtattactgttcacattttatgaatctgcacaaaagtatagagaggttaaggtgacactgcaggtcatacagcaagtagcagagtcacagaatgaggatgtgaactcaatcctggattcagagactgtgcacttaaatgctacccttccttttgtcccacgaattgagttttattaaatttctaagacagggcatcactggtgggccagtggttaggactccgtgcctccaatgcagggggcaagggttccatccctggttggggagctaagatgccacatgccatgaggtgtggcaagaaaaataaattgtatataaaatttctagaacaatggtacaaactctatcctttataaagtctcaaagaattaatgaaaaaatctagtaagatgagaattaaatggtatatttcagcatgtatatacttttaatgtgaattttaaatgagagtaattgaaaatttgtgccagtattataggcacagagtatactaaggttcatgtccaaattcttaattgcttttaatttgtattggagtataattgcttttcaaggttatgttagtttctgctgtacaacaaaatgaacttaattgcttctatttttatttggctgtgctgggtcttagttgcagcatatgggatctagctctctgtccagggatcaaacccaagccccctgcattgggagcgcagagtcttagccactggaccaccagggaagctcttaactgcttttaaagttacattttagatcaaatatgaagcttaaaaattatacctcagtctttaaaacctttaaagcttacatatatacttctacagaggtatattttacacacaataataaaacactacagatttttaaattatcatctgatggaaccatcatgaaaatcaaggtacagagcatttctatcacccagaaagttccctgatgtcctttaggcagtcaataccctactccctggaggcaaccactgttctgatttctaccactaggagatcaatattccttgttctagaatttcaggtaaatggaatggattcatacagggtgcatcaggtttctttcagtcagcataaaacgtttcctctttattgttgagtagtattccattattcaatacctggaattgttagtcttttatttagagtcattctcaatgatataaagtggtaactcactgtggctctaatgtgcatttccctgatgactaaagatatcattgttgcttagttgctaagtcatgtctgcctcttttgcgacccgatggacggtagcccgccaggctcctctgtccgtgggagttcccaggcaagaacactggggttggttgccattcccttctccaggggtcttcctgacccgggggtcaaacccgcatctcttgcactggcaggcggatcctttattgctgagccacaggaaagccctggcgactaaagacgccagctttttttcatttgcttactggacacccatatatcttccctccctgtgtgactcttattcacctttgcatccccagagcctgggaaaataaaagcttcctgactaggataggttaaaaaataaaaaaatgtagactatttaacaacattgaaaaatatacattaaagtgtaacaatttggcttctgggaatttaactcaaagacgtaaagtggtacataaagaaataattgaaaaaaaaaatttaaaaaaagaaataattggaggaatattaattttagtagtagaagaacactaacaaaatatccaagaataggggactagttaaataaattaccagatatccatactttggaataataagtagcactaatattattatataaatgggggtttccctggtggctcagtggtaaagaatccgcctgccaatgcaggagacaagggtttgatccctgatccaggaagatcccacatgctgcagagcaactaagcctgtgcaccacaactgccgaagcctgcatgctctagagcccgtgctctgcaacaagagaagccatggcagtgagaagcctgcgcacagcagctggagagtagcccccgctctccatgactagagaaaggcctgcacggcagcgaagacccagcactgccataaagaaataaatgaaattatttcttaaaagatgctatgctaagtcacttcagtcgtgtccaactctgtgcgaccccatagacggcagcccaccaagctcccccgtccctgggattctccaggcaagaacactggagtgggttgccatttccttctccaatgcatgaaggtgaaaagtaaaagtgaagttgctcagtcgtgtccgaccctcagcgaccccatggactgcagcctaccaggatcctccatccatgggattttccgggcaagagtactggtgtggggtgccattgccttctccgttttaaaagataatagtacagaaataaaatcattatataaatgaagtgatatgtgtaggaagaagaaagtggttttgatttttttaaatataaatttatttattttaattggaggttaattactttacaatattgtattggttttgccatactatttatctttagatgatgatatcaaagttgatcttaaaatttcttccttttgtagtctgtatcttagatattattctaacaaggcacagatattgtttgtacaataaggaaaggggacgccatttaaaaacagaacgtgaaaagagttacacagcaggcctgaactgctctccttgggaaggtgtgtctggaaggcttgtccttggccttgtctgggaacatggatttcagaagagtttccaccttttttacctgataaaagtggttcactgcacccaagctggacaatgtggtgtatcctgaacgaacacctggtttccttctgaaggcccagaacttctggatgtatgagagagggtgcctacatgaccagtcctcaataaaaaccctggcactgcagccctaattctgtcagttcgttgctggaggaatggagtgagttctctgtgactcactgggttaagtctcttggaagctggtgcctggtttcctccagctctgccccacgtatcttttccctttgctgcctttgctttgtacccttcactgtaagtacaactgtatgctgagttcttgagtcctcatccaacctgggagtagtcttagggaatctctgacagatagtatctaagttattcttaaagaggcgaaacataaacctgaaaaaatcttgggcaagttcagtgtctttgtcgattattctctttgataacttgagtattgtaaagaaacagtctaatttttaaatgttcaggttctaccttatataaatgcacagttttaaaagagtcacttacagcaggatgaaaaacattgatggcttggacagaggccttccctttttgtttatacccgaataccaagtcaatccactgacagatgttctgggacacgtagtcagactctagagcctgtcgatggatgaggataaaaagacggggatcgttacgtgcccaaggagggaggttgacgtgattaacccgctcaccgttctgacgcacaccaaaatcgaaacctaaaagagaagattaatatcaatgtttatctccagatcatgcttcctttggcccactgagcagacctgaagagttcacagaaacagctattgtgtgttataaccaggaaaaggagcatccagaggatagtaacactgttgctcacctgctgacttactactcacagagctgcatggattaacactatctatcctaactgaatctgaaatctttcaaatttactcgtccaccacttcatgtcatattgaaaagcagcagaaaatcactgcctgctaattctaatatttcacttatcaaatcttcaaatgcaccaagtgtgaaaacatctcaactgtaatcttgattaaaataaagtgaaggtttttgtataagtatttcagaattattggtgttaacacataataaatttaaggctacttgtgtggtaaatgttagcattctgcaatttaaaaaactcaacaaagtatatacattccaagaatgaacttactctatttatttcatggtaaatctataggtctgttttgatttcatctccactaagcattcccatagacaacaaaattatactaacatattaaaagggttgttctgtgatgtaaataaggtgttatctaattgtctcattagactgctagtgtaaacaaaaatctcagaagtgtttctttaaaaaaattgtcctgggggagtaggagggagcctagagagggaagggatatatgtatgtatacataaaactgattcatgttgtacagcagacactagcacaacattgtaaagcaattatattccagtttagaaaactaaattaaaaaaaaaattatcctaaaggaaatgttacctttgaacagaaattttttgcgctactttttatggaaagaaaatctgatcatcatagcagaacacaaattttaaaaagcctcttaaaagctgattatgctccatatgaaagtaagttgctgtctgactgctttctgatcttgtgaaaacaactggaaggatcttcactaattttggaagtacctggaaatgatatatgatatgatatgaaatataaaccaagagcttatataaaattaacaaggggtgagggtgagggtcacctcaaaaagcccagcagtcatctgacagctgcagggtgacagtgtcaaatggactggctgagcacctccagactctgtgtggcagcttcaagggaggcagcagagattcactgattgaactgattgaacagtagtgatgaggcatgtaagggttgagcaggagaggggtgagcagcagggggctcgatgaactcaaatcgtttctaactttctggggctctggacatgtcagaagggtagacacttcacccagagcaggtacctggaggtacaatgaaaaggcctataggaacactcataggaaatcgcaggatgtatgctatggcaagttctcttttccaaaaatggctataataacacttgctgctgtgcatgcttttctagaatctcactactcccctattaagtggcaaagtctatggctccttccttttgaatgtgggcaggccctcatgactacctcccaagcagaatgcactcgaaggccatgctgtggcctccaaggctaggctggaaaaggccatgcagcctctgctcatctctctcgggacactcgtgttaagagcccggagttgccaactaggatgtccgaggctgcatgctgcaagaagtccacaacagtccatgtggagaaaccacacggaaaactacagacactaaagaaggagcagcccgccagcctgatgctgctctgtttccctgatgttcctgctgcagccaatctgaatgtaactgcacaagagaccctgagccaaaaccacaaaaaccacctggctgagctgctcctgaatttctcacctgcaaaaactatcatgggtgacacatttaatgttttgagtcactaagtactggagttacctgttatacagctatagataatgggaacatacatataagaaaccacggacagggagacaagcagcagactgactgaggcaggaaccacaaggcaggtaccccaaattgagggtgttgatatttcactgaggcatttcttacttgggcaacactatgaaacatgctctaagtaattagcagcacaggtttattaatgattatctaaataactccagagaagctagttaatacagtaaaaaattctcaagtaattggccaacacttgaacttctctaaagatataattctcaatttcacatattcctaaatgtcacataaaaatatgaaattaagtaatgaaagaaaagacaccttataaaggattaactgatcttacattaaagaacaggtatgattagctgagattgttggtcactggcatcacagaaaatctgattttattttctagtgtcgcttttcattattcagtaactctagtcagagtgttttacttctaacttagtcattactcataaaatcatcgacatttggttaatttagattgttctttaataaattcatgacttttaaaaataatcagcatattacaaattttataattggagaagaaaataaagcaatttctgtaacaaaattaaaatatacatgtttacaaatgcttttaatagttaatatttaaaatcctcaagctcatttggaaataaaattacatatctagtaagtaaagccatttctcttattggggactcaaattttagaacttacaaaagtatttttatttttggaaaattataaagtaagtacaaactctaagaaatttaaattagaaatgatttattgctgtaccttcacggttaactaagaattctggaagatagaaaaactctgggataagttctttcacatcagtcatggactcaaaggatgagaggcgccaagttgtatttgtagaatgaaaagttctgtctggaatgtcaaaactttgatctaaaaataaatacaaataacacacttaagacacaaagacttgattccatttgaaacttgtaataattaatttactttcaatacttcaaaaatattaaaatgattttatttgtccataatgtaaaagaggttatttgtgttcctgaaaataaatattactctatataatttgagactgtattatcgttaaactgtattacgctttcacgtgtaactagataaatttttatcacttgtttaattgattaatattaagtatctgtctgcccaagaagaatgaaagttccataaaaacagatacctgggatatcaaccataccaagcacattctaggaactagataattatttattgaatgaataaatatggaaggaaaattaaaatttaagtaggtaaaaatagtacgtaaaaatagtttttaccccatcaagaaacagaattattcctttacctctaatcagtaagactatttttcttctctctttctggggtgacaggggcactgcttttaaatgttctaactcttagctaaataagtaaaattccctatgaatgaaaataaactaatagttactcttttgttaagctttccttgtgtagactattgacaatcaaggactgagtttcaattctgtcttttctgtcaacagttaatagactttctagcctagaatatgaaatggtatctaaactccagctcttgagaacatcagcagtgtggattcttcttaggcaccacgtttaccatctaatactcccctcaacctgttggaatttgaacatttcttttcacctggagactgttagagactaatttcagcatcaagcaaggcacaatttttttaaaaatatgcttaatcttccccaagcctgacctacttagccaagcaatgttttctatcacttttactactttctcctctcttcagctgaatcagttagaattggctgggcactaaataaaatctggagcttccctggtggctcagatgataaagcatctgcctgcaatgtgggagacccagattcgatccctgggttgggaagatctcctggagaaggaaatggcaacccactccagtattcttgcctggaaaatcccacagatggagaatggtaggctacagtccatggggtcacaaagagtcagacacgactgagtgatttcactttcactttctaaataaaatctgggatgaaataaggtttgtaaatttttttgttgttttttctcagaaattagggagggccacttaaaaaaatactaactcgctcaggataaaaagttattaatctaaatggaatccagaaaaattaaaggcaattctgtgaggctacggtggaatcacaatacagagcgcctacagaactgtggaaacggagaaacacactgaagcttctgtttgaatttttaaattctctgtagtttcttaactttttaaataagtaatactatactataatctagaacatgtatgaactcaagtggcagttgttaacttagcacttttgttccccaggggacatttttggttctcatggctggtgagggatgccacgggcatctagtaggtcaaggccagggatgctgctaagtgacccacagtgcacaggacagtctccattacagagaactatgtagctcagaacgactacagcgccaaagtgagaaaccctggtcgcagagtcggacacgactgaagcgacttagcagcagcagcaaaaataaattaaaatgccatcacaaatcattttaaattaatcagaagaacagaatggggactgagctagtccctgttgtctttttaaaaaatcactcttaaatacacagtgaggataatctagcataatagttgattgagagttttatattaagagattcttggacgacatgaaaaaaaatgaagggcaataacagttctgttatatactgccgttgtcccaaaccacttctgaaatattctttcatttttattattattttggccgtaccacctgacttgcaggatcttagccccctgaccagggattaaatctgtgccctcagcagtgaaagtgtggagtcctaaccactaggactgccagggaattcctgaaatatccttttttattctgactgctactttttaataacagcattcacaaatcagaacacatccagaaagatgagcagaacagtgacaggtttggaaaccagagcaaacatcgcttaaataagtacaaaactatcttatttatttctgcattccttgcagcaggccttgtatatgggaggctcttaactaaggataattagcctagggataaacaagagtgagaggaggaggaggccaggatagtaatattcaaatatttggacagctgtcatatgcaacatttgttttgtgtactgacacacagaagagggacaaatataagaaagcccctttcacagaccaagtggtctacagaacacaaaatctttcctccaagaggttgcatgcatatgagtgtaaatatatagagaagttcaagaagagtccagtaattgaatggataatgattccacaaaggattctgttccaggaggaacaactacagggctagtaccactgactcactagaaactgacaggatttctcactagaaatcattgttctcactagaaacctacttgcattcaaagcaataaattcacctgtatcgaagccatcttcaggtgtgtgggctgccactgaagattattccctaggtagttactagggtgaaggtggcagtgcaggtctcctaacagccacttactgataacaacttaaaactcccctttaggggccaaagataacaggttatctgaagtcattaagttgaacattttcaaaagtgaattcataactttaaaagggagggtaaagttcttcctatgtgaatgacatcttaacttttaaaaagtgaactgcatttttataaatgtaggaaagttcaatttgaggctgaaatctgagacattatcgagatgatttggcttactgcaagtttctcttttaaaaacttaaatttattggactgcacatgggattttcgatcttcattgcggcatgcagaatcttttagttgaggcatgtgggatctagttagttccctgaccagggatcgaacccaggcctcctgctttaggagggcagagtctcagccactggaccaccagggaagtcccagcaggtatcttacggagacttttgttcagagagtaagcagaattcctttccctacagtttgattagttctaacacactctcaggatgtcagcaggctggtcccccgctgcccagtctggcctcaaggcggtcagcagccgtgctcaccttggtacgctaggaacatcttcgtgaagggcggcatcctgaccaggaagtgcagcacggtgccgctgttggagtaatgcgagccgtagtggtagggctgcaccgggggcacggggtcgtcgtcccgggcgcccctgcggtactcctcctccaggtactgcggacacgggccgggcggcgacagtcagctccgcgtgcagctgcacaggccaccctcagcttctggccatccttctctactgcccttcaggtaccatcctccatagcttgccctcagccttctggagcttctgggggcctcctccttggcgtcccagggagggctggccactcgagaagcatctcaccatctgcacgtttaccctcttagtccctcatagaaaacccacctgttctgcatggtagttctcagccctctggttccccactaatggctcataatgtttaaactgatcaacaaataagaactgccactttcaccagagatgtcttcattttaagagggtttcaagacgtaatgctatgttctttagagaaatgcttctctcacagaggaaatgcaagagaaatgtaaaaactgtatcacattattgaaattctttaccattttatagctgttttgcagtagacttacacagaaataaaaaagaatttggtgatctttcaactactcttatcttcccatcataaagtaagaagctcaaccaaagtattaatatctgtcactattctcatctcctatagtttctgtctctaataaagtcaggtaacagtgagttttctggagtcattgctttttgatttccatagcactgccccatttttagctacacaagaatcaagcagtgacagctgtaagattcctggagggatctttctgaaattttgacataagataacatggtgaatatgagaaaactgcttcaactgctcctatctttatactgtgtgaagaatacaacatatgcctaatgagtttttttgaatttccaacaggattccattaacattaatttcacagaaatggataattaacttctattttaaactttaaaatccagtattttttgttaacaaacctgtgtacaatttgctgagatgaaaaacaaggggttatggtaaattacaaatatattgatattattatatataacactagggaatataaacaggtccccggacatttttgtgatttttataaggaatatagttatttcatacatttgaatgtaacaatggattatgagcttccaatttacacaacaataagtgtatttattttgggggggaagtgttttcagagaattgaagacagaaaagaatatttaaaatcacataatgatttccagttgcctgtcagttgcacacggaagtgggaaacagaaaaatcaatactatacattgaaaattaggtaaaacacaagtccccaaaccaaaaatccagttttaacttatcaaaatacacaaggaacaactgaacctaccttgtatgtgtccacataacggtcttctttttctttatactgcacagctatgggcttggagagatttctataaaggaagagatgatggaaagcattggaagtatgttaatactgtcaggagcaagttgcctcagatgtttacaagtaaataagtgatcaacaagatactttgcccttggtttagtgcttacacatgctgcttcgccactaacagtcaccgttcacaattataattccataaactgtgaagacagaatttttctaaacagatgcatatcggtattatgaatttttgacttacaagtaacaagaagagcttctccctcctctccctggttcctctacttcctcaaatcgtagctgatgctgcccatggcagatgagtccctggaagtttctgtccccatttcctgaccctacacccagttaggcaatgaagagtgaagggcagtttggccaggagtatgatcatgaggagatgttatgtaactattaggttagtgaaaactgaaaaaaacaacacatgctcacagtgactacgttgagatttggagtgcaagtatgaaataaacattttatctaattcatggatagtgagtgacgctatgtgtctggtggagagaatgtatgtaagcatgtgtatgtctgtgctggtgtttatactgtatcaggaaggcaagaaaactggatgaatctccacttttaaaagctatagagtcaagcagcatgtctgtgtggcccatgaaagagcaagagaacagaagtcaacaaagatggacatgctccgctggctgaggtgccctctggtctggcaccgggatggagccacttggaggttcaacatctggcatgacaactagataaacatgaagatttgctcacatttcagtatgccaaaccaggtctgctgagccagggtggatatatctattttggaggaaaattatttcatagggatactaaaattagcaattagcaaacacattgatttcatttttgaaactttcataatcctaaaaactttgttaaaaagtaaaaacagttttatatcaatagaatagataaaaagtcacaactcaatatagaagaaatcatgatcctggcatgcaactttttctaaacagtataaatagttctttgtgaacacaagtaatgttgtggatggaaaatcagaagttattgatgaggcaaatagaataaaccaaaaatcaaccacaatatatcactacagcatatctggaaaggtatatgttttcctccttatttctatatgtatatcactttaaaataaaaagaaccccccataatatatatttctacagtaccatttttaatgactacaatatagaacaatttactcaaactgagcgttgtacatttaggttgattctaaatttcagttactttaaaaaatgatgtgaggactatcttatgggtaaatatttgcttgaagtgccaggcactgttattagcaatgaactggctcctgcactcatgaagctcacttccaggcataacccttctggtcaagcacatttcctaaagtatttcctaagaaaatactctaagaaaatatttcctaagaaaaaagtcctagaagttaaattgctgaaacagagtatgcaatttttaaagagttctttggttatatacagtcaaactgtctttccgaaagactgcatctctttatatcagtagtgtataaatttaaatgtacattagcagagtacaaaaatgtctaaaagagaaataatgtaccatctgctctttttaaattgacaaatacattaaactgaatctgatttcttgaagttataattaaaatattctaatatagtaagtagtatatttgcagtcaactttttttttaaactaagagaagtgtaactgacatataacgctatattggtttcaggtatccaacataatgattcaatatctgtatattcaaaattacaaaatgatcatcccagtaagtctagtaaacatctgccaccatatatacttacaaaatttttgtgctgtgttagagaacttttaagatttactctcttggcatattattaactatagtcaccatgctctacatcacatccccataacttatttcataacaagaagtttgtactatttgactcccttcacccattttgccacaactcctcccacccccaccccttaatgcttctggcaaccaccaatctgttctctgtatcaatgagcttagctttttgttttgtgtgttttgttttcacttttagagttcatatacaagtgagatcatacttcagttcagttgctcagtcacgtctgactctttgtgaccccatggaccacagcacgccaggcctccctgcccatcaccaactcctggagtttatccaaactcatatccattgagtcggtgatgccatccaaccatctcatcctctgttgtccccttctcctcctgcctccaatctttcccagcatcagggtctcttcaaatgagtcagttctttgcatcaggtggctaaagtattggagtttcagcttcaatatcgtccttccaatgaacactcaggactgacttccctcagggatggactggttggatctccgtgcagtccaagggactctcaagagtcttctccaacaccacagtttaaaagcatcaattcttcagcgctcagctttctttatagtccaactttcccatccacatgactaccggaaaaaccatagccttgactagatggacctttgttaacaaaataatgtctctgctttttaatatgcttaggttggtaataactttccttccaagtagtaagcgtctcttaatttcatggctacagtcaccatctgcagtgattttggagccccccaaaataaagtctctcactgtttccccatctatttgccacgaaatgatgggaccagatgccatgaccttagttttctgaatgttgagctttaagccactttttcactctcttctttcactttcatcaagaagctctttagctctttgctttctgccataaggatggtgtcatctgcatatctgaggttattgatatttctcccagcaatcttgatttcagattgtgcttcatccagcccagcgtttctcatgatgtactctgcgtatgagttaaataagcagggtgacaatatacagccttgatgcactccttcccctatttggaaccagtctgttgttccatgtccagttctaaccgttgcttcctgacctgcatacagatttctcaagaggcaggtcaagtcaggtggcaggtctggcattcccatctctcaaagaattttccaaagtttgtggtgatccacacagtcaaaggctttggcatggtcaataaagcagaaatagatgtttttctggaactctcttgctttttcgataattcaacggatgttggcaatttgatctctggttcctctgccttttctaaaaccagcttgattatctagaagttcacgattcacatactgttgaagcctggcttggagaattttgagcattactttgctagtgtgtgagatgagtgcaattgtgcagtagtttgagcattctttggcactgcctttctttgggattggaatgaaaactgaccttttccagtcctgtggccactgctgagtttccagatttgttggcatattgagtgcaatactatcacagcatcatcttttaggatttgaaatagctcaactggaattccatcacctccactagctttgttcgtagtgatgcttcataaggctcacttgacttggcattccaggatgtctggctctaggtgagtgtaatcataccatcgtgattatccaggtcgtgaagatcttttttgtatagttcttctgtgtattcttgcaacctcttcttaatatcttctgattctggtaggtccataccgtttctgttctttatcgagcccatctttgcatgaaatgttcccttggtatctctaattttcttgaagagatctctagtctttcccatcctattgttttcctctatttctttgcactgatcactgaggaaggctttcttatctctccttgctattctttggaactctgcattcaaatgggtatatctttccttttctccttacttatctgtatggtatttgtctttgtctgactttttcacttagcataacaccctcaggggccattcatgttgtcacaagattccattcttttctttttttaacactaaatagtattcttgcatgtgtgtatgtgtctgtgtggcattttctttttctgctcattcactgatgaacacttaggttgtctctgtatcttggccactataaataatgctgcagtaaacatgagggtgcaggtatcttttagagttagtgttttagttttctctggattaaatatccagaagtagaatggctggatcataggatagttttaatatttgaggagcctccataatgttttccacagtggttgcaccaatttacattcccaggaacagtgtacagtttctctcttctccatgtccttgccacgagttgctatttcttgacttttcgataatagtcagagaatgttatttaaaactaaagaaacagaatattcccgcatcacctatggctatttggttactctaaaatgcaactctttcaggaaaggcaggataaaagcttaattcttttccttagctgtcaaatctcaaaagtagagaattgttgccccatccaacagcaaccaataagtttagttttgctttgttttaggggcctttgaacagggaggcctggcgtgctgcgattcatggggtcacaaagagtcagacacaactgagcgactgaactgaactgaactgaaagagtatcattattaacttcagtattttccttttacttaaatgtgtttcaatcagttatggtctttatactttttgatgctctgattgtcctatctttggcagtgagagccacttcaagttggctcctaagtcctttatttttttataattatagtaaaaaaacacacatcactgaacttaccatcgtagccaccctccagtacctagctcaatagtgttaactaatttacactgttgtgcaatagatctttaaagctttttcactttgtaaaactgaaactccacacctactgaccaacaactccctatgtccccatccgccctcttccgccagcccccaacaaacaccatttaactctctgactaccctaaacaacctaagtaagtggaatcacatggtgtttgttttcttgtggctgacttattccatttagcacaatatccccaaggttcttccatgtgacaggacttccctccttcttaatgttaaataatgttccatattacatatgcaccaaatttgccacaactattcatccacagatagacacctgggctgcctccacctcttggctactgtgaataaagctgcaatgaacacgggtatgcaaatatggctcccactcttttgacaagactgtattaattttcttgctctctgacacaacaaaatgtcccaggctcatcttatgtgctttcttctaataaatgtacaagaaatgagaaaataggaaatcactatttggtaacccccagtgaaatcacagactcaagaaataatcatcaatgaaacaaacaagttcaatggggggctgaagccacagatccccctaagcatccttaacagtgggatatcacatgcctcctgatatggggcaagaaaaagttcacatcactacccctagagagtttttgcttaaaaaaaagttgaacctgagtctaagcaagcctttagaagtaatttccagtacctaggaaatacagcagctagaggaaaaagctaaatgctaatgtggaacgggggacattcgacaagataaatgacccttttttccttaaacaagccaatgttaggaataaagagaaaaatacatgcataaaaataagggctgttctaagatttatgtctttagagacaaagcaaccaaaggtgatactgagcctgattcaagcaaatcaactatataaaaagacatctttgatataatcaggggacatttaaaaataggctggatattagatgataccatgaaattgtttttattttctttgatatgataatggcactgaagttatgtaacaaaatgttttacttttttcttaagagatgtatactatagaacatacaagtgacataaatgtgtgtgacttgtctcaaggaaaaaaagatgatgcaagtttggcaaaaattttcataattattgagttggggtgatgatcatatgggagtttattacacattcattctgttttttgcatgtttgaaaattttcacaagaagaactttaatgacataaattcagcatgttgacaaagccaataggtgatgatgtcttcagttacctgtagactgatgggtcgctgaggtcaagggtctcactaacatagtctgccagtatgaacgggaacactggatactgcatgagatcattgaaagatcggccggcatgtttgtttaagtgagtcagatactcaaaattagtaatttgcccagtataccacaaatttgtcagagcggtgatattgccatattccagaagattagggaggttattggttagtatactgtggtatacatcatcgcgaacctagaacagaaggagaaaaaaacagcccagattttatttttagtcttgacactttcctccaaagaatccatgatatcataggcatgttactaatctcaagtccttcaagaaaacactttttgcccaagaacactgactagtggggaattaaaattcaaatctaggtcttcctctaaaggttgtgctatatatatttatttattgaagtacaatattatattagcatcaggtgtacaacatagtgattcaatatttttataaattatactccatttaaatcttatttaaaaatattgactatagtccttgtgctgtacagtatatccttatagtttattttctacatagtagtttgtacttggtaatctctgcctgttctctccccactcataccactagtttgttctcctcatatttgaatctgtttctgttttgttacattcatttacttttggctcttaaccactatgttttgcagctggagaaatcagtaagaaactaagaagtctatacagaaaaatcacttacatacagaccctaagggaaaaaaatgtcaataaaagaaaatgaagtgtcttcatctatataaatgaaacacgctgtagtagaaagagcacggttttctgaattagacagaccaggtcttttttcttgcttaaaccttttgtgctgtagttcccatactgtaatatggggatgctgctgctgctaagtcgcttcagtcgtgtccaactctgtgcaaccccatcgacgatctcctaccaggctcctctgtccctgggattctccaggcaagaacactggagtgggttgccatttccttctccaatgcatgaaagtgaaaagcaaaagtgaagtcgctcagtcgtgtccgacttttagcgacctcatggactgcagcccaccaggctcctccgtccatgggattttccaggcaagagtattagagtggggtgccattgtcttatccaaatatggggatagtaagatttatttcatgagaatgaaataaaatatcctacataaaaacaggatacctcattttcactactgatggaaaactaatacgtgaactctttttttaagagattcagaaaagttctgtcacagaaaaagggtgttctgatttcttctaaagcaattaaatgataattggtaataaatggaaaaaaaatagaggaaccaggcctttctaaaaacaaatttgaattacccctcttaaatgtgtatatgcttcaggcataggaagatgagccaaagatgcggatgattagagatgagactaaaagtgaatgagaagaatgagcttagttatggaacaggcataagatcacagggtatttaagaacctaaacctggaggtctgtttcacaacaatgtgaatatacttaacactactaaactgtatgcatgaaaatggttaagatggcaacttctatgctatttttttaatcagaataaaaaattttttaaaaagttcaaagcaaaaataaaaacctaaacctacagcctaaatctgaaggttgccagatgctgaagctaaggttggtgggagagaatttatgacagtttgcatactaaactctgcaaggaaaaggaaacatttattcattcaacaagtatcgattgtgcacctatataccatgctacagctgtagcacttaacaaaacggtctttacattctgttgggcagacactgttggatgctatgaagttctctagagaaaagaggaaagtcaaggagacaaagggattcctgggggtaggagtgagaaagggttgctgttttaaatacataatcagggaagtctctctgataagaggtcatttgatcagggaacctgaaaaaagtaagggcgtgagtcatgtagatttctaagaggaaaagcattccaggcagcattttagggagctgtaagtgcagaggctttcacgaatcagtgtgcctgctatagtcaaggaaaaggaagtctccacagatggactagagacagtgaaggatagaacagtagaagataaggtcagaaagaataaggaagtgctaggttattcaacactgtaaggtcccggcttttaatggagtgacaaagacagtggtcagagggctctgaggagaggaatggcacaatctgacccattttaactgctgtgttgagagcagtctgaaagaagagggagtgcggaagcagggaggccagtgaggaggctagtgcaatgatttatgcaagagctgacagtgccttagaccaggatggcagcagtggaaacactcagattctgggtatactttgaggggcgaaccaactgaatttactgaaaagagcagatgattaagaggagtcagaataagtaggatgacagaataagaggagtcaaggataaccccaagatttttgaactggccaagcagaaagggtggagttgccatttatggagctggggaaaactggagattttagggggaaaattagaagttcagttttgtccatgttaaatttgagatgccaattagactttaatgcagaagtccagtgaggaaggtttcccccccactttctttaaagaaagaataatcagctgtgtcaaatgctgctgctaagtcaagtaagatggagactaagaaacacaactgtggggtttagcaacattcaggtcactggtgatgctgaccagaggtcatagtggggtggtgaggaagaagtctgactggagcattccaaaagagaatctgaggagaggaactggaggcagcaagcacacacaatttcttccaagaggttttctatcaagacaagcagacacacagtagctgaagcaatgtggtagtcaagaaagggtttgtcaaaaatgaaacctactatcaaggttaaactacttcaggttggttatacattcatttatttacttattacagatacagtcactctggggaataaaaatttaatacagttttggaggacaaaaatagtaaaagatttactttaatcagtactaagaaatagggtaattttcatttgacttcagaaatagttaacgtttaaataagttaaaacttcatttagtcagtatgagtgtaactaaactgattccattatctttttgaaaaagtatatcaatataggcaaatttaccttggtgttatcaaatgctaacaggagtgttctgccatttgttaaaaatatttctacagcattatccctcaactgccaccaacgcttgtgaacttctttaatttcttcatatgtccaggaaaacgatgctggttccaattctccttgaaggctctaaaatcaaaggaaataacatgaaagcatttgctctacatgaaacagaatcattttaattttacattttaaaacactatcaaaatgcaatataaagccttccttcggtggcaaagtggcagataagactctctaaaaatcctcctgctactaaacacttcaaaatgctggataaaatctaaaaaaaaaactgagttaataaacttcatttaaactttattaataggctgtattttccagagaggttttctgtgtataaaactgagcagatagtatggagttcccacatatggcttgtctgcgctcagtttcgctacagtgaacattttgtactcatgtagtacatgtgttacaaatgatgagccacttttgaacagattattcttaactaaagcccacagtttaatcttggtgttgtataggtcaaatgggttttgacaaatgtttaatgacatgtgtccaccattacagtatcatacagaatagtctcgctgctatgaaattcccttctgctccacccagcaccgctgacttttttgttgcctctactgttttcctttttctggaaagtcatatggttggaatcataaagtatgtagacttttcagactgatttcttttagtaagcaaatattattttaaatgtatagctgagcatgcaagaaaggaagggaaaatgatatctctaggagtcaaaaataaagaggaatttgaaaaacagcagtaaggaggaagtgacactttggtctgctctgtgtgtatcttactatgtcccaactaatttttagaaatggaggcaggaaatatattacaaggaaagcaaaatgttttaatgaaaagataatattctcattcttaaaaccaaattcttccctgtttagcttcaacactcaacatactttcaatttaacaaacattaattaagcatctataggcaaggtgcttgtaagtgctttgcatgaaataaatctatacatgataaaaagggggcacaggatatttgcacatgctttggaaaggcaagacagcaaatgtcacacagaaaataagcacaaatgctacaaaagtacagagaaaagaaggatccttcaatttattaaaaagcaagggtctttttagagcttccatttgggtggaaaaggtcatcttttggacccacccaggaaaaaagctgattcatgtatcaactattaaactcttttgttctaaaaagatacatctttaaaaataacataactgtacttttgctagctgggataaatactgtagtaatgctatgtaagtcacgaaataatgcctattcaattttgggggattatatgaaacactttaatgattttttaacatgacttactttacaataatattttatgttttcactccctaatttctttgaatcaaatatgtattaaccagtaaatcatacataagcttatttaaatgcatccttatgaattcctggctttagaacttttgaaacaaagagccttatttttcctgttacaggactctcaaagcagtattttaatggcatgtaaatgaattcaaacaaataaaaagtttattgtaccaaaatgtgacttgagtcttttttgttattttcaattaatataagtatttccagaagaataaaaattatgactactaagctatgtgaacattcagattacttaagttgttaaatcagacaatatttttctttctttttgaaggcaaatgtatgtgacaataaacagggagtggcaagaattctgatgctacagaggatagtagtgagaacgaatggacataaactgaaataatatgaatgcttcagaatctgacccacaatacttgctgctatgaggctcagaacatgagtcagaggggatggcatggtctttttaaaattatcttaaaaactggaattcagacaaatttacacagagtgtgacaagaaatgaattaacagttctacctgctttctggctgtattaaacttatacatgtgggaatttgtctagattcatataaatgcaaatttaaaccgctactcacagaactctcaactgtatcagaagcgttatcttccacaaaatacattccacatttacctgcagaaaataattggctgtgagtttaaaaacgtctgtgcactattatcttatatagttaaaagcacctctagagtcaattggaccgaacttgaatcccagaacccagaaggagttcttaatactcagtaagtatggttcagaggttaaagcgtctgcctgcaatgctggagacctgggttcaatccctgggtcgggaagatcccctggagaaggaaatggcaacccactccaatattcttgcccggagaatcccatggatggaggagcctggtgggctacagcccacagggtcacaaagagttggacacgactgagtgacttcactttcactttcatttttgaatagcatccatgagatcctgggcaagctgcctaaccccactgtgctttagtttccttataaaaagaatcgggtagggagaagactctatttcatagagtcactgcgggaattatatagaatatatgtaaaatgtttattaacagtgtctggtgcttagtgctaaaaaagtgttggctgtttattaccagtattcttcttaggttactagcatattacttttattttgtacacattaactgaattcaagttataaactaaattttctagcaaaagaggaatccttaatcattttactgacttaaacactcaatagggcagaaaagtaatgtgttagtcgctcagtcatgtttgactctttgcgaccccattggctgtagcgcgccaagcttctctgtccatggatttctccaggcaagaatacttgagtgggtagccattcccttctccagaggatcttcctaattcagggaccgaacccacatctcctgcgttgcaggcagattctgtactgtctgagccctgatggagccctaattttcctgcttgataggctgttgttaatgcacatccctccatcacatatccaaacagtgggaacttcctggagctctgcactggatgctggtcaccctgagccctggcatggacagctcaaaaaagggcaccatctccatcctagtgactgtggggctcagccctggcaagcttgaaactctgcatgttagggctttgaggctatataactttagcctactgcagtgactctccaatttgagggtgtgtcagaatcactgctggagaaggaaatggcaacccactccagtgttcttgcctggagaatcccagggacaggggagcctggtgggctgaggtctatggggttgcacagagtcagacacgactgaagcgacttagcagcagcagcagcagcagaatcactgcaaggtatataaaaatgtaatgtctgggccccatccacagagtttcagattcagtggctctgggcaggggcctgagaattcgttttgcttagatgttcctatgtgatctggatgcccctgatttgagaacaattggcccacagcatacaaatcagttctttaaggaaatagagactatgtggtttaacgctattccttcatgtcttgaggaaaaaatgtaactatccacggatagttttggcccttttctcacaagtacagtgaagaatataaattaagaataatctcaaggtggatatatttcatgtgtatagggatatccattaaaacagtaggcatataaacatactaatgattctttactttagaattaaaaattgatacataataaaagaaacaaatttaaaaatgcatacccatgaacaaagttaactttataaaaagtaaaatgccgttcatatgcttttcaaaaaataagactgtcatttcttcacattcatgagtcatatgcgttatgacagtgttaagggaaaataacctatacaatattagagacagtttacctcatttaatggcagtctgttaaaacaatgttttaaattatctaagaataaaataggcacagtgaatatgtataaaaatcttcaaaatgtaacttacctaataacaattcaccagctgtctctctagatggtgcaacgctgatacaccttcgattgactctgtcaaaacatatttaaaattactacaattaaatgttttgaacaacttcagagaataaaagctttattttgtctagtagaagatttcagcagagcaggcaagagtttcaaaagcacagaatgtcttgttagagtccacatgaagatattatctcatttctgacattataacagcagagaaaataacagaaacttttagaaaaggtgaataatccctacaccctacgcagaatacaaggactcagttatttaaaagagacttcaatatttcatattttccaggaaataagcaaacattggctcgtgcctctgaacaaacccaggaaagaaatggagcattataggagaaaagggggattcagagtcagaaaaattcttctattctttagtctagtcacttaatcttgactctcagttttttaactataaaatgggcctgataacaacctccactacaaccaagtgacagtcctatcagtagttaccatactgacccacagtcctcaacaatgctatgacacgttagatgtgacttatcttcctcacataacagactaagactgaagtccaatgaaaactccctatcaaaactgtctgatctctttggattttggccattcaactttgccctctcttgagccatgttcaggtcttttctttctttttttttttttttttcaggtcttttcttaaaccactgcattatctaaaataaacatcacataagcactgcaatagactactgaagtctctaacacattcaacaaaagagaagtttcttatggattcaaatttaccttatagactcacttgcagccttgtcttttacagtagaagagaaagaagaatgagttttgtcttcaaataggtaagagagtggtggtttgaccacatctgttgaggaaaagagattacatcatctttgtgtaatgaccactgttatctactatttatatgttgagtcaagaagtcactattaccttctgatttctgtcgatccctaagcagatacttatttggaatagttaagtaacatctctgtaaacgtctcctctctcgatttggcccttctgttggatccaactgccatgaagttggatagtagatggggtcataccagactgctctacaggtagaaagaaaaggttcaagtggcaatttgaagtacttataacttaaaaaaaatatgtaaaaatttaacacgtaatcaaaactgatccactcaattgaaaaatcccaactattgatataactagacagggatatgcatacacatggctttccaggtggctcagtggtaaagaatctgcctgccaatgcaggagactcaggcgacgcaagtttgatccctgggtcaggtagacaccctggaggaagaaatgggaacccacgccagtattcttgcctggagaaacccatggacagaggagcctggaaggctgcagtccatggggttgcaaagagttggacacaactgagcgaccgagcacaaacacactgcatacacacagtacacaagaataacaacaaaaaaagtatccctctgctctggagtccagtctccttgtctcaaggcaagcaagaaactgctactagttttttgtacctattaaatttttaaaaagatacagcatgactactatatatgctttgtgatatattagacttagcgtggtcaactaaagaaaaaaaatcaatttccaaataaatttttttcatttcccattttgcctattatctaatgtaataaacaaaattattcatttttctagtaattacatttctaaaaatgttttaaaataaattaacatttgaaatgaaaggaaatagtttatagaaatagataagagaagtaaattatccttaatcctactaccccaaacataccaaaatattgttagtgattttcattttttaaaattacagttataactcatatacacacatattttcttatatacacattcctatatcctgccttctttattaccattttaagtggctaatattatattgagtgaaaagatcctactgtatttattactattgttatatacttagttgtttccaattcattcactaacataaaaaatgcagagatgaaaatctttgtttattgattttgcatattttgaatattttccttaggacagaatcactaaaatagaataactggaactagaaataaattgcttatagggttcctgatatattatgtcaaagtataccatgctaccaaacctctgatcaagagctaggatacattattcctactgtggagatgagttcctaaaaaaactttttattttaacataaaaggtaaaatacagtatctaaagattttgaaaaactaaattagcctctagcaatattcaatttttcccatctgcttattaattctacttgtcttatgtgaagaatatattcatgtcttttgctcaaactttggggattttaatttttattttcaaactttatgaaattttaaaataataaaaatactaactttgaaatacatgctgaaaataaattttgttgtggctatgcttgttaaatacactggagaaaaattaaagttcaaagccattcatttcttctttgtagcttcttcaattgtgtttgatcttaggaagttatctatcagagttgataaatactctattttcttctgctttgtaaactttttaagtttaatttattcattcacctggaatttgctttagtacatagctcctcaaagtcataatactaatcagttatgttaaccaaattcagagaataatattttaatttccctcttttcactatttgtgatgcatctttttaactgtgttactcaagtcttaactagaaaaagaagtatttcccaactgtcttgtttcagtgatttccctattcttttgcaaagactgtatgttaaaaagaaagccaataaacagatattactctctggaagagctaatgtctctctctctcattattttttctccctcccaagaattaaaaaattctcataggcatattctttaagaggaaataaattacaaatgattaaacaaaaatatttaagctaatgagatagtattatgaatctttattctagagtgaaaataacatcaatataaaacatttgtgcaagaccactgaaagccctcccacattgcccacctgtcatgcgtcagttgttgaataagctcctgccagtgtctgctggcactcagatccactttgtacattcctctgatatgctggatcaccttttttctctcaattccttgggaaagagacactgcctgggtgatatctgcagctattttagatatatcctttgattttgaatccaaacgctgaaagagactaaacagacaagaagcctgtaagttaagcatatgtataggaacattaaatgtatatcaaaacatggtacattaaaactaaaagcatatgcaaaatataatggggctcctaaaagacataacttttagcacacatgaaatcctacctttgctgattattattaactgttttctgccagttagctttattcacaccttcttcagtttcatatttcctttgttcctaaaagatttagataataatatactatataaaacttattatttatcatttaacactggcacagaacccagcaaactaaatttaaaaacaagtaaacaaaggaaaaaaaattgtctcctggagaccagaatattaaaataatcagctacttaaataatgttctaattcccctttgtttccacacactttgggtcacagaaattagggtggaatagttaactagggctgccaaacccaatgggtttgcatagctgcttgcttccttattttgctttttcactaaagaactgagaacttgaggctgatgattcaacttgcttgtcactattaaaaacctttttcttccctgaaagctagtggtaatgaatatggatgaccacagagaataaaatgctccttaaaataagattatttgttttctcataaaaaagcaatataaagtataagaaaattatcatttgaaattcaccatcagtggtactctatagtaaaaaaatctctcaatcattctttagttacagtcaatgggatctcctaagaaagccatttcttttggtttcactgactcacctctttgatcactctaataaggtctgattttgttgaggcactgggagggatgcacttatgaccacataattttaaagcattcataagcagttctgctgtgtctagttcttcttcagtcaattcatctttgtgattatgtatcaactctgacaaatacaaaactaatttggctccatgctttaaaaaaaaaagtaacaatttttttaattaaaaaaaatttaagtcataaagaatttgtatttttacatttaaattctttaacagtaaattaaattttattgctgcatttatttggctgaatctggtttaaataaatcagctaaaaagacattttggggacaactgaagaaattctcaaatgattatgcactgagtatatgatgacattagagtatatgcttggagaaggcaatggcaccccactccagtactctcgcctggaaactcccatggatggaggagcctggaaggctgcagtccatggggtcgctgagggttggacacgactgagcgacttcactttcacttttcactttcatgcattggagaaggaaatggcaacccactccagtgttcttggctggagagtcccagggatgggggagcctggtgggctgccatctatggggtcacacagagtcggacacgactgaagcgacttagcagcagcagcagcagcagcagagtatatgctaattttgttaagtacaatgttgttatggtgacataaaaaagtcttttgaaaacaggttgtgatttatataatttgctttaaaatacctcaggaaaaaaaattatgataaatatgataaaaatactaacaatagttagacctatgagatggtcatatggtattcattaagtattcactagtctatttttcttagtatgtttgaaaatttttattgttaaaggtaaaaaaaagggaagaaaaagaggaaaaaaagaagaaaggaggaatagaagtaataaaggaaagaaggaaaaaagcacacaagcttttggggaaagaattttagagagggtttgctaaaggaatacagaaaataagcttgggatgaaggaaaataattcttagttcttctcatagaaatactgaactggaagggaaactttcctttaaatcttaagctaagagtctctttaatttctgcttgggagaataaacactggagaaaataccagaacaaaaaagtatctttggatccatttgtaagcattcactgttccctggggagaacaaaaggtgaaaaactccaaaaccagttaagatgtcagcattcagtatgtgaatatttgggagaagggttggtttaggtcagtcttttatgaacaggccctacagacaaaatgaaaatgttacttaagaaaatgaaaatggtccttcctagtgtacaactaaaacaaactctgattcacgatttcttaagtggatctttttttttttttgagcacacatgcacacttttattatctatgctgggattccaaaagacatggctaccatttttgctttagacgattatttgactttggaaacatgtgaaattttatttttagataagctttgtttataccaattttatgggcctccctggcagctcagacggtaaagatttgcctgcaatgtgggagactagggttcaatccctgggttgagaagatcccctggagaacagaatggcaacccactccagtattcttgcccggagaattcaacggacagaggagcctggggatctatagtacatggagtcacaaagatttggacacgactgagtgactgatatgcacacacgccagttttagtgctttttatttattgtgcagatcaaagcttttttccgttaagtggctctttcatgccagagatattacacctgattgttaagtgtacactatatattatttagacattaactttgccaacaagttaaacatgcataattttattttttaacaatttgcatttatacaaatatcactgtatttggctttacgatatttttaactgtgaatagtcaacaaatggatttggaaactattacattttaggtgatatttaaattcacatgctgaatcacatcatgtcgtttcccaaaagcataagatgaacatatgcaatggtgaaaatagcaaagctcattttaatgcaacattttaaattagtcaggagacagctgttagctgaccaaaagagaaaaaggaacagatgctctgcaagtaaaaggcctgaagagttggcaaataaagaggaatggtaaaggactagaatattttcatatgtgcatcttaaaggtaataatcttgatagaactctaaaaatatttgtttagtattcggtgacattttaaaatcatcttgaaaaactatcagaaatgttttttttttttcattctgaatgtccaaagaaacatgattttcctagacattgaagctgtttctaatagctcattttaacatcttctgatcaatcatttattgactgtagtttctgggactagaaaagttgtttttggagacacacacacatagaaatcttatttcctgctctcaggaaactgatttaaggaattgaatttaaacacaaattcttagaaaataatacaatgtataaaaataaaattttcgatgaagtttcaagaaggaagagttctgaatagactaaaagaaggaatgaagattttgaaggtggtaccatatgatgtgggtgcatggctaaatggacacaacaggcatacagacagacaaaggggaggagagagcgcgttgcgtgctgtggacaacatgaagaaagcagctatcagaaggacaacaagggatatgaagatgttatgagagaaaagatgaggagccacagactggctggagaattaaccaggttcaattgaagagaagcttggagctttaaaaatcaggcagactacagatggaatacagcttgtaggcagttataaaaaaggcataagaagagctctctatactgctgcagaaccactgcaggatatattgttagctgaagaaagtagagtgagaagcgtgtgtatcgttcattaccttttttcctataaagaagtgagagagagaatacatacgcatgcccacatgtgtgtgtatcacaaatttgcttatatctccaaaacaaataaaaaccaaataaggatggtaagctacagggaaagggaaagaatgagggaaggctacagagataaacactagaaactcttcaactgtgctgtatttcacaattttgattttgaaaccaggttgacattttacagatggctcagatggtaaagaatctacctgcaatgtgagagatctgggtttgatccccgggttgggatgatgccctggagaagggaacggcaatccactctagtattcttgcctggaaaaccccatggacagaagagcctggcaggctacagtccatggggttgcaatgagttggacacggactgagcaactaacactttcacacgtttatcagctttgcccactaaaaacgctgagaagaaatgacaatccagtagaaatgaacatacctagtccttagatttgtagtttctaaatactattatttcattaaaaggaaatgggcttcttggggaaaaagtttggttgcaggtctagggaaggaaatatacaagatgagcctgggacattctttgctccagaatggaaggaagttaataaagctgtgctgtgctcagtcgctcagtcgtgtccgactctttgagaccccatacactgtagcctgccaggctcctctgtccatggaattttccagacaggaatactgcagtgggttgccatttcctactctaggggatcaaacctgcatctcctgcctcacttgcactggcaggtggattctttactactgtgccacctgggaagcctcaagttaatcatattaacctgttaaaaaggccatgttaaaagtatacaacaacttgaatctacagacgtgttcatttgaacctgaaagagaaaaataactgcaaagatttgaaactacttataaaatttataaaacaatatctgagttcatgacaacatcttaaatataaaaacaaatacaaaaattagagtttgctagggcaccaagttattattctaaaaacaaacagatgaaagaaacaagcctttatcttgcctttcctacagagactatattttagggtagccaaacagctactaagggaatattcttccctatagaagaatcagagctaacagacaatggtggaatgagaaacacagagaaatcactattttgaaactcctaatgaaaaagtggatcctggcaactatcattaatggttactaaaataattaaggactgagggtgaactttataatggatgaatcaggctgctaccatctcaaaaaagcagagcaaccagatgttttctgcctgttgccatgatataatggaaaatgaagtatttttaaaaaaaaaacaaaataggaaataaaaaaactggaatctagtcaagcctctagatctagaaccacaaagatacaactaaacaaatccagaatgtgggagagtctatagaacaaatgactcagtttcatcaacaaataatgacagttaaaaaaaaaagattggggacagtaattacaaggattaaaaaaatgtagcacacatcaaacaaatattgtgcgggccttgtttgaatccagaatcaagagaattatccaaaaaattaaaagaaaattgggaaaatttaaacattgggtattagatgataataagtaagtgagccaactcactggagaagactctgatgctgcaaagatggagggcaggagaagagggcgacagatgatgagatggttggatggcatcaccaactcaatggacatgaattggagcaaactctgggagatagtggaggatagggaagcctggtgtagtgcagtccatggggtcacagagagttggacacgacttagcgactgaacaagaagaagaaggaattactgttactatcacagagagggatatgttaaaataaagtcctattagcagagatttagactgaagtatttacaggtaaaataatctgatacctgactttatttcaaagtactacaaagaaaaattaaagtcaggttatggtcatgtggggttcttttttgatttcttccaacttttaagtttatttgaatgttgctataataaatcttccatctgaaccatgagggctttgctagtggaatctgggtcgggaagatcccctggagaaggaaatggctactcactccagtattcttgcctggaaaaatcccatggacagaggagcctggcgggctacagcccttggattccacagagccagacacaactgaagtgatttagcaggaaggataataaatgttaaaaaattaccagatagagtaatttggtcttgaggtggagaggaggctattgtagtgatccaagcattaggggtgaaagcctaaagttgggggtggagcgtgggcagaatatagggaaagacaggactaaataaatgactggccttggtgatacaatagattcaagagaaaacaaagtcaaccacagttgcaatgtttcaagctgaaagcagtaaggataccaccaacagaaacggaaaagtggagaagtgaagctggtagaagagaacttgaaacatcatggttggattcagagggatggcagcttagctgagaataaagcaacgaaagaacagctctttgactatgtcttaattttgcctgttcttgggcttcatatgaatggaatgataaaatgcctgctctttggtgtttggctgtccctttcaatgacaccatgattttgagcttcatccatattgatagtagtcagttcatttgtattgctatataacagtctaatgcataaatataccacagtttagttatacattctcccactgacagatacttgggttatttcccgtttttggctattagtaaaaaggctgtcatagacattctcctactagtctttttatggacatatgctttaatttctcttaggtaaatatctaaaaatggaattttagcatcacaggctaaccagtatatttaatttcataagaaactgctaaacagaatggttacaccacttaaatcctccatctactgcttgctaagtgatacaatttatagattgcaaaacaacttgagtattttgattttaccattccagatgatcaacaaatattttaacttattgtaaatatttttgaaatatgttatatgcactattacttgggccattcagtatagatgtttcatggataatataatgctttaaaaagcctccaaactgttcttaaagaaaacacttcaagatttagtaacatactatgaaggatcttataagaactcgggtatagaacttaaacactggaaaaaggaagggggattaaacagattaaacaaattgactctggtaagtggcatctgaaaaaagacctcagaaaatatttgtttagttagaaaactatattcatggtatttggcatgaaaatacagtttagattcagttcttgatttgtatagttttataatagctgttactcatgaagtattggggtacttacttgcagggatgggctaagacagtctcgcagtatttcctgatgatttggttcacgaactatttcaaaaatttgctttctctcttgtgaagggtgggctggagacaacatatgcacgagcagtctcccaagttgcattcggaaggtttccttacaagaccacaagattttagcccactgctgtttggaactactggttttacctgaagccttaaatcaaaacaggaatgaattaggatcaaatatcttaagcaataatataataaccctaacacagccctaaaaaatcatggaacatgttttattctagaattttcaaacagctgaaattaggaagatatacacatccacacaaacagggttttaaaagagatggatgtgcatcaatatttatagtggcattgttcaaaacagcctaaaggtagaaacaattcaaatacccattgatggatgaatagataaacaagtgcaatatataccaacagaacagtggtttatcagggactgggggagagattaatggggagttactgtttaacgaacacagagtttcagcttccgataacggaaaaattcctagggatggacagtggtaatggttgcacaacaatgtgaatggacttaatatcactgatttgtacatttaaaattgttaaaatagcaaaatttatgttatgtatgagtgagtgatctcgttcggtcgtgttcgactcttcaagaccccatggactgtaggaacctaccaggctcctctgtccatgggattttccaggccagagtactggagtgggttgccatttccttctccagaggctcttcccaacccagggatcaaacccgggtctcccgaattgtaggcagacactttactgtcagaaccatcagggaagtcttattttaccacaatttaaaagggagagataaagaagctaaagtcctaagacacttaaaaaaatagccagggtttggaaattttaaatggccaaaaaaaaaaaaaaaggaaccattaaagaacaacagtaaataagcctacctggattttacaatataaaagagaaggattcataatagaggcttgaattagtactaaaatattgaatattttagtaatattttagctgttgttgtttagttgctaagttgtgtttgactcttttaagaccccatggaccaggtgacgctggtaaagaacctgcctgccaatgcaggagatgtaagggacccaggtttgatccctgacttggcaagatcccttggagaagggcatggaaacccactccagtagtcctgcctggagaatcccatggacagagaagcctggcgagctacagtccataagatcgcagagtcagacataactgaagcaacttagcatgcatatatagactgtaacccattaactttctctgtccatgggattttccaggcaagaatactagagtgggttgccatttcctgctccaaaggatcttcctgacccagggatcgaacccttgcctcctgtactggaaggcaaattctttaccactgagacaccagggaagactgaaatattgagtaaaactgtcacaaattaagaactgtatataaattgaccatcaatatcccttaacaaataaccaaataagctgtgcttttgaaggtggtcccataagggttaacctaatcttgatcaaatatcctttatctggtttaaaaattggaatcagtacattttagagtttattctgttttggaaatggctctccagttactcctagtcctaagggctctttgtgaatgactcagttctaagtggaacctgcagacaaccaaatctagttatactggcagaatcatgatttatgagttctgctagaattagattagcctttgctatctatgagtgtactgaccaatttttcccctatgttcaactataaatgaccacaaaaacctaagtgagttgatgataaatggagcctgatgcttctcagtattctctacataattttgaagatattagacctgtttaagccaacatctgcacttcataattatccataataacaactctagagtaagcagctataaataaagtcctttaaaacaggttattagtttaagctctcatagtaatcatcaaattcctattcttttctgatgctgattttatttaataaattataatattagaaaatagcttttgggttatagacttaaaaaccaatgctgcatgaagtaagtagttctgaaaaaggcaaattagcagtacattttacttcattattaaaattcaagttgtctgagtttcagaaaagtctgtgaaagtgtaagaatatgattttgaaaatgtgtaatacagacacttctactcctgagagagaaggggacgacagaggatgagatggatggcatcatcaactcaacggacatgagtctgagcaagctccgggagttggtgatggatagggaagcctggcgtgatgcagtccatggggtcacagagttgtacatgactaagcaactgaactgaactgaatacagacacataaaacctctactccttctttgtgaatgaacatttcccaagtaactaatttactcacactagatactttgaatccttctaccagatacatgaacatttctttctgaaatggattgaaaacagaaggctgttcatgatgaatattttcttcagaaatttcagtctgggaagctgaggtcctgctttgagttgtactttctggagtactcaaaatgtcaataatatctggattaaattctttgaattaaaagaagaataaaaaattaggcaaatcactaatactgagccattataaatgatagtggcaaaaatattctatgtaattactaattccattgtcacaatataaacacgtaatagctgcatttgacgtaaaaaatacaatatactaaagaaagtgaattcacctaaaacaatgcagaaatttaagcatacatgagtcatgtaatcctaaattaaagctttattttactaatgaagatgaattaaactacaaaattattaaagtcatgaaggttcttgtacaatagaccatgtgatatttacattagatagatgtgaagacctgtttaacaagacatgctatcccattaaatgctgtgcatgtgataacagttgtttcacagtttactctagaggctggttgtcccaaatataaattagaaaagttaaaaaaaaaaatgggtgtcacttgaaattttttagaattttggcttatttgtattgtttttgagtatatttctttgcatagcttttttagtgttttttataggcattaaagttcatacataaacatataaatcattagctcctgtagaagtgcaccttgaaaccacaaagttatagcccaacattatgtatcagaagggctaaaacggaaaactgaaacttctaatgctggtgaagacatgcagaaaactggatcactcatacattgctggtaggaatataaaattatactgccactctagaaaagtctggcagctccttagcaaggacaaaacacacaactatcgttccacctagaaactgcactcttggctatttatcccagaaaagcaaagacctgagttcacacaaaaactttcacacacatctttatagcagctagctctgtttgtaatagccccaaactggaaagcacccagattgtctttcaacaggtaaatgattaaactgtacacccatactatggaatattacttaccaaaaacaaaaagggaacagattattgatacatgtaacatccaggatgactctccagagaattatgctgagtgaaaaaagtcaatcttacacatactgtacagttatatgctgtatgattccatttatttaacattcttgaaatgatgaaaatacagaaatggagaactgattgatagttgccagcaattaatgaaggggtgggtgtgggataaaagtggatgtggctctaaaaggcaacatattcttattcttatagtgatggaggtgttctttttcttgagtgtagtgatgtcaatatctgggtattgatactgaactatagttttacaagatccatggcagggggaaactgggtaaagggcacacaggatctctctgtagtatttcctaacaattgcatgtgaatctatgaccatttcaaagaaaagtataaaaaatatattggaggtactatactattttaaatttcaatggtcagtctaggccagcatttaacatattaaaaaagtagaattttattcaaggatactgggtccaaataaattcttttactagtatggatactaaaaaatttttaatgctgttaaaaaatctgaaatttagtcagttctctttatcgtctgagccaccagggaagcccctctcttaaattatgctcatttcaatatctgagcaagaacacatttattctctagtcctaccttgataaacaatcctgttaactgcaaaaacggtgagcctctgcaacctctgtgcaagctctgtttcagtcgcctggacagggttctcttggctcattctccgttgcatcatcacatgaagttcatcacttgctactgaacgcattttcatcagcagagagtcagtttgagcaaggagaaattttcgaggacctttaagtatataaattaaaacatcaagtgctggagttaacaaggatcaaagaaatcatttctgctataacttttttattatcagacaatgaaaagaactttatttaattcaaaggtaatttatacaaggaaagagagtgattaagagaaagtgatttttccctctttgaagaagtgcaacagtacactctgatttcaaagtcctaaataacaatgctatagcttgtgacatagcttagtaggatagatatcctttggaagaattttagccctctgaaaaactcaatcagaagggtgtatatattcaaacattttcaaataccgtttcacttcttcgtattccaaaataatcaatagatttttttaaagcatatcatgtttagcaagaacattactatttttgggtaattaacattgctgaaatggcaacgcactccagtactcttgcctggaaaatcccatggacggaggagcctggtaggctgcagtccatgcggtctcaaagagtcagacacgactgagcgacttcactttcacttttcactttcatgcattggagaaggaaatggcaacccactccagtgttcttgcctggagaatcccagggacggggagcctggtgggctgccgtctatggggccgcacagagtcggacgtgactgaagtgacttagcagcagcagtaacattgctgaattttataaattatttttgagacgtgtatatagtgacatagtagaaatcagtcaaatacagtgaagaactcagaaaggagagtgttatttcagtaatttattattaaaatgatttgaaacatgcatcacatgtgattcagtcctacaaaaagcatttcctgagaaaggtttcctcaggctgaagaggcaggggtggcttcctgcaccattactgcacctgctccaagaggcaccccgcagggagtggatccaggagaaaagcaggtaactgagtcttgatttagtggactgaagaagggcatcggaagatgaccataggaaccaaaatgacatcttggtaggtgaggaataatggaatccttcattggaattgaacctttttttaaattatgaaagtatatatcaaagtccacaaatagcctctataaacattacttacaataggatttaatgactcatcctgcaagatattgaaatattttactagcattttagattgtccagtattttaggtaatcagtatttttatcagttaatacagcttggtgtgtagagtcacctttgagacaaaaatggagcaaataaaaagagaaattcatatctgggatatattcaaggataacattatcagattacgttagtttaagcaagtcatcctaatctctgatacaacagacctggaagaagtgggtgtgaaaggacacaaagagatgggtgtggggcctccatctagcagtttctaattctaggccttggtggatctgtgacacgaggaagctggactggatgactttcaaggtcttttaccaaattaaaaatttttaggatactataagcctcatatatgtggctggaatgtgaagtcaagtgggccttaggaagcatcactacgaacaagctagtggaggtgatagaattccagttgagctatgaaagatgatgctgtgaaagtactgcactcaatatgccagcaaatctggaaaactcagcagtggccacaggactggaaaaggtcagttttcattccagtccctaagaaaggtaatgcgaaagaatgctcgaactactgcacaactgcactcatctcacacgctagtaaagtaacacttaaaattctccaagccatgcttcagcaatatgtgaaccgtacatttccagatgttcaagctgatgttagaaaaggcagaggaatcagagatcaaattgccaacatctgctggatcatccaaaaagcaagagagttccagaaaaacatctatttttgcttcattgactatgccaaagcctttgactgtgtggatcacaataaactgtgggaaattctgaaagggatgggaataccagaccatctgacctgcctcttgagaaagctatatgcaggtaaggaagcaacagtaagaactggacatggaacaacagactggttccaaataggaaaaggagtatgtcaaggctgtatattgttcccctgcttatttaacttctatgcagagtacatcatgagaaacgctgggctggaggaagcatatgctggcatcaagattgctgggagaaatatcaataacctcagacttgcagatgacaccaccctcatggcagaaagtgaagaagaactaaagagcctcttgatgaaagtgaaagaggagagcaaaaaagttggcttaaagctcaacattcagaaaactaagatcatggcatctggtcccatcacttcctgggaaatagatggggaaagagtggaaacagtgtcagactttattttggggggctccaaaatcactgcgaatgcaatcatgcagccatgaaattaaaagacgcttactccttggaaggaaagttatgaccaacctagacagcacattaaaaagcagagacattactttgccaacaaaggtccatctagtcaaggctatggtttttctagtagtcatgtatggatgtgagagttgggactgtgaagaaagctgagcactgaagaattgatgcttttgaactgtggtgttggagaagactctttagagtcccttggactgcaaggaaatccaaccagtccatcctaaaggagatcagtcctaggtgttcactggagggactgatgttgacgctgaaactccaatactttggccaccttatgtggggtactgactcatttgaaaagagcctgatgctggaaaagattgagggcaggaggaaaaggggacgacagaggatgagatggttggacagcatcaccaacacaatggacaggaaggcctggcatgctgcggttggttcatggggtcgcaaacagtcggacactactgagcgactgaactgaactgaacgttaagataaaatcaaaactccttaacatggcccataagaactggtccacaccatcctgcagcatctcacctggtggcaccatctcatcaaggactacactccagctacatggctgtctttcagttctctgaacaagcttagctttatgctacctcggcacctgcacatcagctgttcattctgcctataatactctaattcctttctcatcccttgtattgaaatcttacttcctcagagacttccctaaccctacatgtaaatcaggttgccctgctctgtatggtctcttatttctatcctctgtatttctcaaccattttatggtagaaaggtaggatctgtgtctttcttaatccttgcatctttaacatttaacacagtgtttggcacatggtaggagctcaagggataactgaatgagaacagcactgaagagaaagctagagaataatttcctcttggaggaaaaccttctcaaacactacagtttaacttctgaaacaaagcaatgttttttaaaatgtgagtgatataagaatataggagagtcaaactactttctatgtataattagtaaaatattatttaaatactcaccagcaacgctctttcgcttttgaaacattgtatgatggggagcagaaggcgactgaagtgaatctgtaaggttttcagagtcatgatttgcagtggtccttataaattccatagcagcctggagaactctaaactgtagagcaacagccatatctaaaaacagaagataccagaatgttttcaagctatgtgattgtaattgagttgacttttatattaatactaatgcaatatcgaaagtgttaataatgttttattagacataaatttcaaaattttgatcatgggttcttgatggtagtaaacattttttaactgtctttaaaagcaactttaaagcaaatttctaaaggatcactataaaaaattcagtggaaaaatactagctcacaaatgtatttcatttcatgtaattgtcttaaaagaataggctttttaatacagaaggcataagtttaaccaaaagtttaaaatgtgaaattctcacatttttatgccccatatgcactttcatattcgctaccaaagaaaattaaagggtattattagtcaacataagccttttaattttacttggcaagaaaaatcagcagtttcttttaatgatatgttgccagctactaattacattagggtgtcacttgtaatttttgccacttaaaaaggcttgtttttaaagccagtaaacaaagttaagggtgaacatttagtagaacagtttcctctcctctaacccactctctctatagaagccagagaaagagatgaggttctgataacagttttggctattatacaactgctccccccaatccataaaaattaaatcttactttgggtcctcctgtttttgctattttgaagatatccaagcagtacaataagatcttcaataactctaaaatactgtgagcctgaggaactgcaagcatgaattgtaactgctatgaaaagttgctgtatatcacaagcaagtaatctgtattcattcaaaggaatgctaaagaaaaagaataaataatttaaggcaaaaagaattggtttaaattcctgttctgttagcatgcactcattcatgcattcatttgatatttatccatgcatactctatggcaggtcatatgaactacaggctagggacagataaaaagatagactttgactcgtgtcaaaattcagcttgcagaggaccagacaagtgaacaggtaactataaccagtaaatggtgtaagtgtaacaacagagactaacacaagatactgtgggcatgcaccactaggttcccagcccccaggggttctatgggtatgaagaggtatattctgaggctcctcaaagatggtgactctgaataaattaattgacctctctgaatcccacttatataagtatggccattttacgggttaaaagagacaaagatttgaacatgtattagttacttgcacgtgtgctcagttgctttggtcgtgtccgactctttgctaccctatgaactacagcccgccaggctcctctgcccatggaattctccaagcaaggatactggagggggttgccacgccctcctccagggcatcttcctgactcagggattgaacctacatctcctacatctcctgcactgcaggcagattctttaccactgagccactggggaagcccacactaatcacttataagtacctaataaatatgaattagttacttctgtccctcaatttttaaccttgatcatccacctcagtgtgtgatattaagcttccccactccacgttttcaaaatcaagcaagagttagaaatgataacttttgaggccaatcaatagagtagcatgtagggacattctgtaagcacaatttatttaaaacaacagcagtaacaaacagctgttagaaggagcctgctggtacactttccaagttctaccaatttcatgtactgtactgtaatcaagactagatgttttgaggaaatacgttgtatttctcatctgcccaagacacagaccctaaataagacaggtgtccagtgaaaactgaactaagccgactatgaatcctctcttgtaccaagagagtctccctggcctagtgagtctcccgggcctagagaatcaccgaggataggctctgccttctctgcaaaagtatattaatatttaatgctttaacatgcagtaagatggtgcttctgaagatttgtaacattaatattatgctaataaaaatgttattctgtatatcctaaatgaggacaccaaaggcacaaaacccaaataaaaatacaacctcctaacatatttttctaaattattaatcaatctggtgggcaaccatttgccaatgtacttctgactgaggagacatatgtatacttccggctgattcagttgatatatgacagaaaccaacacaacgttgtaaagcaattattttccaattaaaaataaataaatttaaaaaaaggaaattcagtatggtagttaacagtgggagaaaacagtagtaggaaaagtgggagagtatgttgactgtaaagcagagacttttgaagtgagaagattcagcctcaagttctctatttactagctatatgatccgcaacaagttattatatctctcaaattctcaaatttcctattccagagggggataatactttctataagaccatagtggaaccttggtaaatatatctgaggacaggtagattggttcaggggcttcctaggtggctcacgtggtgagaatctgactgccagtgcaggagatgcacgttcgatccctgggtcaggaaggttcctcagagaaggaaatggcaacccactccaggattcttgcccgggaaatcccatggacagacaggccacagagttggacaggactgaagtgactgggcacacacacaaatttgttccttgttttcaggttctaaatacctaaatgtaggtcatataaatatctttaaaaaaaaaagaaacaaactttattgaaaacgatagaaaatataccctctcaaatctaatctaatcagatctgaaggaaagaaattctttgaaaatattatggaatatcagatgctttaaggtaacctgttactgaagttttttcccttccaaagttgttaatcagaggtagtttaaaaaaatgatttaaacttacatcttttctaatccattcagggttgctactgtattacataacacgtagagtagaccattatccaacaacatatctgctaccttagaacaagaatttaatatttggagaagaagtaagagagcattatgcaagagcacattgtcgtataaggaggtctctattagtcccagtataggaatgacagaccacttctggaaaagtcccatgttgctcacagcttccaaatcaaatctataataaatgatacacaagagcatgttagaagcaactaaccatgaaataaggaaaaaatgattgcaaaactggccattttgttgatctgattttgagttcttgtacactatttgcctctgtgatggaggttatggtttttccagtggtcatgtatggatgtgagagttggactataaagaaagctgagcactgaagaattgatgcttttgaactgtggtgctggagaagactcttgagagtcccttggactgcaaggagatccaaccagtccattctaaaggagatcagtcctgggtgttctttggaaggaatgatactaaagctgaaactccagtattttggccacctcatgtgaagagctgactcatttcaaaagagcctgatgttgggaaagattgagggcaggaggagaaggggacgacagaggatgagatggttggatggcatcaccaacacaatggacatgggtttgggtgaactccaggagttggtgatggacagggaggcctggcgtgctgcggttcatggggtcacaaagagtcggacacgactgagcgactgaactgaactgaactgaactgatggagggaagttattgacgtgttttacacctcattttccttatctgtcaaatgtgtgcgatgacatctgctctactttcttctcaaggctgttgggagaatcaaatgagatgatgcagaatttctttgaaaaagccaaaagcttatgcaaatgaaaagcaatactgtcaatgctacaattagtaggtcaattccttgatgtttgaactggcctacttgcaaacaagtatcagacacttaacaaaaagacacatttctctctactttatcagacatagaaataacagcttaacatttctgccaaacttttggcttgggagataaatgttctttaagttttgcatttattcattaatccatgagcattacaccagggtcaaagctcaggagtcggtatgccggtttactcttctctcagataaccagcatccctgaggggagttaggagcttgtctatggatcccgcatgtaatctgctgctgagactatgggggccaccttcttctcaggttaactctgtatgccaaaacttaaatatcactttcttttatttaatgcagcatttctttcttttcagtgcctagctagtgaatgaaatgcaaaggaagaagttatagaaagaataccacatggaaaataaaaaactggttcacctggaaaatgacttctagcagattttttctaaaagtgatagaataattttaagagtcagtttaataaattttacatttaagacaaaagatccccaattctggtgaagggaagaatccacttactcttcatcaaggccaatacgtcgcccaaagaacatttcaatgaagcattctaataattcctgagttccccgatgaagatataactggttggctagtaaagaaaacccacgattcttcagaaatttatctttttgttccttggatgctctattaaaatatgcatctaatagctaaggaaaaaaattaagacaatttagataatatattaaaattttatataacactacaaatcacacagtgtactatacctgtagttgtaagttgtttaacttcacgtgtatagaacatacaaagctcaaaaaagagggccacctcttcagcaaaacaaacaaacctaaaactttctctgtgactactatagaatgctaatgatgctctctgtcctggaggtcttgggtagccttagttgaatataagtagaacatttgtgcctaattctgaaaaaagaaagattagtcaacactgtacaatgctttctctcaaagaacaaaaatatatatcctaaacctctatttttctagactttctgacattttatttattctaagcataggcctaaatttttactctttcccagtgtcttaaatgtaacatatatataatcaaagtaattatttttccttccaaactcacttctttcatggttctggtattggagcacagaagcaccatcctcctagactctaaggctgatctcactttgggcttctctcatcctgactgcccacgtgtgattagcacggtctctctcctctattccagggaacgtttctcaagtctgtcagtcctccgacttcccacctccccagatcagggactcagtatctctcccctggatcacagtgcgagcctgtgaacacagtgctcccaactctttcccctgcgatcactccctcacagtggtgataagactattctttcctaaaacacacatctctttactgccctacttaaaaatctttctaagtttatagcataatacaaaatacaccttttgcatgaatcctgcccttgttcacccatcagaattatttgtttttcctatgctcccattcttctttattaagactaccactgaagcatccatcacagaagttcttacattttacttagttgtgtatatgtctctctcccacactggtctataaactcttgaatgcaggggcttattcccttttatatcccacagagcaactagcccagtgttttacacatgagatggaagctatgtaaatactgggttgaactgagactgcctacacaatgtcccacatcaaattaaaacagtgggattctttgaagacccttttaaaggcttgtttcctaatggtaacaattcatatcaaacctttattcactcaataatgtacttaggaccttttatataacaaacacaagatgcctaccctcatggagcttatatttcagagtgggagagtaataaaaactacataaacaaattaaaaaggtaattataagatataaccaggatgttattataaaacaaatgaggagtagggctagacagaagatgattagggaaagtctctctgagaaggtgacatctgaacttaaacctgaagttaagtgtctaacatttgacgataatatactcaggagagacctccaatgatctatgtgttccttgtaagtagcagatttaaaaatcacactgatacaaagccatatatggaggaaggcttaaaattggatgataatacatataaaaattgggataagcagtaataaattatatcagctcatgatgcttaagaataaaataagatttcaggtctatttgaatacatgtattcaaactttaaagtacacatatatttattcttccaaattaaagcaacatatttagtatctgcccttactttaataacttcttgttgtacagcaggtgatgggtggttggcgaggactaaaagcgtatctgcttgaatgagcccgtccatcacatcttccagcataacatcaggcaggatgagaagaactccacttaggagttcatacaacccacagcatataggtaccaagcagtcttcggttacactaaaacagagacccacaaagggtcataaacacaatatcaggggaaaaaagtagtgcatcatgactacctcacgaacagtgatgagcagtagtaattttcacatgtgaaacataagttcataaggtttaaaaatgtttcctgatttaactgtgattaacagatttgccatcaccttttaatcaccagcagtttttagatatatagtctactaaacactagtctgctctacctctgtgatttccaagtgccacctgtgctgtttaaactatttaaacattcagttgctcggctgcactggccacacttcacgtgagcatgcgtcttctgagtggaccccaccagcgaccattcccatcactgtggaaagtctcactgatggtgctgatttggggaacaataataaactgtacaaccttcctaaactgaagagcttttctctaataatcatatggaattaaattaaccataagataatcatttcttctagaactatttatggtttagcctttagttaaatatggaattatcacttagtattacagtaaggagaaaggcatctttgtttgttgttaacatacacgttgtactatgttacagaataaagaggtcacagaataaagagatttctacaagtacagaaattcttcaaagaacagtttaaaaaaagggaggaagtggttgtcatacaaaaacacatgtacctgtgagcacctgtagttcggctgtggtgtggctcataaccgacaggaagagcgaagttttcccagtcgttggagttcctgtcaacaagacttggccaccggccgacagccgcagagccgttctgagaggggaaagctagccccaggctggcaatggtgctgtggctgcgctggaacgaggccagtcccttcaggtaaagaggtcggcgtgggcaggactcgtccccaggactgtcgtcgtctgatctgggctctgctccgaagtctttctgatctatgttgaccgccggaagttccaagactccttttggggcatcactgacagaggcttgggccgaaagggcagcttccgtttcacaaaccatttttgcagactcacagctactgacgaaggcatcttgtttggttttttctagtgtctcggaactcctcagagggctccatttctctggctgggaagcaacgccatcatctacaaaactctgtaacttgtcaatactacaacccaaacttccagtcagtttccatggctttatgtgaggtgaagaagtaggaaatgctgggaggcttctagaacgcagcatactggcagctacctgctttggaacagcactggatgacctgtttcctggtaagagtggacaaggaaacagcactgaaaagtcagctcagtgggatcacttctcttttgtaccatcagtcccaaccacagtaataacccatttatccagtgatgttagtgaacacatacaggataatgactgtagtgactaatgcttaaaatctgtgttaaaactatttttgtttcaactacttttaattaaaaatttcccaaaatacctatctcttgtttccttaataaaatacaatattgactgagtgattcaaagttattggggtgaatggtcctaatgaagtgaaattaagtgaattaagtgaaaatccatttacctcaggctaacagtcactaggatgcagtttgttttagattttcttttttgaagtggacgttttttaaaaaatcttttttgaatttgtttacaaaatgtttctgtcatgtttttctcttttgttggccacaaagcatgcaggatcttagctccttgaccaaggattgaacttgcatcccctgcattgaaaggtgaagtccccagggaagtcccgaggatgcagtttaacacagtggaaagaatgttggctttttgatgagacagttctgttaatcaggtggccctaggtaaataatttaattatatgagtgttcatttcttcaaaggtaaaataagcacataataaatatgtgctgaataaacagcagtgatagccatacttggtgttattattaccaggctaaatgtccctagactgttctctcactcctcatttctgcagtcactttttgctgctattattaagaaataataatattcctcttcttgccacagctctccatttttctgctcctcatattctacacagaaggagatcagaaaaatcactctcatccttagtgtatgggatataaatgaatgctcctgaaggtgtggtctgtgggccaggagcacgggtatcagcaccgctgcgtgactgctggaaatgtacattctcatgctccaccccagacctactgaatcagaatgtagaaggcaggggccaggggtctgtgctttaacaagctttccaggtgatttttttcagcatctaaaacttgaaaagtgctgatatacagtaaataaggactgaatgaactgtttagagctcaggctctgtggcaatagaatagctccatagttcagaagttcttcctagttatttctggattttggctggaggaataaggctgccaaaagggtctgttcaaatgacctggaaaaaatgagggcatgattgtactagaaaaagtttcagaatgatgctcaacgattttaaaaatgacacatcctataaaattccaaataaaactaattaaaacacagccttaaaatattataatacaaggccataagatgtgctagggaataaccgaaactctttgggagagaaagaaaattggagcttaatacccagataccttcacctgctatccatgtctctatcttactggcctatttaataatttgtatcagagctggaggtgggacctagtctttcattggctaatgaaatctatgctgaaaggagaaaagaggcagagaaaacttggggatgatgaaaaagaaaccagaaagataaggaagttgtcatagggagtgggagactggaatttcagaggtgggatgtgttctttgatgatgttcaagatggacacaagcagactggaaggtaaagtagagggaaggtccccagggtcaaggatctcagtgaggctgcggtatggatggccactcacatggtaagtgaagttgtccagaatgagttcagatggaaaggagacagtaagccaaacaaagtttttgaagaaaatgagaaaataaatcagaagcttaatgaaagactgataaacggggacaaagagttccagaatataagagcatgagcctcatctatctcccaagctctcctgagaattacttgctatactgactgtgagttactaatattagaaagcagtaaatggaatccttaaatatattctgtaaagtttagctttccatttatttagttcatcaggttgtgcaaataggcatctatattcagaactaaataggaaagggctacactttcagtatcacttttgtttgtttgtttaccttcaggtggtgaagcagtaaaatctgatgggcttattatcataaatccagggctagtaacagactttcctccactgctagaatgcctcaagtacatgattgactgcactttttcctgaaagatcttgccatctagaatcaaaataaattttgagaaaattttttaaatggataaaacaaaaatataacgttaaaagcaagtcattaaatacaaatatctacaaaaatattcaaagtcaaaaaaatggtatcagttcagttcagtcactcagtcatgtctgactctttgcaaccccatgaattgcagcacaccaggcctccctgaccatcaccatctcccggagttcactcagactcacgtccatcgagtccgtgatgccatccagccatctcatcctcggtcgtccccttctcctcctgcccccaatctctcccagcatcacagtcttttccaatgagtcaactcttcgcatgaggtggccaaagtactggagtttcagctttagcatcattccttccaaagaaatcccagggctgatctccttcagaatggactggttggatctccttgcagtccaagggactctcaagaatcttctgcaccaccacagttcaaacgcatcaattctttggtgctcagccttcttcacagtccaattctcacatacatacatgaccagaggaaaaaccatagccttgactagatggaccttagtcggcaaagtaatgtctctgcttttgaatatactatctcggttggtcataacttttcttccaaggagtaagcgtcttttaatttcatggctgcagtcaccatctgcagtgatttttaagccccaaaaaataaagtctgacactgtttctactgtttccccatctatttcccatgaagtgatgggaccagatgccatgatcttcgttttctgaatgttgagctttaagccaactttttcactctccactttcactttcatcaagaggctttttagctcctcttcactttctgccgtaagggtggtatcatctgcatatctgaggttattgatatttctcccggcaatcttgattccagcttgtgtttcttccagcccagcgtttctcatgatgtactctgcatatactttatactaatgcacattttgatatgtgaggatactctacaatttcttagattcttttgttaactaacattagctacattaacttctattttctttgaattctgactgtactcatagttatttctatagtttaacagctaactgttcattttttatatgctaacatgatctttccaaggatcacgttcatctcttcattacttgagggaaggtctatgtcttcttttttacacagccccagtatgactccaaaaattaatacatccagcttaatcttcctttctgagcttcatacttctaaattcaactgctcgatttcttaaatgcaacacaaatgcaacaaatctaaatgtgagtcacctttctgccctaaattcactcctgcgttgttctctggttcccatggtagaagtacccgtttcccatgcaggatctgggagccacccttgacctttcctttcctttacccatgtcaagtcagtctccaggttctactgactttgtttctggaactcttctcatccctagcacagtgctataatgcaggcttttatcatccttcacctggattatcatcacagacttctaaatgatatctgggatggacatctggccaccctcaaatcctcatagctaccagcattctctccattaaatggtaagctctgcttaaaaccttccagggctctctgttgcctccttaccactctagataaagtccaagtttctcatctagagcaatctccatgagctgtctccatgcccctctaccagccttcttccttaatgtcagcaacaccaagccatttgctttgcctggaatgcccttcccttcaactcctagtcaactcaactcagagcaggtatctcctccttcaggaaatagccccttgcaatgcattgctatgctttgcacatgttatacttacctgtttatgcctctcttccctttactagactgtaagaccacacacatttaactcatctttgcaactaccctgtgctaccagaatcttgacattactttattcactagatgtttgctgaacctaatacaaagtcatgctgtataatttcatttggctttttactgtagctgtatcattttattcactatcacatggcttaaaatggctgtttacaatcagtttccctctctaaatttactatttagctttctcacatgtatactctggcttgctttcttaccacatcacattttccgagttctttaaaaaatctgattccattttttaaaaaaatactgagattactctttcttgttccatcctttaaatagtattaccaataattctatccttagcttcctttttccttctttctcccaacacttttcttcagtggtctcatctgttccctgagcttcaactcacttctatgcacattgttcctctatgctgaattttattgtaataacttatactggttggctcaaaacaaacacaacaaaacaaaatccttcaattactcctgagaagaacacaggttcaagttctctgctcttatattcaaggactcatttaatatgattttgtgtgtggttgaatacatgatgatcccaaactacatttatgatattatttctctactcctttacaaatctcctatattaggtaaaattcactattctttattttctctattttgccttgctttaagtcactctcttcacctgatagtaattctctaatctattaatacctatcaaaattcttcaatgcccatggcagattattaatctattaaatctctctccacatctgaagatgaaaccctaactctcctgaaatcaaatcagttcttcttttgtatctatgaggtacttgccagatattatttattgtaattatttcagcacatacatttaccctcacctcttggtttttaagttctctgaaggcagagactatgtctagttcactgtatggccttctgtcctgtcccaattccagcgtgtaactgagcagtttctagcacagagttcattcaatgaatatgaagcaaacatgatcaaatgggaagaaaaaaacgaaagtggaaatagccaagatctaaaaaaaatgattatacctacctatgtgcaaagaaaaatagaagtttgtggggttgtgacaaacataagtattagtaggaggatgaaccgctaacaggaaattgaagataatcgtcagtaattccaaatctggaggagatccaaggacttctgctgtaattttcacaaatgatttacaaacctctcggggcatggatataagctgcccctctttgtgttcctggaaaaaaaaacaactctccttaatttaaaaagaactgtcaacttaactaatatttctcatttaagcaagataattttgtttaagatagaactgtgttggtttcctgctctagactagatatttaccataaaactgagttgctatttctctattcaagcaatcttgttattaagatgtattaaaaccatggccccatataaatgttagctactactagtactattatcactactgcttctgctactactgatttggttcaaacgagaaaatttctgatagacaaaactggttacatgaatagagtgtgttccagtctacaaagttattactcgcagcagctcagagaggttttatccttcatttctacaatatgaaggcctgaagtgattgtatatctaacttaaaccacatagaaaacatctcagtagtgcagcataagtcacactcagacctttgatctccttctactgcaccatctactgccttgaataatcagacctggcagaatgctacataattaccaaaaataaagacagatataaataaattacttatatattccaactctacctccccagtgcatagcagctggcttctagatcaaggctagatctttcctctctgtccaaatacacagtatacctctacatccactcttcttcatatattcttttgaactgctgaatcagaaaacttaaaatctagatattaactttaacacaggttagtttgactacctcagatatacggagagaacaggagtctacaaaagtcagtcaagatctcacaatggccaagtcaagtcaagaacacagatctcccaatttgcaattcagtgttatttctgccacaaccatctttttttttttttctaaatcgtacccctgtgacttcccagggctcctggttaccacttcaatcactcattcttgagttcagcccagtctaagcttcttcaactttgccctctccaatgactccttacaaatagtcactggtatcctgctgctgctgctgctgctgctaagtcgcttcagtcgtgtccgactctgtgcgaccccatacacggcagcccaccaggctcccccgtccctgggatcctacctcattaaaaaaaagaaacaaaaaacccttaaattgacctattgtgaagcttttgttaagtctgtttctctttccttttgctgttggacttcctaataatcatgtattctcactacctccaatgatccaccacacatgcttaaagttcccagaaatctgggtcttgccttcttcactctgatgaaatattgtaagctattaagaatttccaagctgacggcattctctctgtccacattttctgggaactttctacctcatttggctctacagaccacccctgtctgggcaggttctcctctctctgcccattttctttacctctttcacagaaaaaaatctcattggaagttccacagaatttcagtccatggtactgagttattaaacaaaaatcactgcagaaaatacctccagaagtaaagttacataaggagtacctgcaaaacctggcaggtcagtagaaagtgatgaactactcgagctttcaataactgcttaatattaaacatctgctgctggtggtctgctctgatgaggacttctagggctgccagcagagcttcccaaacaccgtgctgagaaaacaaacatatgcacagggttactgaaaaacatggctcatgctttttagaagacacacaatacatcagtttaacactgtgtaaacactcacaatttgtcaaagactaaatctgcctgaaaaagcaaatctaaagatttattccaagattattattttttttgacaataggtcatttctaaaaatttatgttcaatgcaatgctgcattaggggctttaggacactaacctttctgtggcattaaatgatgcacagtattttcaaaagatgaattatcttggggaacttatttaccatttactacagagaaacacattatccatataaattgtttgcaaataatttattttcaaagagcattattaaaaacatatagacttcaatgctaatttgtatactcagcatttaatcaaatacttttagaaaaaaaatttactaaactgaaaatatttactgacagtgtagaaattctgaattttggattaacttacttttaagtccaaattatagaatcctccacacaattactaaacatgcagtttaaaactataattagcatcctcttaaggtactttaaaatgcttctcccatagtattcacaataataatgaaaaagaaatcttacatagataatcactactgaaaataatcttcacctcattttattacttcaaataatctttcaataaagctatcaacaaaaagcaaaattaacaggtttgggttgtaggtttgctgtttttcctgccattacatgatggaaatgaataatgaaaaggccaaggaattgatagacttaatcatactattctaaccaaggcctctctcttaataggacaggatcaagatgccctgaaagaaaaaggcatatgaaaatttgaagacaaagcagctcaaatatgaaaacctgattcaggcctgaaaaataatactaaaatagaatagtgcctaagcaaaccaacaaccagacaaccaacaaacaaaaaccagaacaactcagctaaaaaagcaattagaaaattaaaaaataaaagaaagaaaattttatctcaaatccatagaagtatccatgcatatcagttttgaatttgaccaaaaaatgctttgcttgttagtcaaacttttttaatgctcaaattagcatcgtcttttgaaatactaaaatagctgtcgattttcagttaagattccaactcataatccacaattgagaggtttctttactacatgtttacagtcattccacctttggtccagtttgtttgcatctactatcactatgtgcgttagctttctctccttgcaacatcatgtgtatttttatacatacgtaaatttgttgttattgattagttgctaagtgctgtccaactctttgtgaccccgtggactgtagcccatcaggcccctctgtccagaggatttcacaggcaaaaatactggagtgggttgtcatttccttctccaggggatattgctgatgcaggggttggacctgtgtctcctgcactggcaggcagactttttactgctgagccaacagagaagttcacaaatgtatacatattatatgtgaatgtacatggagatgtgcattctgaaattctgaaagagaatttattcagaatgagaagtcacaatgaaataaaagttttaaaaactgacaaataccataaaatctagaaaaagctagctgcttgacacagctccataatacttcctgctgtgttttgtaggagcatattcttggactgcttcttcatataacaataattcggtaatataattttatacagggagaacagaataatctgtctctcctctaacatatttggtcaaaatttatttttgctaatgatagattagaaaagttttctttagcttcataactcgttattgatagtaagtctggggtgactgttgccaaatttggaagtaaccaaatatttttaaattgtaaaggtatacacattgaattggtcttcagttacatttgatgataatggtgttacactctaaataactctagacaatctacagtctacattagaactgaggaggctctacgaaccaaaccatgaagactatactttagctagggcagaaggaaaaagccccacattcactttccttgctgggtccttgtgaagaccacacaatccatcatccagttgttaagacttcctagatctaagatcaaagcatgctccttagcttgtgcctaccatgaagccaagacttcacagccttgctccacaaacggatacagctctgacttctggacaacatggctcccctactcagaagtgtgtctgtttccctctccttgactcaactccacacacttttagtaggatttcctttcagagtttatggtaaatgcaagtctccaattgattcaagttttccagcctgaatactgctactacctgcagtcaaagttttgatcctgattctctagatcaacattatctatggctgtctaaaaccttgcacagaaattaatctctagatctccatttacaattaatactacactgaagcagtaaatttgttttgtttttgagaagactgattagatgaatatttaaaagtacatgtttctctgtgcagcaaagaaaacagtcaacagagtgaaaaggcaatatacaaaataggagaaaacacttacaaaccatatatgagatgagatgagggattagtatgtaaaatatatgactcttacaactcattaacagaaaatcaaataactcaattaaaaaatagtcatatgacctgaatggacatctctctaaagaacatatacaaagggtcaataagtataggaaaagatgctcttcatcaaccaatcatcagggaaatgcaaatcaaaactacaagttattattattacctcatatcctacagaatagacactatcaaaaaataacaattgttggtaagcaggtaaagaacttggatcctttgcacattgctggtaggactgtaaaatggtgcctctcttacagaaaatagtatggtacagtaattctatttttaaaaaattagaattactatatgacttagcaatcctatttttgcatatatctaaaataactgaaaacaggatctcagagggatctctgcacattcacgttcacggcagcataattcacaatagccaaaatgtggaagcaacctaagtgtccatgacagatgaacaaataaagaacatgtggaaaacacatacaatggaacagtgtaagaaagaaaacagtcttgtcatatgttataacacagataacctttgaggacataatgctaagtcaaataagccaatcataaaaaggcaaacactgaatgattccacttggattaaatatctaatacaatcaaaccaaagaaacagaatgtggaatggtggctgccagggacttgggggaagggaaacagggagctgttgtctactgagtcgagcagtcaaaccaaatgaaaaggttctagagatatgccacatgacaaagcgtatatggttggtgctgcacatgtaaaaattgctaagagggtaaattcataacaaatgctttttaaccacataaagtacatgcctccgctttattccatatcttccagtctagcaatagttcctctaacagtttaacatcctggattatagcattagactctacatccaacttaaattctccgttctcattgatatgaataatatcttcaccacagcaaccttcaagaagggtctacggaaaaacagcattaatacaagatgcatcaataatcaatccaaaaattcaacagaaagatgaagctttcttagcacttagcactcataacattaaattcaaaagaaaactactgaatagctcagcatttcacaaggtatctttaccttgttttgtaaaacaattcaagtaataagaaaacccccaaatttcaaatatttataaatgactatttagtttcaaatacggagtaaaataaactacatcctatttttaaaattcaatgaatctgttgagttttaaactttttctaagaagtattcatgccacaagtgtatggatcttgctcattttaagagttggagtctgggggcatgggaacaggcattggtcttttgccttaatactagaaccctcggaaagaaatactttcacaacattaccaagtgcttttaattagaaagatatttaaatatgtgattacagttggatcaaaataaaaagctaatacagctttaagatcctaactctatagcagcattgcctccgaagaactgcacagcactaggtgtctggagaactgggttcacccccatacccgtgggtgctgaagcaagcagcagtctgtgtatgagtcactatcaccagtctacagaatgaggggccagcccaggaggtatcactggcttatcaagatctaaaaaccttaattttttcttatatttttctaaaatgttttagaggaaatgaaaatgtaattatttaaatgacaaaaaacccagaagagccttcatttgattaaatacatattatcgagtttccttaattttcttcaggaataaatgaaacacgaaactctattactaagagacttaatgaagaggtaagtatcactgcatacgaaaccctgagaataagttttatgagaacgtaccttcaaaatgtgaaagccaacaatgcatttttgttttatcaacacctgatgaatcatggaaagtccattacagttttctaactcatgtattctctgttggttgtatttaattaatgagagtataactctcaatgctaacgcttgagtttcttcacagctactgagttccacaacctaaaacaaagtagataaattttttctaatttgtcgagattaaaaatttaacatgtggggttatctttcattacataataccaacctatcagtctcatttgaaagttttattttttattgctgacactgtttataattacttaagaattttaaacaaataaaaccaataagttccatgctcttatgtctcaaatatgctataaattaactaaaataacattgataaccttagaagtcagcggcattttattggtgatctgaagtgtcagcaaaatgcttcatatttttgatgcttagtcaacaaacaggctctatgttctatgctatggaagataaaatgatagatagactgcttagactgtaaataggcagactacctacctcctgtggggcctgatgataggacaaaacataagacagaataaaaactaacgattgtgacttgtacttcaattcccccaatgctttctgacaactactatatgtaagaaacaaacatcctattatgatttgaaaaagcaaagaagagtgagacaatatgaatgcatgagagcataaaaactatttctgacgcccccctgctcaggatgggaagcctatgtgaagatcactgggagagagagcaaaaccacaggaagcggggatcaacaggtgtccaggtgtgggacgcagtcagaagagagatgaagactggattcatagtacatttaggaggctgcaggttgcctatctggctagatgcagcagattaagctcaaaaggtaggctatacctgtaagggttttaaggaaactgaattttacttttgtaggggaggaaggatataataataactaacattgatatgtctcttagcacaaaaagtaatcaaaggtgcccccactaaagaaaaaaaaaagggagacatatgacaatggtgcagaagttacacttaagcataaaatttggaagtgaaaaagatcagggttgctttaattaaacaaggatttggaccacaaggaagtataaatgattcgtactgaagcgagaccatttgtaccctctatttggattttagcagtccttgaaacagtcatgtacaccactgtctactccacctcaggaaaaagattgttccagcccatagatggctaaacacaacagataaataaacgtaattctctaaaacagtatccatggcgttgagtcaaactttttgactttctccttctctttcaaaaaatttcaatcccaaataagttatttttgtacttgttgacctttatttttccccaagcatctggaagtttcaagggaaaaacaagtttcacaattcttcacatttcttttctacttttattatagcatttttttttctcattggcaatattaaatcttatacacttaatacttaatggttcgaattacatttctggatacagaaaactctgacatcttcataaattatttacttatttacttaactgcaccacatggcatgcaggattcttagttccctgaccagggatcgaacccatgcccttggcattgggagtggagtctcaaccacaagaagtctaaggaagtcccaaatctccataaattaaaaagaaattttaacaaaaaaattactgtggcagaaactttgatgacattctaaacaatgtgtgcttttttaatcttgtaagtttaatacaattgatacatagcattactgttaatcaaaaaggaatcctaaaagttatcaataaaaaagaagtagtttatctttaaataaaattacaatcagtgattcttaccctagcaaagagaaagacaaatataccagttccaccaatctcatgcaaaatgccttgaagggttttacattcagtgggctggagattctttagatgatgaggttctagtaagatactgtgaacttcttttgagctgaagggtctttgagagagttgggttttcatttgacctttaagtctaataactggctcatagatggtatactgagcaggacagtaagttgtatatacaactgaaagactttcctgaaacacaaataatttccttcaataactaaacagtttaaaaagtacattatcaactagcaaatggattatttcaaagtgaaaagacaaggaaaaaatctttttctttgttttaataaagacagtcactgcacacaacaaagatggacatgaaaagcaagacagctctccacaaagaaaaagatccatttcatttaggagtggtcaatacatgtaaaccatatgaaggctgagaaaaattccagctttgatcttttgagaataaacatgaaattatacctatcaccaataacaaatccctaccatactcatgtcctatgaactgttctatgcatttataaatagtaatcaatccttacaaccctatgagatggaactctgggtcaacgtattcaaatgtattttggtactgaatttgctcatgggctgcctactcatttaaatatgactctataaactagagcattctttccactagaataaaactccaaactatcagcatacctaacaaactgagtatttctcccaagcaaagggtagttttgattaggttctagctctctgtcaaatattctatcaattactttaaaaattatggtaaactttaaaaacaaaatgtactctgagatgctctcaatgaaggccgctacagaagatcacacttatggaaaatcgtgtagcagctgggggctttgggcttcgatcattttcaacccactgtgattcgagtatagtttcattagacatcatctagcacatctgcataccaaccaaactgatgacacagtctattgtatatgattatgctgggtaaaacaaaatcataaatctacagtagttttcattaaaaatctgataaaatgcctgattatctgaaacaagtcccatctgataccaacaccttgctaggagggcaccatgtctgtctgacctcttactcataaccccaaaacaccaagctaaaaaagtcaggcttaaaaaaaatatgctttcaaaaaagatttttcacataaaacctgtataatttttacttgcgataacttctgttgaattttatgaattataacctccatttttttcaggcaaaataaaaggttaagaatacatattttttgtgaaaaaaggattagccaaaaaccggagagctaaaattatctgaacaaacatccattgtatgagctccttggtcttcctaaagcagagatactcagtgtgtgggccccaaccagcagcagcaacatcacctcagaagttgttaaaaatgcaaactcttgggccacacttcaggtctactgaagcgatctatgtttcggcaagtccgctgggtgattctggctggatactacccatgcaccgtagaacatttacaatctctggcccccgttcaataacaatggacagccaaaatgcccctaagctccatttctgaatactccttacggagaaaaagattgtgggtctaacaccagatctttagttaaattctatatccattttaccacagatacttaataccactcaagacttacatgttttagactatgaaggatcagtttcctagttgctataatgaaaagtatccatcacaagctcctaaactgtgtattagtataacactatattagaataatgtataaaatgcaatcaagagtctcatataagcagaattagcaataatttgaaagcaaaattcctagttgctattgatattaaagaataaagtaataacctccaattaaaataaacttatattaaaaaaagaaagaaaaaaaagaatattctaaaatctgaatatgtataaagttaatacaaataaaaattagcacttatttttaagtatggaaaggaaatataataagcaatttttaaggctaacatgtattatatttttattatatcataaaagtttttcttgaatgattaacaacaggtataacctaaactactacttagtatagaaatatagttccaaggaaaagcagatgaaaatttgaaacctgaaaacaaattttgaggaagtcaaagtattttaattaaaatgaaaaacatttgtaagtaaagaaaatgttgagaaacagaaaagaaaaactctaaaaatcaaatcacagctaattcaccttcaataaacatacataacagttactaaaaagttaaaacctataaaatgaaaacttacaattaaaagaccaatgtccacatctttgttggtcataaaaagttctctgatttgttcacattgcaaaatttctttattaatgtacttggagtagtcattcacaggcttgccatatttacatggcattatggacgtatggttgggtccacaagcatatagataaaatgcctcttgcgagccaatcttagcccctgaatagcaaaaaaaaaaaaaaaaagttccttatttaaaatacgccagaatttttcataaaaacaagaaatcagaggagttttttttgctagattctttagttgttcactgtatctttcaaaattaaagcctcaattttcaaattggtataatgagcaagaaatctatagcaactctagatgtaaaatgaattaatatacatatatatgtatatatataaaacattatctgtaaaactcttggtaaaataaagtaataatgtttatatttgctccttaagctaaaaataggggattttttggttttgtcttttttttttttgcaaatggaaattttatttcagtgaattccttttaaaaacaacatatggattggtatcattagtccttcatccatccatctatctattcaataaacactgtctagatgctattatgtgccaggttgagtaatacatttttaaaaatcatgtatttcttcttcacctaaaatttggtatttttatgtaatatactaaaattataagtaagagagacagccagtctaactgcacctgctataatgcattttccaggattataaagtgatttaataaaggcttctctttggcaggcgggtgggggaggatatgagctttgcattaaatatatgtatcaattgtctaagaaccacttatcttgaaatctaggaaatacagtgcttattaagtacaagtgaaggaacagggataaacactttatccaggacaattaacttagtttaatacttgttaactgaaggaaaaatctgaaaatgctctgaaggggaaaaatataccattgaagaggagtaaatttcccaggccccattttccagccaattgcaaacattcttcttgggatgataaacaatggccgatcatgcaaaatgttttattgctgtcagatgacaaactcgtttttcttggaagcataaaatccaaagtaacatcaggcttcctacattaaaaacaaagttaaatcaattacttcagggatttttagagtgttaatgtttaataacacaaaattcttgaacaagttttttggctcagtattggataattggtaatgggagagggagaaggactgattctcttgtctcttggtccaaggtgctggtggtccacaatcccccagaggagaggaagggacagagatgcctgatgatccacaccaggccatgggaagtactaccggacatttgtggcaagtttcctttgccacttgacttctgcatattcgccttcccggtttaaaatacaaatctaccacctctccctgattttaccagaaagtctcccatctcagtacacaattcctaaaacctcatgccctcttcaaaaactaatcaggaagagtatcacttcttcaggttttgctctgacaaggcactgaaatgccactgcttttttgcattttctgtgttttcagcagtaaatattgcagagcctttgattaatctcttgcttttcttcacggataaaagttataggaatcctcacaaaaggcaaagtaggaaaaggtaaatgaatgctttctcctagagacacacacgatgggagaacttcatcttcttgtttaaattgcagagtgccaagctcttccctcattctagactgttttaaactctcttaagataatgaaggtagcctgtaaagacaaagtctgtgaataagacaaagcacttagaataagctaataatgagaaattctattttggtatatatttattttaaaaatttcccttaaggctttctatttcatacttaatagctatttagctatttaaataggaatattattaacaaaggaaagatgtgagctaagctttttactgaagttcaattgacatacaacattatagtgagataacttctattactgtgcaggcatctctttcttgaaccaactaaatggctgtaactgaaacagtactgccacctagtggcattatgacttaattcagttcttaagggtaaagaaaacctgtaaaaccaatgcaagaggagttcaacaaacactaaaataattcatactatctactatgtgccatatattcctaccagatttgtgttctgttcatcaaataaaaattagtagaaagcattaacaattttttttcagtgtcgttacatcttgaaatgtattacttgtagaaataattgtattagttctgagagtgatatagtgccaaatttaaaccaaaggaataatatatttcttatattccttggtcacttgctcaatgctatattactagataaaatcattaacttacaccaaatggtaaattcaaagtaatgttcaaacaagtgggtgagtaaaaattgagtgctaggattttaacttcagaaccggccacggagaacatctagacactcattctgaacatatgtaacaattagtttatgattcctgtgtctgtcagcctgcctgactcaccaaaaggctgtagggttagtaaagcatgtatgtggatggtcagttgtgtccaactttttgtgaccccatggactgttgcctgctgggctcctctgtccatgggattctccaggcaagaatactggagtgggttgccatttcctcctccaggggatcttcttcctgcataccctgcactggcaggcagattctttacaccgagtcacctgggaagcccattaaagagagcagagggttttaaagcagggctctatccaggcttagagtccaggttgagtttgagccaccctcctcactgcaagcagcattttgggtttctgctgcctcacatggaggggcagaggcatctcttactttgttgtgctgctagaaggactaaatgaggtcatctgtgcaaagtgcttactacactgactggtaggtgctgagagttccagaaatgaggagcgtgtgcagcagactctcacagtcccatccccaatcccaaccaatttaactcaaggttctggaaacatatactgatatgccacagctcccttcaggcttaggcagttgtgaagacagaacttctcagagaatattttctttggattatagaaattgagattcaatgacatattttcatgtactttttaaaatgaataaactgtttcctttggcagacactgcggactggctaccccaaagctgttcacaagcctcttctcccagccttcctgaggctgcaaggctgtaagcagtcgactcctgcagcctccacagcagagctggcaggcacacaggcttcccttctttctcacaggccctttcctctgcctggctcactcttcctccctcttgttcatgcaaaactccatctccttccttcagatctcagcttaaataatctgtttctagctaggtcttccctgatgcccttctcttaagcaggaaaccaggtattttctgtctcgggacccatttgttatcttcacagtacttgtcatgatttatacacactcgtttaattgtgtaccttgctgtctgcttcttcactgaactatgagcccccaaaaggcagggaacatgtctgtcttgtttaccaagctcccaggcttaatattgcacgtgctcagcacatagcaattcctcattaaatactggatgaacaaatgaatgaaaaaatcaattactttgtgctaagggtatatgttatctctatgatctaatctactctgagagactttagagagaactggacgataaagtatataaagcaccttgcaaaaggtctagccgcctcatcccggattcaaagctgctgtcatacagcatcaccatgcccattcatttttctttctcatcattcaacttagatattccttccaaccagctcagtcctctcctgtgttatactagtttccagttctgtattccctttcatgctatttcattcaacaaaatactttccaactcttataaatccaagtaccttacaactctctttgagttaaactttatattaagatatttcacaagatatttcttattattttgactcacagttctcctggtttgtaaaaatcaaatagtactataaccaaacctatcacctggtatatttctaggtttctatcttaatctatcacctgatatactagcttatatttttttctagtcattctaatttcttttgaaactctgatttaattttggtattagttttattagccacttaatttaaataattccttatggatttatcttgtaatatatgggcttgatgcactaaatttataaatgtctaaatgttcagatttgtacatagtcccccaaatccaaatattaatcttaaatggtttcttctaaggcaaattaattttgtatgtaagtgataaaaagaaaaacagaaaaatatctcacttgacagattcctattaaaatatagtaaatttcatctatagtccttttgtaatttgtttcagaagctggaacagaataattaaaattacaactgagattattaagtatttactaaaagtgtttcatacctctgtccagagatccatatggagagtttcccatggatattctttttcccttggggctgctgtaagtaagtgagtactaaatgttgccatttgcttgggaggaaaatattctcctgtgattcaacctgtgctagtaacacaacttttgtatcatcgtttgaatccatgcagacactgaacaaaaagagtaaaggtacaggctgaaacatgaaatatctgatatcagtttttaacatgtatagttaagtataactctagatatttaagtaaaatttaaaaaccagttctagtattaaaccaacttgaaaagtcaggaggtctttgttttatatcataatctgcttgattattttattatactaaacctcatttcatgaacttaaaaatagatttggctcatttgctagtattaacaatttgggcaataatcttcaggattcaatttgcaaaaaaaaaaattattattactatttatatactcattgcccttttagtgcaatgtttgcttcatacagaaattaatacatatacataaatatctaaatgctagtatgtatcattggtctaacctactctgagggattactaacagaattaagatataatttacataaactacctagtaacctttataacatttacagaacatagatccctaagtaacatattttacttaaattttaataaacattattgtagttcagttgctaagcggtgcgcgactctttgtgaccccatggactgcagcttgccaggcctccctgtccttcaccatctttgggagtttgctcaaactcatgtccattgagtcggtgatgccatccaaccatcctgtcctctgttatccccttctccttctgccttcaatctttcccagcatcagggtcttttccaatgagttggctttttgcatcaggtggctgaagtaaagtattggagcgtcagcttcagcaacagtccttctgatgaatattcaggactgatttcctttaggactaactcgtttgatctccctgcagttgaagggactctcaagagtcttctccaataccatagttcgaaagcatcaattcttcagcgctcagccaccttctttatgatccaacttttacatatttataaaaatagtataacactgttcatactcactcaatacaaataaaagacttgtatctatactagttaacaaaggaggcaagaaaaaaggataagacagcaatgagaacctaagtctatgagataatggctattaaatatataatctgcatgaaaaacagttgcctgttaacaacatcgtaagatcactgcaatcggatagaatacctccatagataagccttaagtaagtatttggtccaagatacactgagaattaacatagtgaactttagagtttaattacagattttatatattattacaaagattatattaattgtttgaatctaccttctttttttaaaattaagaattttctattttgtcacaatgatctttatagcagatttcacattaatgtcttttacataaattatttaaatacctaagctactcatggggggaagggttgaggataattattaccgaaaaataaaagtgccggtgtggggatcagcccacacttggatcatcagtgctttggatcccaatgagatcatatgaatacaaccttcttctatgagcctttcaccaggattcacatatgctgcaccttccagtctgttgttctctatgaaaaaaagatgttcggatgatttgtcaagcatctgacaaaaactgagtggaaaagtaatgtaaattgaattttgccacctaagaattgataactctaaacaatgtacatgtgatattactgatgaaggtgctatctaatgtacatggagagttttctgtattaggtcattttgctctgctctttcgatgtacaatttataaagaaaactctattaactatccaacacattaaattatctgctaagatttcttaaaagttcaatttcctaggccaacccataaaaatacctaagtatgctatgctaataacttggaaatatgtctgtggaaaagtagattcagagctccaactgtagataccaggtgacatttcccacccttcactcttgacagtgtcattaaggttttcttttctatctataggtcagtggaagatgctgttcctagaaaccaaatactggggaaggcctagtgtcctgaagcagaggctccagtggggtgtgtaaactctgtggaatgaagagctattgagactagcacctcccgatcatgataaccccccaaacctctggctcagtcatttcattcattccacagaccataagaattagcccactttcctaccaccataaactgctttttaacaacaagttctttctacctagcagtttcatagtcacaagagtgatccaataggctgtagaaagaactggaatgaaatttattctcactttggaggttggctgatacggttacacattttgtgacaggaactagaagagaggcactgaggaaagatacagcataagaaggagagcttgaactacaagagagaaaggagatgaaatggaggtggaatgacaggagacacggaacaggtaagagaaggatggaaaagcggctacagggttccacgccttccttttcaaatatcaggagccaccctaacccagcgatgggaccacgacagaggcatgaaatcgggttggtgatcccaaagcagttgcgtgtgtggtggtccacctgcctccttcctcacactccctctcccaccccacactaagcaaaagtacagaagaaaatggtgtttaaggctgtccgaccattcaggctttggtacgtcattccatgaagaacgtgtgggcagtaagtcagagtatcactgtgttcctagtgctcaactaaaactgccttctgaaaagtcttagtacacagataatgctgttgtcatacctgttccatcaaaactactgtccaataaaatcagtgacttgtttcttttccttgtcttcttccctttttctgtggtactctcagcttcgaggatacactccacattaaaccacagggaaatgctgaagccttctgacaggtgtggctgtccgagcaaaggcaagtggactggggctatgtgccaagaggaaagcagctgctggggaaaactctcactctcgccctctttcttacaacgtgacactcgtgctcttctcaacagccccatggccttactgttgagaatcccggggcacttttgtgatgaaacaccattgcttaaatttggagtatacagtaaagggaaggttagatactgtgaaggactcatagtaatgtcactttcaacaattttcagaatacccagaagaagaatttcctaaaggaaaagaaaaccaaacaaaactttacagccatgttacaaggtatataataatcttgaaaatcaggttataaacaaaaatacaaacataaacatacgtatatcagcatttatatttaaataacttcttacctactatatcattaaaattttcatttttgtgtgttacgatattggctcagatggtaaagcatctacctacaatgcaggagacccaggttcaatacctgggttgggaagatcctctggagaaggaaatggcaacccactccagcactcttgcctgaaaaatcccatggacggaggagcatggtaggctacagttcgtggggtcgcaaagagtcagacacaactgagcaacttcacttttacttttcaaaatatgaaacagatttgtcttaaaacatataccctcttgtggttaatttgttttagatttagaagattttaaaaaggttcaaaattaaaaacttccgagctggttttaagtgttagaaattaagtacaatgattgtattgagaatcatgtctaccaaagaaaggtgtttatttccaggtgcactacagttacttctctcaattatttttaaatgacggatagaaccagagaccttgcaaattctttaggtttctgaatggtatttatggtatgactgacttcctaaaattgagtgctcagttactttccaccttattttacatgccttttccccaatcaaagaaaaaattttcatcttttttagatctatttataattacaagtttcaggttaaactgaaacacagaatgtacaaaagagatgagaggaaacaagtatttaattaaagagaaaagcaacaactaaagagactagtaaaaaaatagaaaagattaacccaggacaatgtcctacccattcatgaaacaacatctaatgtcgaatactatgataaatgaactcagaaaaatagaatacaaacatcccataaatatatagtcagttctcaattgtctgcactagtggtttttaacctcatgttccacagagctccttgagggtctataaggctcaagtaaggtggtgaaacaggcagggctcaggaacattctccaatcctacttcaaagaaagtagctccaaggccttctgttttaatgcttaagcgttgagtcaagatttcattataaagatgggcttctcagcgaagaagagtctaaaaatcactaagttgcaccaacggacaatgaagagtgaataataattttctaaaaaaaatgataaccttcaaaatggttatcattactcataattatctttagtaattaaaattattcagcatttcttaagcatacagacttggggtggaatcaggtaaagagatgagaggaaacaagtatttaattaaagagaaaagcaacaactaaagagactagtaaaaaaatagaaaagattaacccagtacaatgatacacctagtttgccaaaacagaatgatatagttaaaactgtataaataataaaataattgagaattttgtatggcaaaaaccactacaatattgtaaagtaattagccttcaattaaaataaataaactttttaaaaagcctgcagggaaagacccaatattaacagcaaaaaaaattaaattaaaaaaatgagaatttcacacacaataacatggagttgactgtataacagttatcacatcaaaagagggagcttagtgattccttaaaaaaataaaattatattagacatcagtgaaaaaatgtcaaattatagcatatttactgtacaaggagatttctccagaaatattctcaaaagaagggttagctcttctgaatatgttcttgaactcatcaaagataccaaaagatccaccaatactctctggcatgctaaattaaagaaagagagaggggaaaatttaaagccaatatacagtaattaaaggaaatgaaaaaacaatttcactgaaagagatgaaatatcaatactattgtcacatcttaaatggatcataattaatctaataatccaaatatttgctaaagaaacagcaatatcactaaatgaaaaccaactaactagctgacaaaaaaacaacaaaaccacttttctgaaagagtggttagctcaaagtaaaataagagtatttaaagaagcataaattaatatagtatttcttaaataagctgatgctgttaggtattgtaaaatagtctgctaccttctcatgtttaaaatgtttaatttataactataactttctaaagagaaaattagatgctataaacaaaattagaaatattaaaaattacaaaaacacttaaatatcactaaagattagtttgaacactttattctatcataaggcttagtatgaaacataactggtaatgtacaaattcatagaacttttgagagtaaaatactgaataatatttataacatatatattacatatgctatatatattacatgtataatacacaaactcatagaacatttgagagtaaaataataaataatatttgtagcatacatattgcatatatattacagagatcaaaatatatttacatgcattatctcagctgatcataaacaaaaagtcctacaaaataaatactatctcccttttggatatgaaaaaataattctgatataaaacctaagaacagaagtcctgtttcagcaacatgttttataaagaagccatgaactgacatagaaaggaaattgcaatgagactaagaaatagcatggactttatcctataagtcatcatcagatggccaacactgaaatcagattgattatatcctttgtagccaaagatggagacgctctatacagtcagaaaaacaagaccaggagctgactgtggctcagatcatgaactccttattgccaaattaagacttaaattgaagaaagtagggaaaaccactagaccattcaggtatgacctaaatcaaatcccttatgattatacagtggaagtgagaaatagatttaagggactagatctgatagatagactgcctgatgaactatggatggaggttcgtgacattgtacagcagacaggggtcaagaccatccccatggacaagaaatgcaaaaaagcaaaatggctgtctggggaggccttacaaatagctgtgaaaagaagagaggtgaaaagcaaaggagaaaaggaaagatataagcatctgaatgcagagttccaaaaaatagtaagaagagataagaaagccttcctcagtgatcaatgcaaagaaatagaggaaaacaacagaatgggaaagactagagatctcttcaagaaaatttagagataccaagggaacatttcatgcaaagatgggcttgataaaggacagaaacggtctggacctaccagaagcagaaggtattaaaaagaggtggcaagaatacacagaagaactgtacaaaaaagatcttcacgatgaagataatcatgatggtgtgatcactcacctagagccagacatcttggaatgtgaagtccagtgggccttagaaagtatcactacgaacaaagctagtggaggtgatggaattccagttgagctatttcaaatcctgaaagatgatgctgtgaaagtgctgcaggtatgccagcaaatttggaaaactcagcagtggccacagcactggaaaaggtcagttttcattccaatcccaaagaaaggcaatgccaaagaatcctcaaactaccgcacagttgcactcatctcacacgctagtaaagtgatactcaaaattctgcaagccaggcttcagcaggacatgaaccatgaaattccatatgttgaagctggttttagaaaaggcaaaggaaccagagatcaaattgccaacatctgctggatcatcgaaaaagcaagagagttccagaaaaacatctatttctgctttattgactatgccaaagcctttgactgtgtggatcaccacaaactgtggaaaattctaaaagagatgggagtttttctttctggcttacttcactctgtataatcggctccagtttcatccatctcatcagaactgattcaaatgtattctttttaacggctgagtaatactccattgtgtatatgtaccacagctttcttatccattcatctgctgatggacatctaggttgtttccatgtcctggctattataaacagtgctgtgatgaacattggggtacatgtgtctctttcaattctggtttcctcagtgtgtatgcccagcagtgggattgctgggtcataaggcagttctatttgcaattttttaaggaatctccacactgttctccatagtggctgtactagtttgcattcccaccaacagtgtaggagggttcccttctctccacatcctctccagcatttattgcttgcagatttttggatcgcagacattctgactggtgtgaaatggtacctcattgtggttttgatttgcatttctctaataatgagtgatgttgagcatcttttcatgtgtttgttagccatccgtatgtcttctttggagaaatgtctatttagttctttggcccattttttgattgggtcatttatttttctggaattgagctgcaggagttgcttgtatatttttgagattagttttttgtccgtcgcttcatttgctattattttctcccatttggaaggctgtcttttcactttgcttatattttcctttgttgtgcagaagcttttaattttaattaggtcccatttgtttatttttgcttttatttccagaattctgggaggtggatcatagaggatcctgctgtggtttatgtcggagagtgttttgcctgtgttctcctctaggagttttatagtttctggtcttacatttagatctttaatccattttgagtttatctttgtgtgcggtgttagaaagtgatctagtttcattcttttacaagtggttgaccagttttcccagcaccacttgttaaagagattgtctttactccattgtatattcttgcctcctttgtcaaagataaggtgtccataggtgtgtggatttatctctgggctttctattttgttccattgatctatatttctttgtgccaataccatactgtcttgatgactgtggctttgtagtagagcctgaagtcaggcaagttgattcctccagttccattcttctttctcaagattgctttggctattcgtggttttttgtatttccgtacaaatcttgaaattatttgttctagttctgtgaaaaatatcgctggaagcttgatagggattgcattgaatttgtaaattgctttgggtaatatactcattttcacaatattgattcttccgatccacgagcatggtatatttctccatctattagtgtcctctttgatttctttcatcagtgttttatagttttctatatataggtctttggtttctttaggtagatatattcctaagtattttattctttttgttgcaatggtgaatggaattgtttccttaatttctttttctactttctcattatttgtgtataggaatgcaagggatttctgtgtgttgattttatatcctgaaactttactatattcattaattagctctagtaattttctggtagagtctttagggttttctatgtagaggatcatgtcatctgcaaacagtgagagttttacttcttcttttccaatttggattccttttatttctttttctgctctgattgctgtggctaaaacttccagaactatgttgaatagtagtggtgaaagtgggcacccttgtcttgttcctgactttaggggaaatgctttcaatttttcaccattgaggataatgtttgcggtgggtttgtcatatatagcttttattatgttgaggtatgttccttctattcctgctttctggagagtttttatcataaatggatgttgaattttgtcaaaggccttctctgcatctattgagataatcatatggcttttatttttcaatttattaatgtggtgaattacactgattgatttgcagatatcgaagaatccttgcatctctgggataaagcccacttggtcatggtgtacaatctttttaatgtgttgttggattctgattgctagaattttgttgaggatttttgcatctatgttcatcagtgatattggcctgtagttttctttttttgtagtatctttgtcaggttttggtactagggtgatggtggcctcatagaatgagtttggaagtttcccttcctctgcaattttctggaagagtttgagtaggataggtattaactcttttcgaaatttttggtagaattcagctgtgaagccgtctggacctgggcttttgtttgctggaagatttctgattacagtttcaatttccgtgtttgtgatgggtctgttaagattatctatttcttcctggttcagttttggaaaattgtacttttctaagaatttgtccatttcttccagattgtccattttattggcatataattgctgatagtagtctcttatgatcctttgtatttctgtgtcgtctgttgtgatctctccattttcatttctaattttatttatttgatttttctctctttgcttcttgatgagtctggctaatggtctgtcaattttatttatcctttcaaagaaccagcttttggctttgttgatttttgctatggtctcttttgtttcttttgcatttatttctgccctaatttttaagatttctttccttctgctaactctggggttctccaattcctccttttctagttgctttaggtgtagagttaggttatttatttgacttttttcttgtttcttgaggtatgcctgtattgctatgaactttcctcttagcactgcttttatagtgtcccacaggttttgggttgttgtgttttcattttcattagtttctatgcatattttgatttcttttttgatttcttctgtgatttgttggttattcagaagcgtgtagagtgaagtaagccagaaagaaaaacaccaatacagtatactaacacatatatatggaatttagaaagatggcaatgatgaccctgtatgcaggacagcaaaaaagacacagatgtgtataacggacttttggactcagtgggagagggagagggtgagatgatttgggagaatggcattgaaacatgtataatatcatgtaagaatcgaattgccagtctatgtccgatgcaggatatggcacgcttggggctggaacgcggggatgacccagagagatgttgtggggaggggggtgggaggaggggggttcatgtttgggaacgcatgtacacccgtggtggattcatgtcaatgtatggcaaaaccaatacagaattgtaaagtaaaataaaaaataaagtataatttaaaaaaaataaaagaaatgggagaaccagaccacctgatctgcctcttgagaaacctataggcaggtcaggaagcaacacttagaactggacatggaataacagactggttacaaataggaaaaggagtaggtcaaggctgtggttacaaacaggaaaaggagtacatcaaggcggtatattgtcaccctgcttatttaacttctatgcagagtacatcttgagaaacgctgagctggaagaaacacaagctggaatcaagattgccgggagaaatatcaataacctcagatatgcagatgacaccacccttaaggcagaaagtgaagaggaactcaaaagcctcttgatgaaagtgaaagaggagagtgaaaaagttggcttaaagctcaacattcagaaaacaaagatcatggcatctggtcccatcacttcatgggaaatagatggggaaacagtggaaacagtgtcagactttatttttggggggctccaaaatcactgcagatggtgactgcagccatgaaattaaaagacgcttactccttggaaggaaagttatgaccaacctagacatcatattcaaaagcagagatactactttgccaacaaaggtccatctagtcaaggctacggtttttccagtggtcatgtatggatgtgagagttggtctgtaaagaaagctgagcgccaaagaattgatgcttttgaactgtggtgttggagaagactcttgagagtcccttggactgcaaggagatccaaccaggccatcctaaaggagatcagtcctgggtgttaattggaagttctgatgttgaagctgaaactccaaatctttagccacctgatgtgaagagctgactcactggaaaagagcctgatgctgggaaagactgaaggcaagagaagaaggggtcgacagaggaagagatagttggatggcatcaccgactcaatgggtgtgagtttgggtaaactctgggagttggtgatggacagggaggcctggcatactgaggttcatggggttgcaaagagtcagacacgactgagcgactgaactgaactgaactgaacatgaatcagttccaggttttagagtaagaaaataatatgaccaaagtaaagtatatgtttgtggatttttttttcagttcaaaactaataggttccagttcaaattgggggactagagacacacacacacacccctctatcaccacaaagtcactggactaaaagtacagaacaaaaaggaagaaacccataataggaaaaaagcaggggaggcagtgggcactagcagcacatcaagtgagagatttaaaaatatttcctgcagatggaaggatagagagataaaagagaaaactgcagcctaggatctctctgaattacaaagggactcagaggaatggagagccgatctgtccaaaatctggggagaaagtaacaacagggctgctagcacagggattaataagaggtttgtttgtgaacatgcacctctctcccttattctgaatattcagcacagataactcatcatttaccattacgccccaaacttgttaactgttctctaaagaaactgaatagattctgccaacaaaaagctgagatatacggcaggatgtatgcattagggcttccaactataactataaagtctgcagactggccgagttgcctaaccaagggtaaaaacagcagcagaagagttgctatgcagggtatacagagaataactagagcatacagagaataactaatactcaacaacaaaagaaacaccctgatttttaaaaagcataaatgatttgaatagacatttctccgaagaaggtatacaaatggctaacaagcatatgaaaagatgatcaacatcacttatcattatggaaatgcaaataaaaactacagtgagacacacaatgaaaaaaaatcagacaaattccagtaggaagacatcatgatcagtcctcctcaaaactctcaaggtcattaaacaggaaaactctaagaaactgtcacggccaagagggaacctcaagaggtatgacaacaaaatgcaatgcgaatcctggataaggtctttaaacagaagaagaacattaagtacatatgaaggcaattgaataaactatgaactttagttaataatgtaacaatataagtacattaactatagcaaatatactaatgctaacctaggtactttctgtactaggctcaaactctctgtaaaactttcttttggggtgacagaaaagttttaaaatgggcaattctgaatctactgaaagacagtaaactgtatacttcaaatgggtgaagtgtatagtatgttaattatatctcaagtacatgaattatacctcaataaagctgttattaaaagataatggaatagaatttttcagatctaagatacaaataagtcttcagatcaaaaaggtccattaagtgccggcacaatatataaaaatatagccataactaagtaaatgcagaagaagggagggctttccttacagtgtaattccaattaagaaatgaaggaatcatggaaatagaaaattactatttgacaaataccaccatattaattatttcagtcaaaaatcatcaatggatactaaaatgagtaggttaaagtaagatagaaaaaggatatttacatagtctcaagttatctccccacaagatacttactaattataaagagaaaatagtaacttaacagtggaagcaccttgcaagatattgtcttaaccaagtgatcaaaggcaacatcatcattgctaagatacagatatcatgaacccctggacatgatgcactgaggtatgcctacccaaaatgcataacttgaatttaaccatgagaaagtatggtgacaagcccaaactgacattttgtgtatgtcagccttaatcctccaattaaactttaggtttctacagctaaaatctagggttctatctagtatatataatatgaccatattatatattcattatgaatttctcaaatgtctgtgaaagtacaaagagagagcaggcattcaagtaatacctgacagagcagcaatcttagactgggttacagtctcgtaagaaacaacagacatcaaacaatggactggttcaaaattggaaaaggaatacatcaaagctgtattttgtcaccctgcttatttaacttaaaacgcagagtatatcatgtgaaatgctgggttggatgaaacacagctggaatcaagtttgccggaagaaacaccaataacctcagacatgcagatgacaccaccgttatggcagaaagcaaagaggaagtaaacagcctcttgatgaaagtgaaagaggagagtgaaaaagttggcttaaagctcaacattcaaaaaaagatcatggtgtccagtgctatcacttcatggcagatagatggggaagaataaaacagtgagagactttattttcctgggctccaaaatcactgcagatggtgactgtggccatgaaattaaaaggtgcttgctccttggaagaaaagctatgacaaacctagagagcatattaaaaagcagagacagtactttgccaacaaaggtctgtctagtcaaagctatggttattccagtagtcatgtatggatgtgagagtttgaccataaagcaagccaagtgccgaagaattgatgcttttgaactgtggtgttggagaagactcttgagagtcccttggactgcaaggagatcaaaccagtcaatcctaaaggagatcagtccctaatagtcattggaaggactgatgctgaagctccaatactttggccatctgatgtgaggagctgactcattggaaaagaccctgatgctgggaaagactgaaggcaggaggagaaggggatgacagagtacaagatggctggatagcatcatcgactcgatggacatgagtttgagcaagctccgggagttggtgatggacaaggaacctggcatgctgcagtccacggggtcacaaagagttggatacaactgagcgactgaactgaacagtctcgcagtgccacttctaaatacaagaccctgaacaattcatttgatcacttggaatctagattttcctctctagaaattcaagatacttatatctactgtattggtttgagaaatgggagagatgctgcatataaagctacttctgaaaccacatggcactatgccaatgaagctattattgtcaactcttcatttcacataacaaaattatttcaaagctattgtttaaaaccaaagtttcaacgcaccttgaaaatcagaatcagtctgtgttaaaatactcaagaatcctcctaaaagatttttcacagttccctgaagattaaaaaacaaaaaataagaaattaaatttcttacctcatgaacgcatgaggaaactataatgtcataataaattacttgatagtatactgtatacacctatctagatattttaaaataagtggaaagaatgctatgtgtagggttatacacagttttcattttgtttttcatactggttttttctgatttttcaaaaacaatgatcatatatcaaaattaaatgcaatttaaaaaatattactcgttctcagaaatacactaggattcttatagttagccagtgacaacactgatttttatcctactttggagaactatggaagcagaagatttttagactatcacttgtactaaaaatataccataaagtgttataaaaggtaagtaatcatctcaattttcagacaagttgggttatatataaataaagagatgagtaattagggcatgtgtgtgataaatactgatcacatttaattaaatacatcttttacctgttgcatgagtagaaaaatattcttttctttctgtctgatgattttcaaaaaactctcaaatacatgggtaagcacatcaagtttagctttaccagtagaaagcaaatttaattccaacgtacaaatctcaggataaattatttccccttgagcgaggttttcaagtaagtcatttggactgcttgatgcaatgaaactttctgcttcaggctttaagtctacccctaaaaggagaaaaataaaaggttatttttattcccttcctaagcactgaaaaaaatttcgaatctcattcatcacttaggagatctagtggcaaaagtgctatttataagaagatgctcacaaaaatcttttcctactacttgatttttgactacaataattatcctgaataatcaagtcatatggatattttgatgataaatgagtagccttgaaagtaattttgatcttcactagaagcacaagtactatcaacagtaatttttatagacatgtgatgcagatttaatatactcctttgagacaaatggaaaaaagtactatcccaaactttctggtgccaaaatatctaaattataggcttatatctctgtgaaaacagtaggtttggctattggttggataaattttatactttgctttttttatcagtgggatatagatactgcctcaccaaatattacattctggaaaatttaactgttatgctctttaaagaaactgctgtactctttttaaaaaagttcatataggtaagaaatttataaatttctacctggaccaaaattctttaagatctagtgagcaaacttacacaaaggagggtatctgtcattatgaaatcatgtctgtactacgataaaactgacactattatagcaatatttttcaaaagcacctgcttaggggggaggggggggtgggaagtggaagaaggtggtcaaaaggtataaacttccagttataagataaacaagtactagggatgtaacatacaacgtggtgactatagttactactgctgtatgatatacaggaaaggtgttaagagaataaatactaaaagagttcttatcacacggaaaaagtgtttatttcttttctttgtactgtatctatacgagatagtgaatgttaactaaaactactgtggtaatcctctcacaatatatgtaaatcaaaccaccttaaacttatatggtgatgtatgtcaattatttctcaacaaagctggaaaaaagtttgtttaacaaaccaagtaagtcacatgaatatatatgtatgaggctttcaatctgtggctgttcctttgtttttttcactctgtttatggtaaaaaaaaaaaaaaccaacaaaaaacaaaaaaacacctgctatgggtccatcaaagccctttaagtaggacatcagtgattattccaattcactcaatttgaaagagacaacagccactgaagaaaataactactgcaaacttagtgaagactaacagtattggcacagtcataaaaccagcaaataaaaagatgaagccctcccagaaatgtcctggctctattcaatccatatcttccattctactccactcaagttttcggcctggaaacaaaggatcacatgcaatgttatttccatcttaaggacaagctgggctgtggtgaactaagaaacctatgctgaagcattcttggatgccacaaagagatgtctgtattccttgtattacttaaatctttgtaactaactgttttcaaagctcttcctgtcaatgtccactgaatagatcttttctatcaaggcctcaatgtaaatacatcttcagtgaggccttctttgactacccagtcactatcacatcatcctgttttatttcttcatattgcttatttctggtatttcttgtcttttccactagaatccatatgaaattagagacttcttctaccctgtattcttagacactccatcaatacttgtgataacaaaaatatatttcattgatttaaactgcttaaactgcttacaggggcttccctcatagctcagttggtaaagaatccacctgcaatgcatgagaccccggcttgattcctggattgggaatatccactggagaagggataggctacccaccccagtattcttgggcttcccttgtagctcagctggtaaagaatccacctacaatgtgggagacctgggttcgagccctgggttgggaagattcctctggagaaaggaaaggctacccactccagtattctggcctggagaactccatggaccatacagtccacggggtcactaagagccggtcacgactgagcaaccttcactttcactttcaaactgcttacaagaacgccagaatttgttgtcaagatcaaataaaataatgatgtaatacactttacaaatataattcaataaaagttctaaagtgatattattaagaaccatttgctagttaataatctgactctcaaatgaagttacaggtacttcagtgatattttaccatcatcccaggattcactatcctcaggattgctttcactatctgcttcataaccttcttcttcaaccagaagtttaaaactgcaacactgagaatcctcagcttcttctgaaaaatcaccaggctgggatgacagttcttcttcagactgatgactctataagatcagtataattaaattaaggcaaaagttacaatgtttgttcatttttcttaaataagatatttattactcaaaaatcattttgaagacagcttcaacattttaagaaaaaaacattaggaacagatattaaccattatacattatgaaattcacacagcataattctccagaatttcttagccaatttgattaacacctcaaaaaaataggtgtcctaacaaattaaactataggtcatttcagttttactgaaaagtaagtctaagaaatttcattctagctatgtaagaggagatgagtaaaaaccacaatgatgtggaattatacttcttataacttaatgcaaataaatacatattatatttacatatttgcacaacaaaagatttttccaaaggtttttataaagtgtttcataaattagataactaaagacatgaaaaattttcaaagaaactgattttaagatttcagaatgcaattgtctacatataagcatctctgaaatcagagttccagcattaactccctgtgcagtatcatgtggcatgaaattttccttttcttataaaaatgctaataatatcttcacttaaaaaaaaaacacttaaagaagctcagagtacttaatcattgcaatattttaaaaataagaataatcttttttttttaataggtaggtagatattttaatctacataggtattctgacatttcaggtaggtattttaacattttccagttaaccaactgattcagtaatatgattatgacattagtagttattttagtaagtttttacattatatgacaaacagtaatgtaaactattatggcagaagattataaaacgccaatatgtctagaccaaggaattgaaaaagaagtcacacaaagataaaggtaaacaaacaacctagatgtccatcagcagatgaatggataagaaagctgtggtacatatacacaatggagtattactcagccattaaaaagaatacatttgaatcagttctgatgagatggatgaaactggagccgattatacagagggaagtaagccagaaagaaaaacaccaatacagtatactaacacatatatatggaatttagaaagatggcaatgatgaccctgtatgcaggacagcaaaaaagacagatgtgtagagcggacttttggactccgagggagagggagagggagagggtgagatgatttgggagaatggcattgaaacatgtataatatcatgtaagaatcgaattgccagtctatgtccaatgcaggatacagcatgcttggggctggtacacggggatgacccagagagatgttgtggggaggggggtgggaggggggttcatgtttgggaacgcatgtacacccgtggtggattcatgtcaatgtatggcaaaaccaatacagaattgtaaagtaaaataaaaaataaagaaagaaagaaagaattcagaataaaataaaataaaataaaataaaaattaaattaaattaaagtgagaagagagttctgtaaatattaaccatatcactatagaatcaaataagacaaagaggacagctgagtcatcactatccgtgcattattacttaataaactatcagttatatatgagacatcaaataatacttccatcttactggaagcaattctcggtaaatttccagattagatgaagaaaagcatgtcacactgctctcctatgttttatgagatataaatacaatccatcccagaggatggagacagaacccattgaactcacctgaccaaatcctggcccgtatgttctaaccacatcacagtgtcacactctgaacccacacacttctgcctctgccagtcacacccaaacaataacaacacaactgtatgttactcataccttctcagtcatagcatcatcatgctcaaaatctgctgaatgattccccagtgcaactcgaagcagggcatcaaataaaggctttgctaattctgtttctataacctttgacttggaaagatgatccttcatttcatgcaatatagtttccacagacaagttctaaggtaaaagcaaagaaactaagaatatcaacatgctttaagaaaaaaaataaacagtgagaaaacaaatgataaattaatatttacattaagtaaaagctagtccatttatttgcagttgatatgaaattaaaatgactatataaatatccagtgcttatacaaatatcctcctgttacaattaagaataattaatattttaatttatccaatgctttacttatcttatttgcttttgaatttgaatgtatcataaattaattgtatcagggaaaaaatgattagttgaaactcaaggttttcattaaccatttctagattttactaattccttttcttagtgattgcttaagactctaagaagcacttatattctaattcttttcttttcctcccttctttactccttcctatctgtcctggaatggagctctcactgcttgttcttctgttaagggatgaagccataaggatagataggaaattgacttctcccttaactctgtccagtgggagacacagatacacacagacaagatatgatggagtaggaaatggcaacccactctagtattgttgcctggaaaatcccatggacagaggaggctggttggctatacagtccatggggtcacaaagagttagatgtgactgaagtgacttagcacgcaggaagaaaggaagggatctaccatatttgaaatttccttagaagcagggcctataactaagcattcctttttggctgagatgtgctctcaggggaaatttgtaaaggcatgaggaaggcagaatatgctgggggaagaatccaggcaaagatgtgctttcagaataaatgtgtcaccccagcccaattccacgggaagctctggagcctgaactgcaccacagagactgccactcccagagccatacccatcagtcactggctctcagcacaccccacactttgggagatgggtgcagatgggagttcttagcagccaacatctgcagcagatggtgcacgggtggatcagcttggcaagggatatgggcagggcaccaaacagaaccacaccaagactgttgagtgtggacgttgaaatacaatagctggggaaggaaatggcaacccactccagtatccctgtctggaagatctcatggacagaggagcctgtgggctgcagtccatggggtcgcaaagagtcgggcatgactgagcaactaacacttcagttcagtcgctcagtcgtgcccgactctctgcgaccccatgaatggcagcacgccaggcctccctgtccatcaccatctcccggagttcactcagactcacgtccatcgagtcagtgatgccatccagccatctcatcctctgtcgtccccttctcctcctgcccacaatccctcccagcatcagtcttttccaatgagtcaattcttcacatgaggtggccaaagtactggagtttcagctttagcatcattccttccaaggaaatcccaggactgatctccttcagaatggactggttggatctccttgcagtccaagggactctcaagagtcttcttacccattattactcatctgacatctgatatttaaggtgtatttaatgccttttagggttggtaaattttgtcacatgggttctgtattccaaactaaaccctaagcttctcgagggcaagaacagggtcatgtactcctctgtgtccaccacagtacctggtactgtgctaagcatacaggagcacctcaaaactcagaatctttggaaaaacaaaatgacaatagcattacattataactttaaaaaaatttacattgcacaatggttagatgaaagataagttcttacctgattgggtaactccaactccatcttttgctgacaagctctggtgccatgaagacaaatggccagaagggcttccaaaagtcgtatgccctgaagtgaggtttcgctttttcgactcataaagacttctgtttcctctggaacagcttccacagctggaatctgttccacatttacggaagaaagatgctctgactcgaatttacctaaactgtcagcactctttttcagactactcagttctgctggtgtggggtcactttttacagtcaaagataataaatcttctttcacagtgatctcaggttgagaaattctgtttaaatcttgattttcatccatgtttcgatctccttcccttctcccttgctcctcttcaggatttctgaacagttcctgtattaccataaatattaatttatggcatacttggaaaccaccgagcctataaaactgtttctggaaaatgggacttaacatgtagatccaacgacacatggaccaaatgtcagctgcttggtgcatgtgtttgggagagggcaggacgaggctctcgagagagaaacacggcagcatgtgttgcaaaggctcgctcgctgtactgtcatagccagaagtatcctctgaatcattggctaattctctgtcagattccgcctctttacttacacacaagaacgccacacagaggaagaggttaattgtgttgatatgaacatcctgcaccacagactttcgtttctttggataagcatctttgagccgggcataaaatttactaagactctgagaatctgaataagcttgctggttatacaaagtactgacatttaaagatgacaactccttctgttcaaggtctatcccatcaatatctggaattgaagaatctttctgttgttcccctaggctgattatcagagtttcaaatgcttttagtgagtgatttcggatgccatctaagtaatttaattcaattatttggtttactccattacaacttaaaaacaaatctcttattaccctgtgagagaaaaaaagtacaaaagatttacatacaggcacatcattcatacattatttaaacatgtcattgctgcatatactaaacactacctatttcaactttatcaactatctggctgaagtccttagttagatatgaccaggatttcaagttgctttctaactacttttacacccttctgcaaacactgcatatataattccagtagcatttgaaaagaacagattacatgcctctcaagtgaaacgaagcaattcagggaagaatatttttccccaaacggcaaatttctctatataaattctccatgccacaatcacctccatatttgagacggacactctgaaagcagggaggcctttgcgggtccattcatttggctacttggtggttcactcaggacttttgtttattttaaatctgtacgtcatcaagggaaagaaccaaactacagatctgaagtttttcagctctatctcaggtaaaactcacaagtctggatcactggaatctgagtaataattttagtataaatcagctcagcaaagatccaggctgtccacaaatatgccacagagttataaaactgtcagatcaaagacagttctatttaaacaatgtcagaatgtcaggattttttttttaatgattgtgaaaataatgattacaggtatgttatactttactgtaagttttaaaaatggtatatgcattaatttcaaaggccaactacctatcagaagcaagcttcatttacaaaattattttttaagtatgagagctgacaatcacaaaatctgcaaaactcactggtgagattctaagtatcttaattttcttcattttgcttacctgtattttccagtttttctacatacaggtaataaatgtaaatatggtattcaaaaaataataattccattaatttcactgttttgatcattatcatgcacatacacactttatgtactatatatattttttcacagtaaataaatgaaacatttttttactttttgtatgttactgataaaatattataagcattttctcatgtcccaatagatcctagctaacattatttttggctaataatattacatccagtatatataatttaattaatttaactttgcccctgctgttgggtatctgcatcttatccgttttttctcatatatatatatatttaaaactttacttttttttcagagaaattaaaatcaatggctctgtcctcttccctataaacacccccgtaaaacaaacaaataaataaatgttaaaaaaaatctgacatgggatgggaacttttttcattgttaaactaaaattaaatcctaggaaaaataaataataaagatattcaaacatctttgaatatgatttttcaacaacgagaaaaaatatctacacatatatataacaaaccttgatttaagcagggtaggcagagtttttaaatagatctgaagtacttcctggggcaaacactggttatgatgactacagacatgagtctgagctgaagtaatgctaagctgttgacagtgatgtgctaattcaactcctctttgcagcacaggattaaatacacagttatacagtttccactgaacaacaacattgcctttctggatcaaactgcaaatgtgatttgcaatctgtacattccgtaatctgtcctcttcgaaaacaaaattctgataagcctctaaggcatcccatttccacagcaagtcttctgatccactgctgggcaggatgccttgaaatctgtagggtggactagatacacctgaggaaggttcagcattgtaagagtttccctgcagggtctcctctaatttggctagttgatctgagtcaacagtacagatgttgcaagctgcttttttagttttctgcggtatctcagctcctcctaactggtccaaaatgagtttgtgaagaatattcagtatatgctgctgacagcttttcagtgctggcaacttaaaagcatggaggagaggaacaattacagatttgggatccatacaacagcatatgccaatgttctgaacccctgagaggatctggacacacgtgctgctcaaggaagcctgctgcagtaagcgtaagcactggtgggaacacacagcaatgcaacagcaccgctcagggtaatacacgtctccatctgccgtctcttcaaatgggctcttggaaacctggtttttaaaagccgagaccaacagacctgagaggtctctgtggtgatgcatgaagtgggaatattcgcaacgtctgtgcctttttcttgtacacattgaatgatgcagctgctctgacttcacttttttgacagtgctcattattttcatgacattattgatgagggctttcaaatgtcctgaggcctcgggaggaactccatctcttacaaccagccattccatttgaagaactgctgtttcaaataaatgaaatccgtgatgctgaatgaattcttggaccagatccatggcttgactgaagaagaacgtatttgaagttgcactttgaagacaacagatcaggatctgcagaactccctccagcagctcaggtaaaagaagcactctatgacgatacttggaaaacacaaaatcttcctgaccctcttgtagtgttttcttctgtcttggggcaaaagggtcaggttgcttttctaggcaagttctaatttttaaagctgctctaagcaattctgttaaattttttctgagattttctggcatcacctctgccgtactaatatctactgacatcagatgcagtactgttcggaaaagcatccgttgaatcaaagccactggttcttcagtccaacctgcagaaaccatctgaccctccaaattgtcactgagattacagcagtccccaaaacccgctaggaattcagtcagtgtgggcactacactggctgcgagagcagaattatgattcaaggtaatgtcaaacttacaaactttctctaataaagataacaaaacatgacataagtcaaatggagaattgttcatgtgactgatggtagacaaggcagctggctcacttaaaatgtcagtgtttgactcctctcttggaatcatttctctggaattttccaaagccatggtgtcaggaggagtctgctctttggttgataagtggttaagcttagctgtaaggtggtcttctttaggacactgttttacaaaatgctgcagcacatgggaccttctgtatttagtcattactatacttttgtcatctgaattggcttctgaatctgaggtggaaagctgtgtctttcttgcatctcttacagaataacgatgggtagttttacgttgccgtctgctttttctaaaaacatttacttttgcagaaacctgaccagctggagcactcccttctaaatataatttttcctgagtagatctttgagaacttgagttcttttctttggtcaggattataccagctgagaatggtagattaaagtctgacaaaatgaagaaagaaaatttagaataccttaatatgttttaaaactcaatatgcataggtgattatcctcttctttactttaggagtttgtcctcagtatatttttattatggggctgacttcttttagctttttggtatgtctctactccccttcctccccacatcacttcatttccttatcctgcttatattaaataccaagtggccctgaatcaaagaacacaaattgattttgaaaacagggagaacagagttaggaaagcaatgctggtatttagcattactattcttaccactttacaaatctcctctaataacaccattaattaagacacagaggtatactatatcctcaaaacagtatttagtttatagctctgatataacttaggaaccttaagatctccccaaattatttcaaaatcatacaatagatacaaatgttctccgagactggggttaaagagttactcattcacattattcactgcatgtgctacgcaaggaactcggtataggtgcaaatattgctgtttcaccctcagtgcctaaaacctagggctgctgtgtagtcatcactcaagacctatatcttagagaaaagaataaattttccatactaattaaaaagataatgacgctgggctttttcctttgcaataatacaaaaggtacagttataatttagaatgaataaataaaaatctaaataaaagacttgtgctttaagggagagaggattaaaaggagtctgacaaattccacatatgcaaaagatgcaggcaatgaagagaacttcaccaaaagaacacaaattagagttcttaagtgattaacaatttgtgagttcataaattcagaagaaaataagagcagagtcagtgaatcaacaaaataagcaggataatattatgacaagaccttagataaatcccttaaaagagagctccatatcagaaatacattaaaaatgcatataggcattaaattcaagagatttttttttttcaacctgagagatccttaagcatttcacaatatgcatattccaggaatggccaagggggaaaactgttaatccctctactgaaacatttaaactaagtttcatgtacttaataggatattatttttttttctgaatcagaaattaaaaatatgttgaccttaagtgtaataatcctgtctagtcctaacacaaaacattacttcaaatttatcctttaaaagcagcattagaaaacctaaactgcaaacgtcattgataagagtactggtaatggaaagcagtctttaaaataagcagagaatctttaatttcttcaaacttttcactctccatttttaaatgttaggctgcacatacagatttactccttttgctaagtgttcagcttcttcatctattttctaatcatcagtatgttcaaggaattctctatcatttttatattattagaagaaatgaaaatgtatttgcctaaagaatttttcatattaaatatcacactaatatatactgctttgattttgagctgctatcaaccatcacagcagaagtaacctttcaatataagtttttccccagtagaattttgataacacaagtgatatgacaaagaaaagaaaatacctgttgccttttcttcttgaacaggtatcttccataccaatggaaggagtgacagaagaagggtaaggagttcttctctgcatgtcaatgcctgtattagaaataaaagaatccttcatgctctgaggtcatgaaacacagttattcctaataccttaactttaagttgaaaaaaaaaatcccgtttcttgaggaggaagaatcaaattaacctatgttaaatcgaattaaagctgtgatactttgcaatttataaaccttcccaaggatagaagagtgtaagagtatttgacggtatttagcacattcttgctgctttttccgaaagtagctgttattaccaccatgcacattataagaattcctcacctacaaaaagataaatttgctaggtgcaaatgaaaagttaagccctattaattagcaaaccagtaacaaaaattactagaaaaacaaaaaaggcttcatgcagttaaatttaaaactcagaaaacacaattttcaaaaagagaaatggacattattaatacaatagtatatgtaaagagagacagacttattagtgaaggtcatccgataaataatttattgactgcacactaggtccatccacagcatttactgtcttaccctttctggaggatatggtccaagccctggagaaggtcccctcatttggtccatagaacacatacacacaaaacagttaaagaacagaaggcacgcagcatgtgtacacacccaggtgtggcgcaggcattcagtttaggagttcagaaaaaggagcaatcattatcagaggtgtgcaagtgctacacctgggaaacttgggacatgggtggtcaaggaattaatgacaagtcaagtgtaaattcctcgtgtcaatctgtggggagggggtcagagtgggtcagggtgacctaatcagatttgccactatatagacaacagaactggtggggaggggaatggactaatcagtgttagaggcagggaaacagtaatacagacgagagatcataattacctgtagcctcagacagtaaaattgaaaaggagacatatttgagaaaccataagggagaaatgaaatgacttgcagctgattatctatggggcatatgagagggaggaaaaaaagatccaaaagaacttgaaagtttctgatttaggccactagctaacgagtgataacacagtcatcaagacaggacatttagcagtggtgttaggttggggaaaagatgacggattcactttttagatatactaagtctgagatgtctgttggatctccaaatggactcagctcttcagtaaacagttgaatatacatgactggaacttaagaaaaagatgtaaagtaaataattggggtgtcatctgagcagaggtcaaggacatgggtgaaatttcctaggagagtatgcagaaggagaggggcagacttcccagagtggcgttctggagaacagcactgaaagaactgcagatggtggtgctgaagagcagcctacaaaggagactgagacgctacctctctccaaagaggagcagaacaagaaatatcaagggaagggagcagttcagaaaagagagaaaagttaatcaagtccagagttgttgatctttaattgtgtaaaatgacggtaggaaagcacttagcaagtacagggtcactggtgaccttaacaaacacagttttgatggagtgatgagggtgcaaatcagattacaaataggctgaagagtaaaggggaatgagaaagtcgagacaggattcagattattactttctagcatcctggttatgaaaaggcttaaaattctgcaaaagcaaaatctaaatcccttctcaggcctagaagacccttcatgacatgattcctactgacttgtccagttttaactcctaccaccacagccaacccctacctacatgtactattaaggtttcctgaacatcagtggtccttcaaacgtcttcctcacatgcactgctcttacaattctctcaccatccttccatctgccaagtgccaactcatccttcaggtcttagttcctctgtggaagacctctctaatcgctcctaggtcaagtaaggattcatgcccttgatttagtatagcaaccaatttgctgaatggttaatgtccaaatgcccattttcttctttcattcattcaacaaatatttattgagcctctactatgtgccagatattctggatgtagtggtgaacaaggaagacaacactcgcatccttacaaagctgacactctagcaggtgagacagaaaacaatggtgacagataagaaactttcagacagaatgctgtgatacggagaaaattaaataagatggaatgaggaacatttaaataggctagtcaggatggaccatttgagcagacgcttaaccgatgagaaggaagaatccatgcaaagacatggaggaaaagagctcataggaaagatacaaagggtgggaatggatttgactttttcatagaatggcaggcaggagagtgtggctggagcacagcaaggggggagggcactgagagaaaaggctgcaggtcagccaggtggacagtgcccaacacaaggcggccttggggaggggggtcagatgaaggggtttggatttatctctaaatatgatgggagatttttccaaacatactttgcaggcctctctcagagcatgaattcagggctcaggccctagttcttagcaatcacctccctttttcccactcaatgcctagtacacagctggatgttcataaacattacctgcctgaatgattttgaattctggatgcaaaataaaaattgtatcaaagggccccatttctatgagctttacttcagaatcagcagatgtctagataacgattgtatgcagagcttgtaaacagtacctatctcaacattttttaagatgccagcaaacgatccattatcttgcaaaaacaagtaaaccaattttggacaggtatattcccgcctagtccctctaagctgaatctttatctttagtagaggaactaataacattcgaacagagcttgccaaaacctcaagggtgtgtgaagaagtgctacagacaggctgtccttggaattcagtgcatcttcctgcacagtacactggcaaatcaccactgctgtgagactggcattcctgcccctggcttctgagacacgtggcctggaacttctctatttccttcccactcagctcaaggctcagtatgccaaattaagcaatatacgacccaaacagagccattccctggctattttctaaactatccgatctacagaaaccacattactcctcatctaatacttacaattttatgttctccctctgcttggaaaatgaccgtgtcacacatttttttaattccccattgcaataacaaacagtgagatcactctcatccaggtggtaagaatcatgctcatgctccgtatctaccaggtgccaggcactgtctctttcgcaattctattgttttgattgtattttatattaattgcctatcctaaccatccaaaagtagtgatggcaggatggaagagaaagggcaattttatcgggaggaaaagctgagatcccaaattagaggcgatgtttagaaagctgcaggcatatgggcaccagatcagtggggttcaaggatctcaggatgacatgttaaggaatttggactgaagttattttaatttatattaatggcattactttcaattttaacatgctgaatttaatgttccagacatagcagaaatatacgtgctatttggttaagtccttcatttcttctatcagaattttataattatttcttaaatgtgtatctatacacacatatgtgaacatttcttcattactactgtaaacagaatctttttaaaatgttctagttgtatagctttagctaaaggaaacaatatgtttgtcttatattctataattctgttgaacagttttctggatgatcttttggatttttctgtacacatcagtttaaaaattaacttttatttctccatctttctcacatttagctgtcactatttgcatattccactttattactgcatgttttgaaaacatgatatcaatcagaatagtaataaagttattcttatgctggttctattgcagagcttataaaaaattattttgattttttcatacgaacagctcacacaacttgataacaacgaaaaacacccagttgaaaagtggaaattttcaaaagtagacatttttccaagcagatggccagtaggcacatgaaaagatgttcatcatcattaattatcagagaactgcaaatcgaaactacaatggcataccacctcacactggttagaatggccacgatttaaaaagtctgcaaataaatgctagcgagaatgtagagaaaatgctcctgcactgttggtgggagtgtaaactggtgcagccactatggaaaacactacagaggtgcccccaaaaccctaaaaatagagttgccatgtgatccagcaatcccacccctgggcatatacccagatgaaactataattcaaaaagatatgtgtgctcctatgttcatatgagcactattcacaatagccaagacatggaaacaacctaaatgtctactgacagatgaatggatacagaacatgtggtatatacatgcaatggaatactactctgccaaaaaaaagagaaataatgccatttgtagcaacatggatggaccaagagattatcatactaagtgaagtaagacagataaagacaaataccatataataatcacttccatggagaatctaaaataggacacagacgaacctatctacaaaacataaacagacccacagacatagagaacagacttgtggttgccaaggaggttggggggatgaggaagggatagattgggagtttggggttagcagattaaaacagaatggataaacaacaaggttctagtgtatagcacagggaactatattcaatatcctgtgataagccaaagtgggaaagaatatgaaaaagaatattcactgaatcattttgctgtacagcagaaattaacacaacattgtaaatcaactatgtgaaacttgctcagtcctgtccaactctttgctactccatgttgaaagtagcaaagactttttgctactagtaatactgtactagtagcccaccaggctcctctgtccatgggattctccaggcaagaatactggagtgggctgccattcccttctccaggggatcttcctgacccagggaatgaacccaggtctcctgcattgcaggcaggctctttaacatctgagccaccagggaagtcctactataccttaataaaaagaaacaaatttttttctttttttctactctttttagatgaaactctctattcttaatctatttttagagtttttgtcaagaatagatgaattctgttacatgtttttgatgtctcaggataattacatgtactgttttccctactgatgtcaaatactgtgttttgaaaaaaaatagtttttcttgatttagaccagaaattgcaaacttcttttgtaaagggccaaaatgtaaacattttaggctttgtgagtcatatatggcctgtgtcccatatttttgtttcttttaacagtgctttaaaagtgccaaaactcttcttagcttgtgtgctgcccacaaacagatcaatggcaacaggatttcgcctaggctatagtctgcccaaccagctcccaattccctctccccctctcctcccatcaaaaatgggttattaagtggctataatactaagagtattatgtcacaaccccagaaagacttaaggtggtacctagtaggcccagagattgcactcatctcacacactagtaaagtaatgctcaaaattctccaagccaggcttcagcaatacgtgaaccatcaacttccagatgttcaagctggtcgtagaaaaggcagaggaaccagagatcaaattgccaacatccactggatcatcgaaaaagcaagagagttccagaaaaacatctatttctgctttattgactatgccacagactttgactgtgtggatcacaataaactggaaaattctgaaagagatgggaataccagaccacctgacctgcctcttgagaaacctatatgcaggtcaggaagcaacacttagaactggacatggaacaactgactggttccaaataggaaaaggagtacgtcaaggctgtatattgtcaccctgtttatttaacttctatgcagagtacatcatgagaaacgctgggctggaggaagcacaagctgcaatcaagattgccgggagaaatatcaataacctcagatatgcagatgataccacccttatggcagaaagtgaagaagaactaaagagcctcttgaaagtgaaagagaagagtgaaaaagttggcttaaaactcaacattcagaaaacgaagatcatggcatccagtcccatcatgtcatggcaaatagatggggaaatagtggaaacagtgggtgacttaatttttctgggctccaaaatcactgcagatggtgactgcagccatgaaattaaaagactcttactccttggaaggaaacttgaccaacctagacagcatattcaaaagcagagacattactttgtcaacaaaggtccatctagtcaaggctatggtttttccagtggtcatgtatggatgtgagagttggactataaagaaagctgagcactgaagaattgatgcttttgaactgtggtgttggagaagactcttgagagtcccttggactgcaaggagatccaaccagtccatcctaaaggagatcagtcctgggtgttcactggaaagactgatgttgaagctgaaactccaatactttggccacctgatgtgaagagctaactcatttgaaaagaccctgatgctgggaaagactgagggcaggaggagaaggggacgacagaggatgagatggctggatggcatcacagactcaaaagacatgggtttgggtggactctgggagttggtgatggacagggaggcctggcgtgctgtggttcatggggttgcaaagagtcggacacgactgagtgactgaactaaactgactgagtaggccctgttagccagacaaaagtagagtattactaaaaattttgaaggtgttttttcacataagccttacatgcccgaagtagagatctgtctgaaaaacagaaaaaagtatgttagaacacctgcctagttggatttcactggatgagtgactgcgagtgccttctctcactctcccttgttgaatgcaagtatgtattgtggttaacttgttcctatctcatcactgtgtacagggtgtgtaggagtagataatctgtctttttagttcacgagtctctcaatcaagaagagctgctactacagtcctgcaccaggaagcctagagtgcatagagaactgatgcataccgtgagcttgtggacttccgactggatgccatgtgggaacattacttggagagtcctggaagggagtatgggagagatgctaataatcatggccagagggaaaacactatggtagataaaacatggccataagtgatttcctcccatcaagtgctggagtctgtgttctcatcttttaaatctgtgctggccaagtgacttgcttagaccaacagaatgtggcagaagtgagattatatgactttcttcagcttccccctcagcctcttggaatgcttccacccatggaaagaagctgagactagccttctgaaagatgagaggccacatggataagaaatgaggcagctggccaacagtcccatccagcagccctcagtcttctgccaaccaactgcacattcagatgtaatccctgctgacaccataaggagcagaggtggtgatcccagctgagcctgtctgaactgccaacctcacagaatcattagcaaataagtcatttttaatgccgctaagtttctgaattgtggtttgttacatagcaatcagctgatatactcactgctcccgtctaccagcccaggtgtaaaggagacaatgcaatggattatctactgctgtccagtggctaccatttccactgtgatcacactcccactcctccaagaagtaggaatgtcagcatctgctatgctccctcatccctgttagaccaatcatacacaggtaaattctggcatatgtgtaaacagaatctgcaaaactagatgtagtaatttaaaattcattcattgttattacctttactaaattgaaaaatgtgcattattctccaacagaaacaattcttgctaataatattaccagtgactgacttgtcaaatctgaagaatacttttcactccttattctcttacttaaaaacctccctaatattttcagaataaaattaagattccttactatggtagactgacttactatggtagagccaactctttgaaaaagaccctgatgctggaaaaaactgaaggcaacatgagaagggggtggcagaggatgagatggttagacagcatcacccactcaatggacatgagtttgagcaaactcagggagatagagaaggacagggaagcctggcgtgctgcagtccatggggttgcaaagagtcacacatgactgagcgactgaacaacaaaactacagtagacaaggtttgccatcagtttcaaatcaaaatcaattgccatcagtttcaaaatcaaaatcaaaataattgttatttttttaggctgggcaattttcaagtttacaagttttcaaaaaacttgtaaagatctcagtataaactttcagtctgttatctttaatcattaaaaagattatatttttgctatttaagcattttttccctaagaataaacagattagcatttctgtatatgataaactatgaccaaattgggtttattccaggaatgcaaagttagttcaacatttagaaaccatcaatataatccacctacacttatggaaaaaaaaataatatgatagtgtcaacaggcacagaaaaggtatttgacaaaatccaacattcattcaggatacgaactctcaacaaactgggaataaaagagaatttccttattgtgataaaaggcatctgggaaaaatctagagttaacttaagacttaatggtgaaatactgaatgcctttccctcaggccaaacacaggcaggctgtccactgtcatcacttccacccacctctgtactagaagccaaagaaaaacacaagaaaatgaaataaaaggcatacaaatttgaaaagaagtgaaattatttatagatgacatgattgtttacacagaaaatcctaaggaatgcacagtaaaacttcaagatagataagtaaataaatttagtaaaatcacagggcacaaggtcaacatacgaaaatcaactgtatttctatgagcagcaagcagcagaaaaataaaaatttttaatgccatttataatgtcataaaagaaataaactatttagaacaaatttacccccaattacataagacctcaatgataaaaatcacaaaatactgtggagaaatttgagaggactcaaataaagagatttatatcatgttcatggattgagaaactcaggattattagcatgttaagacgttcattctctccaaactgatttctggattcaacaacatcacaactgaaatcataaaaggcactttgcagaaataataagctgattccaaaatgtacatgggaaggcaaaggatctagaatgttcttcaaacattcttgaaaaagaagaacaaattagagaacttacaccatttaatttctcgaattactataaaagttacagtaatcaggacaacatagtattagtgaaagaagatgaacagagtaggagagagtctaaaaacaaactataaatatatggtcaattggtttttaaccaagatggcaaggtttttcagtaggggaaagaacagacttttaagaagaaatgttgtggaacaaatgaatgggcaggcagaaatgaaccataattcctacctcacaccatattcaaatattaattcaaaatggatcacagacctaaaagatctaaaaataataacaaaaaagcccctactgggaaaaacattggagaatatctgtgtaactttgggtttgtaagaccaagatttcttagacaagatataaaaagcactattcacacaaggaaaaagttggcctttctaaagacattgttgagaaatgtaaagtggggctgtcctggttgcccagtggttaaggttccatgcttccaatacaggaagcacaggtttcaccctggttggggaactaagatcctgcacgcctcatagctcagcagggaaaaaagaaagaaatgaaaagacaagccacagagaaagtatttgcaattcaacaaagagttttatccagaatacataaagaattataacaactggattataaacaaataacctgagctttatttaaaatgaacacaaaacttgaacagatattcacaaaagatatacaaatggacattaagcacactaaaaagtgctcaacatcatcagttgtcacagaaatgcaaattaaaattgcagtgagacactatttcacattcacttagaagggctactactaaaaaaaactggcaatgtcaaatattagagaggatatagaacaactggaattctcatacaccactggtaggaatgaaaagtggtacaaccacttcgaaaaacagtttggcaatttcttatactgctaaacacctaccctacagccaagcaatcacacatgcctggatatttacccaggagaaatgaaaatatattcacacacagacatttataagcatattcacagcagctttattcacaatagtcaaatgtaaacagcccaaatggagaagaaaatggcaacccattccagtattcttgcctgggaaatcccatggacagaggagactggtgggctatacagtccatgggggtcacaaaagagtcagacacaatttagcaactgaagaacaacaacaaaacaacccaaatggttaaacaacgggagaatggttaaaaattatggtatatccatacaacaaagcactaaccagaaacaaaagtaacgaactgctgatttaagcaacatggatgaatcatctctgagacacaagcatacatactgcatgattacatttacaggaagtactaggacaagcaacactatacttcgatgttaaaagtcagaagagtggttatcttgcagtggggggaggggagtggctgagtgaaaaggagtatgacaaacctttctaagggggtggaaatttctaaccattgatttgggtggtggttatagaggttacagatttgtcaaaacttacccaacaaaatactgtgcatttcctatacatatattatgtaccaataaaaagtctgcttaattccttagattaactgttaataaagcagaagtactgcaaggatttaagctgcctcttctccagagtatccaagaagtgtttcaacatatgagaaacagatagataagaaaagctaaagtttctccggtacagctttgaatccagtgctttgatttcattttaaatgattaaatcttacatagttaaattcccatttaagagcctaaagatcattctccattttctggtttaaataattaagtcttgggaagtcttattttttaaatggctattcattaatattttattttcactctacttctactgtccctaccagcattgctacagatattccaaaaagtgagtgactagggagaaagagggcattaaaaaaatattgccatagcaaaaaaatgctgcaattatgagttgaatgatttcaatcatttaatgggcttcagacagtaaaaaatccacctgtaatgcaggagacctgggtttgatccctgggtcaggaagatcccctggagaagggaatggcaacccactccagtattcttgcctgggaaatctcatggacagaggagcatggcaggctacaggccatggggtcgcaaagagtcggacaggactgaatgacttccacattcacattcaatcatgtaacagtacagtaatagatacttcacaactcaaaagagaaaggcagaaagtagatcagtgtttgctgagggccaagggggacgggagggacagggaagtaatggctaagggcaccgggtttctatttgagggggtgaaaatgttctgaaactgactgtggtgacagctgcatttctgtatgactacattaaaaaccaccaagtcgcacatatgaaatagattaattctttgatatgtaagctatattccaataaagctggcattcaaaaaagctattgaaagtttgactgggattatattggaatttacagatcaatttggagaataaaatatatttattatattgactttttcccagtacatgaaaattatgtagttctgctcttatttgggtattctttagtttctctcaacaacattttatagtattttatagagaaatctatatataatttatcagatttattcctggataactggtatttctgatgctatataaatagtatcttaaaaaaaaagagagagagaacacagaattgttctaatgtggggaaagaagataaatagagcatgatatgtatactaactcatcaaaattttgaaatataaaatcatcaaatgtggtctaacaaatcattttttattttaaaatttatttatagaagccagacaaatatttaaaaattaaattccatttagtcatatttgatcaatcacattaaaaaagaataaaattacataaacctatataatgttataaatcaatgctacctcaataaaaataaattaaatttaaaaatatataaacctgaaaatattctgaaaaactcgatgacaggtagacaccacagggaacaaatgcgtcctgatttatattgttaggtttcttatcttatagtgaaaatagccgctttaattttagtatccatatttacccaatatatgtatttcttagcaaatgctttcatgacaaggaaattttattttacaacagttaaatttacccttaaagctgtccatcatactggtgctacagagtgtttactatcctttaaatttaaattaattgaaatattattatctaactacattagttagtagatggtgaaagcagatggtgggcttttctttcataaaataaatatttgttttctaataaaatgaaatggataaaaattgcatttaggcttcaagttaaccttgtttgagttatttaatgtttctggatctcagtctttcatctacaaaaggaggttagatgaaaacatctccatagtcccacctagctttaaaattctgttaattccataatgctaagttgcttcagtcgtgtctgactctgtgcgaccccacagacggcagcccaccaggctccaccgtctctgggattctccaggcaagaacactggagtgggttgccatttccctctccaatgcattaaagtgaaaagtgaaagtgaagtcgctcagtcgagcccgactcttagcgaccccatggactacagcctaccaggctccttcgtccatgggattttccaggcaagagtattggagtggggtgccattgccttctctgaaggaaacagcaaaataccatatggtcttaccattgtttaagcaaacacagtaatgtatgaaaaccagatgatttagtaattattagtttacacaaaggactctgtattttcaccccagaattggcaagttctctaaatataatttacactacactttaaaaaaatacacctgatgcttactgaaagtactaatgcatgatgtttctgaatcacgatcttatccttactaacaaccatagttatctcacactgatattaaaattaaaaagcatactgtatatgaaagcattttagaaaaaaggctgtttataactgtaagatattttagacattttggaaagtatccaaataaacaatatgttcataaatggagttacttttccttgtctgagtgatgtgagagacaggactttatctcaaagagactatcagaaattatgcaacctagaaattacttatctataattaaaatttactgatgaaaaaaatgatttgatatgaaaatgttacctgatcaatgatagaatttagcttcgtaagtaacagaaatcctcggccatggacaaggtattgtccgagggttgccatgtgggtttcctcttcttcttcctccctggcctccactctctggaccactgcattgcaaagccggttgacatcggtcagaaactcacgcgccaatgagttactgtcagtgctcatgaccgagctataaaataaatattacagaaaagattagaaaaataaaaatgttgcataaaactattaatacgtgattttgttgctatttgtttttaatcgaagactgactttaaattatatagtaatttaaagggcattggtacctaaccttaaaatctttcagacatagttctgacctagtctggtactccttaaatattcctgcaaagcagaaattagtcctgggtgtgaaatgactaagcaagcatgggtaagtgaaagtgctgggaaagaaaacactgggtgggtggtggcggttaaagtcaatgctgacttcctctctaaaagggcctcactctagaataaaaataaacccattacttataaaatactcttgttgtacatattttgaaagataattggatctttaaaaatataaactgtttttcacctgacagaacccaaagacgctgacatcattctgtaggttttgaggctgtgcaagttttttttcagtcttaccagagaagactggtagaaagtaactaaccaggaaacacggaaaactcatcaggtgtagtgctgacaacgcacacaactcaactgaggggctgacactgtgaacagctatgaccaagctcattcaagggtatgcaagaataaccagctcttccacaaatgcagcccactgactatagaagacaccaacagttgcaaggcacgctgcaactttagaaatttttaaaaatgtgaaaaacaaaaaaactgtggtaataattagggcctatcttctagaaattaaaataatagaaattaacatgaatttttagacaattgatgaggaaataacttcaatcccacttcctaaaagcataagacggccatgtcagtaaaaagtattatatgcagaaacatttttccatatttaaaaatgtatataaaatacatacacagttacatatatagggtatcatacataaatgatctattacctgattgtttcatttagatagtttggaaatgttcccctgaactctttctctgtttaacagctgtatgcttactttttagtacattccactgcatgtgtaattttacatatagtacatgtgtttccttagtagatgtactgtaacaatgtagccaatttgtcattgttgaatatttaggttgtttctagcttcttactatcataaacaaactgtaataaacaccttataatacctgcaaatttaccccattatttccttgaagtagaaattgctgttatatatttctgttaggtttattccaggtgtcttatagttttcatctttattctgaatgggattttattttccattatatattccaactaggatacaaaactggtatataggaggcctatagtaagtagatttattttgagatatccaaacctaactcctgtatccaaacttcctactgaactctcttattgatcttattggaatttccagatctaaaaccatgtcaactacaaataacaaaatatgtgaacttttccatccgatattcacacacttttcactcctctagctgcattagttattaacagcactagcagaacaacactggcaggagtgatgggggtacttctgcttggcacagtaagaaatacttatttcttcccacgcatctaataagaatgatgaatttaactgaatgtttttcagccattctgaatgccaactgaaaagatgattacatggcattttttaaagattttttggggaacatttcaaatgcccaggaaaaaaaaaagattctataacgtgaggttatagcaaatactcagacttcagatctagcaagtataaactatattcagttcagttctcgtgcatggggggatgggtgtgtgcgtgtgcatgtgtgtagagaaatcaaactttatagtacaggaaagctacactccacccatacctcttccacctccttagttgttgttttatcatttccatatatatttttataattttgatacatcatagtcataaaatattcagtatcatttattttaaaaagtatgcatctttttataattttgcttttccctctcaacattaagttcactcctttaggccactgtgcaatgtgccatagtatgaataaaccataatttacatgtctagaaagtttaggtattttcactttgggttttaattaacatcatatcactattagtttcaaagtcttagactgaatcaagtattttggctgttaatatatgttacattaaatactcaccgatctttcaacacttctgtaacatttagggtctttataatttgagttcatgaactggacgaaacaaatattcttagaacaaagctacacctaccaaaaaaaaaaaaacaggataaaacaaaacaaaacaggataacaattaatggcgatagctaaacacaaataattttaaaaattaaaattttgacataaaaaccagaagctagtcttcatatttgatgtatgaaacagccaacaattttttaaatctcaagagcacactaaaaaatgcctgtagctttaagaatgggatcttgagagatgaagtcttgggacatatttgatctgcacaagacaacctgatcacagctccctacacctcctcttccaactcccaacttacagcctccagtaaaccacgacaaaggaggaagaattgggcaccatctgtcttcttaataatgaaatctagacagcagtagaatatcatctatatactatgacagtcaagttattactttcctgtaaaagatatttgaggatacatgagaactcagaaaatactacacagccaacgaatgaataaaccacctccaagtttcctaccctttctaaattttaaaaaatgaattaatctcctacatataacacagtgaaggctatttctagaataccaaaggataaattcctacttctgagatagcaagaagatgcttctctgtagttttctcctttgctataacttttaccaggcagaggcatgaaaaatattttctgattatagctataaggcaaacagtaaggtttattttgagccacaagcttttaaaatcaaaatgacctttaattgcttgaagtgaagtgaagtccctcagtcgtgtcggactctttgcgaccccgtggactgtagccggctaggctccaccgtccatgggattctccaggcaagaatactggagtcatttccttcttcaggggatcttcccgatccagggattggacccgggtctcgcgcattgcaggcagacgctttaacctctgcaccaccagggaaaccagagcactgtcttgaattccgttcagcttgacagacggttcttgtactacacactattctaggcccttgagaataaactaggcaagaaataggacagaactgccctagactacacaggactttgtgtgaattagggaaaaaacacttttcctgggctggtgcagcgcatggcacacagctgtcaaagcacaggctgggtctcagtcttacctgctcactccactggccaaccaccagggcatcaactgccccaccaaacaaaacagtcctggagtggagtctccaaacgccttccacacctgcttctactgcatcaccctcatatttttaactctagaattacagacaaggaaatcacctatcgaacaatgagcgtaaggaagtactgtatgaattgctctggctactggcaccctctagcctggattactacacgatggagccatttatctcagatgct

SEQ ID NO: 175 - DNA, 36102 bp, Hippotragus leucophaeus
  source 1..36102: mol_type = genomic DNA
aaaataaagcgaagggctatgtttcacagatttgtgcaagtttctttcaaatctcagtctgttctttcatcaaaaaggagatcgcagcatctgtgttagtcctcatgatgaaatagtaaaaaactgcattccattgacaaaaaaaatagctttgcttccaaacagcacaagtctttaaagtgacttttccccaacaataaatatagaaaatagcctttatggagcacgtctggcttggtcagagctgcttcctccccgatagcctttagacgtcgtcttagtctttggtgcatgggcggccggcgagatctgactccaggctgcccttcggggccctccagtggccccagccccgtgcagcacaggctctcagctactgcaaacgcccagctgaaggcttgagccctttcgagccggggcccctcagaccccacggctccacctgccccgtggctgcccgcgaaggcgctccccggctctcacggccggccgggtggacatcacaccgagggggcctttggcgggtgaacctgctgcacgagctgtgggcgtttcaccctgggcttcctccgcttcggcctgctcttggccttgttgatctgcaccacgaagaaggccaagaccaccatggctcccaggaaggcgaaaacgggaatggtctggcccacctcctggttgtagcggccgggcatgatccctgcacgacagtgggaagatggtcagtctgacggctgcaaccagctgggctcgtagtgacccagacgaaggaggagagaaaagtgcaggccagcagggaggtgaggacagctggcctcgccactgggaaggcccctgacaggtgagacttgtggtgggcacctgagcgtggccgctggtggaccctggggttcgtgctgccatcagctctgtaaatggacaacgccagggttccagaacacatggctggaccacatgggacagggtaccccttcctgatccctggagtttttctgggcaattcctagaaccaagagaaatgcccccaggaagctataaagtcatgtaagagcatagggatttccagagcagaagaggggcccacactctgccagaatgacttgattccattgtcccagataaaggactacctgcccccaacagcctagccaggccaaagccattatcagggttgggggcgagggagggacatctgatgtcacttgggggaagggacacccccaaaattaactgggcatcccaggttagggaagtcccatcccaggtgggctggagcagagaattggtggagatgtctgggttgagggttcagagtcaggctgtgacagacgaacatcataaaataaattcagatttgaaaattcagataggattttctaagaggccacagtgtgttgatcctttaggtctgctctggccttgtgatttgtaccaggaagaaagcctggaccaccgctgctcccaggaaggcaaagacaggaacagcctggcccacctcctgggcaaaagggagaggctcttttgaataaaccataggatgactcagccccacaataaagcacctagaactgacctccaggaatgtcccaggctccactctctccaggagacaagggtctcacttgagggcgattcgatcggaagttgggcaataccactttgtccaggtcaatggagagcaacttctggtgtttccaaaggttacttcaggaaaacagattcaaacaaaataaacattagcaactgtactggccccaggcaacttagccaattcctaagaaacagaaagtgatttaaacagaaatgtgaactgacatcccatctatgtctatctaaacacaactgcggacaactgaggggcacttccaggcccccagacgcggacgtcagattgagactttatgcacgagatgcttctagagggtctgtaacaccaccaacgcaagactgtcttggcttcaaccaggcatgacccagcagaaaatgaggaaactacacgtgacctctgaaggagctggtggacagaggcagtggacacagcccggctggaaggaccagtctccgccatgggacagcagagccgtgggcacctactgtgatgtggcaaaggggggcagacctggcgctgggagccagctgtcaccttggtcctcaaggacaccacttgcaggagggagaacgaggcagacacacaagtaaccgagcagtggacagaaacacgggaataaaggagtgggcatgggccttgcctgagggctcaggatgatgaagggaacacatgtgctttgcaaaatgcactggactcgtttcgactgcatcattactctcagtactaactgagattggaagcacatgtaactgaggaagagaggctggtacacagccaagagcagcgtgggaagacacagagatgagagcaaagagtgcagacggaaaatctgaagaccattctggctaaaacaagggaagagaatgaaatatgcttgcaattatgaattccccattctgcttcttattcgtgtggaccttgctggcccatctcttactttggccaagtgagagcagagagccgagttctagcagcactcaagaggcaggtcagtgggcagccgggagatgccagctccgtaaagaggctttctcataagctgctatcgggcacttccagctgggcaactgcttggactataacctgctctattttgtatgatttcactttgcttttcagtttaatcagtctggaaattaaactgacaatgctaagttacggaatcgatgtatttaagctttataaccctgcaggtgaatatacatggggatgtcttttaatgctcacagtgctctcctgttctggaatttaattacccccccagtgaccccttcttgctgagcagtcggggtgacagagcttcacactatcatttgagaattccacaatgtcctgatgggaggacaggttagcctcatgtggggctcctcgcaggcctgccctacagccactcgtagtatggacgcccgacgcccgggaacaacaccgggaactgtgtcccggttttaaggacggagtgaacacccgcactcagcactaggctgacagaccctgacctttccagggctgactggagcactctgacattgttttgcatctcctcagagattcagaatctagacccagatctaggtcgccgaggacggagaacaatttccagcaagaagtgagataaaagtggggtctggtgggtgttttaggaagaaggaattccagagagcgacagtgaaaataaaactctaggggctgcacagcagcagcaccttgatgggccaggctggtacatgacaggctgtctgatggacacacagatatagaacactgtcacctgttctcagagccccgagcagtaccatggagaagaagtgggtttcaagaacctttgctgacagtgactgtccactgagtgtgaactgctgacaacagctggaattaaagtctggtttgaatgtctggataatgataggttataaataaatgagatataaaaatggaatcttatcagaaaattttaaatgatggcatgttaactggaatggaaaagtactcagtaattaaagtttcaggaagaaactgctgacgaggagacaacgtgatgaatctccaatgccgtttcctattgagcatgttctaaacatgacatggtaagcaagaagtatactcagggcttctgttcatgacgacagtcaagcacagaagcttctgggccttctgcaggcagctccctcctcgtggttcactgtgtagatggcagtccccgtgccctgccacacacaccctaacactgtacatgctgagacccaagcaaagtgggcagctggtaggggagagaaggcaggagcccccggaggggaaatggccgcgcgtgtggggtgtgctgcccatgagggagacagtggctggcagctgctcagaggaggaggagccgtggcggggcgggggggtctcccacagccatgccccgaacatggggccctacatcactgtactaggactgcaatcctcctcgccacagcagatctcctgctggggccagagatgccaaagagagaaacgggagaggagcgatccagagaaaataggaaccagtggactgagctggcccttctgcctgaacagagacacagcacaggtcactcaattttggcttctaaaaggaactgacacaaacgaagagcttgagcttgatagccagatggaaaagcaggcagataagtgtctgggcctggcacagtctgaggtcactttaccagggacaacacccagcatggggtgagggcataaacgtgactccaggtcgccccagtgggacacaggaagaccccatctgtattccagaatcaacaccacacacaggcgcactcaactcccaaatctccagcttaaggagtcagagcgacccttccagggacatgactgtcagatcacagcttttcaagcaaaaaccaagcaaacttcaccagaaggctaattaccagagctctttttatgcataataccactagggtgcgtgattctaaaggtcaatacgggggctcgctaatttaaaaaccatcacaaatgacaagctagatttgattattcgataatgatgtcagtaaaattccattctctcctattaaaaaagaagcaatgaatcataaatccagcagaagaagtggaaaagcacaggagacaccaacctgggagctgtctcgtttaaaggctgtggcttggcccatgacaggtgtggacaggctggcagcgcacgtggctcagggcctccgagccgggcctccaggaccttggagtaccggtgcaggtggttccctgggcagcacccgccgacaggccatcgttgttaggaggcaggggagaaagagacttcgtcagtcgttgcttcctctaaagcggccacactgcacgcacagcagcagctgggcccctcatgcccgtaatcacacatacgtgcctacactccaggagtctaacctgtagatacgcctcacggaaacagcatctcttcaaatacttaatgctcaggccaaaaagaaaatctccattttcaaaattccaaattccttttatttctcagatccgtgctgccccttactgtagccactgcccacacatggctactgagcaactgagaggctaggtgccacacatttaaataataatattctggggactggggctgtacagttttatcacaaggaacttcccgtttctttttactccttaaatgaggccagtgggaagttcagaactacaccggctcacaccacgcgtccaaggacagtctgggggaggcggagctcaggctgtgaaggctcgcagaccgggctccgctgagtggcctgctgctgggggacctgggcccatctctttcgtggacttggaagaagtatctgctttccaggttctaagaggactcagagaatagtccctgtgaagccaccctggcccagcgcctggtacctagtgactgtgcagacctgctgactactcctccccagagccccgaagccacgtcatttcaagtgagtctgcaccccagaacccccacctccgaggccgctcaccttccatcctctctggggccgccgagcctgctccgctgggggggcgctgccgagcccctgagtggctgaggctggggggcgtcaccccatacgacgtgaactgcaggagcgcatccaggagccagaagcagtctgcagggtaaacaacacactgcttaggaagtcgacagtttaaagcagcctctacaggaaaactaaagtgagccctgaacaatggggaaatagggcgggaaaagatcaggtcccagcacggccctgctgagatgctcatgtcatcttggtcatcggctgcccacagggcctcctttcaaggccccaggctcagccaggctggcccacaggctcggggctgcacgcactgcccaggcacccccctggctctgacgaggacgggtggggccgctacagggacagcagggccacatggcagcacgggaacaagtgctgcttcagaacaggggccctgccgaggaggggagagtgaggagctgaccccggccagcgcccgcaggctgtcctggaggaggggagagcccagatctcagggcagagccaggaccaccacgtgtgtccggagaggtgggctcaaggtcagtgcaggcgcagtctagtggtttgggctgccctgagttggtggccccagccacagagtaggatgacagttctcctggggacgtcactgcaagtcctgtgccaggctgtgctcaacaaccccctcatggggccaagtggatggactttcctctccggagaccaaggagctgcactggctaaacctggatcactgcccccaccagcttctccctgcagctgccacgtcccccaaaaccagcagacaggaggcggctcacaaaaaggaggggatggcaggaagcgcctgtcccccaacggagctcgagtcaagtgctcacggccccgaaagctcctccaggtagccacagggagtgtgggacaggacaggcccccaaccactgacagggccaataaagacgcttcccaagacctcaggtctgcaatgacagtctctacagaaataaaacattaatcttctttcaactataactttaaccgtcacttttgatttttattaaaaaaaaaaacaaaaccaatattctaatgctttacgtgaaatgctaggaatgcagttacttaaccttcacatcacagagaggacacagggagagagagacagggggagaggtgcaccccaggtaggaggccagctatgctcaggccaccttgccccctcccatgaagcctggtcaccacctgcccatgaggacacgcctccccctgccctcctgcccccgaagactaggttctggttctggtcttgttgtctcccctcagcagagacagaacactcacacccatccacccctcctttataaagcaagagaaagacaagtctgtgtccaagctcatccttcaaatgtggactcatcaagagatgctggaaaagaggggtgctaaagaggggttctaaggactaggtgccccctctctgccacccccacacccaacaatggtaccacacacccctctcacaacagccaaaactcccaggtctggcatgagggccaagtgctgggcctgcacgaaaggggtggtcagatgcaagaggggacctgcagagtagtgccagagacacagatgccagagaggaagtcagagagggcagagacaggtaaacagcctcccacccacacacggtgggtttgccatctgccagcctctctggaaggccacaaagttttgttttgcttattaaacatgtctggcccaaaatacctatcgaaacatcctgagcagcctctacctgttcatcagcacctcacaggggcctgttcggggactaggacagaaagtgggaacgtcacggccaccgagcccacccgctcagcagcaccactgctcacccttctgccggtgactgtcgtccaagcagttggagtctccatacagcacgacacggccgccgccctcagctgggagctggtacagccccaaaatggggacgttttcaaccaccaccgtttcctgcttcaagacctctagtcctgaaacaacacaacaaaacaggagtgagaacttcagcgaggaaatgaagcacttcccagctgccccttaagttgacatttagtccacatgacaaaagagaaagaaaaaaaaaaaaaatcacagtaagatctaacatgcagtcacaacagtgcaaacttataggagaagaaaacaatgtataaagtgccactaatttgggttgtagcaaaattcgtgcctatgtgtgtatgtatattcccataatcctccttttccattttcacctgaaatggtgatacatggtattcacagctttaaaggcatcacttctctcttttcatcccccaagcacaaatttttgtcccttattatgctaagaggctatgtcttcagactacatacacacaagggccagtgccccctcaacacacaggtacctatgcacacagttatacacactgatgcccaggcttcatgtttcgtaacaaaagctacgacaatgacactcatctttaaaacacatgcccacgtatttctgatttaagttatctgttacatgagtctcacagacacagtacaaatgctccaacagcagagctgtctcgcctctgcccaaaccgatgacaattcacaacatcaactgaaccaggacgaccctgcacagacgccacggcagctgctgccagtgacaccagctcgtaagcagagcctcggcccctgaagcacatgcagccgcacaccgagatgacgcacatctgcatccagcgcctaccgcaccagtcactctagagcatatgtctacagggacgcagagcttcctatgctctgcgtataagcccccgggaaccccgcggaagggaaacaggcttttcttcgtcagagggagagacagggcagtgaaacacacaaagcaaggaaagtgcagcctggcctcggggtctgacagggttttgcctccgacaacaaggtcctttttgatccagcataacccagatttttaaattcctattttgtacccgcaagattatgcaagcaacctaaagcctgtttggaaataaaaagccctttaaaaaggattccaaggtaattaatctttattttcagactagcagaacaccaaagtaaagtatgcacccttaacctacttcctctccccccaaaatgaagagctaccagacgccaagaggctaacaaggagtccacggcctttacctgggggtggagggggtgtccagaagcgacacggcctggtgaacaatggagcttagaaaggatcactaagacacagtacagtgtgccaggggactgggaagacaggatcatacacgtgcttaaaagttaaaacataatcttatgaacacagaactcctcactgactgacttttccttgactggatggaaggagccccttccaaacaacacagaagtaaatttcaccttgcaaatgcaaacacatgagtgagaaatctcctgacttgtcattttctattaatgaaactgtccctgacttcaaccacagaaaatgacaaacatcccaatgaagggggcctgccattctgaaacacaagagaaacatccacctgcacgaggacacggatccagtctgcaagtgcccatcatgtggccatgcaataacctcgcaggggagagaggtgcggcgcggaccccggctcgggagcgcagggctacaggacgaccaccctgggcaggacgggggcggtggcgcctgcaggaagggcagaggcacccaggcgccccagctcccctgcaccctgtctgctctgtgagccgagcacggtcacagcaccgacgctgggaacacagcatggttgaccttccagggttagaaaagagcaactgaaagcaaagacctttcctcccttctaactcttcacagaatcttaggagatgactttgtattacaatattctttaccttcacatagttaagacattcaaaacagttaacatttctctaaaattttagtcatctggcaatcacagagcagaacaattcataaatagtaacaaaaatttcaagcaactctgaaggtagtttaaaaaaaaaacacaaaaaacccttaccaataccctcttctcctataggaaaatcaacttactttgcagtgctcactacccacgtattctaattatcagcaaaagatggttgaaccttcctaggtacctccagaatcatcacacagacgtcttacctgaagtaccatacaaacactgtgatgaatttttaaaaaatccaaactgctaatggagaatggacttcttttctggtgatgaaaatgttctgggactaggtggtggtgatgactgcacaacttgtgaatatacaaaaataatcactgaaccgtagactttaaaagagcgaatgttatggtaggtgcacgcatgcatgctaagtcgttttagtcatgtccaactctttgcgactccatggactgtaacccgccaggctcctctgtccatggtgttctccaggcaagaaaactagagtgagttgccatgccctcctccacatggtaggtgatttatatgtaataaaactgtgattaaaaattaaaaagaaagaaaaagagaaaccaaaaagcatatgaatagcatattccataccttggtccttaaatgtctgtgttatcacgatgccatcttctggaaatttagcaatgctgcaccctgacgcataatacactagaataaacagccattcacagttagaacctggaaacactgaaggcattcagcagcagctgttcatttacctgtatgcacgttttagacattatgtatttactaaaaccattcctgatcttaagagaggagctattattattggctggtcacatagactacaagtaataatctcaaaactcaagctaaattatgctattaatctaaggtttctgggcagattaaagaaatcggagctgtcagactcgggacaacctgtcagaaacagcagttagtgaataatgctcaagacgctgtttcagaaactagtcaccagaatgaagtggggtacttcttaagtgaggtatgcaatgttatttcataaatagaatttcataaataatcagggacctgcacagtgttccttatttgggaatatacagaacacaaagaaccaaaactaggaatgctgacaggaggtattttatctcccaaatctggacaaagactagggggaacacccagaattgcaggtgtctctgtgcagacactgctcagttctctccacaggtcttgtagatttaggtgacagcacattattttctctctctctgaaaaactcaagacttcaaagacgcacggcatctgctagcccacctctgggaatgacgagacctactaaaagcaaacacaaaaccttactgtcatggttcgccaaggtaaagtccccctcgtacaggccatcgctgaacgccatgttccagactgacagcagctcgttcagggctgggacgttggctcctccggtgtccggcatccaccactgcctatgacagggacagggccttcgtgaggcacttgaggcatcccacaaacccatcatattttgtgagaaaaccgatttctcccaccagaggccactccatccacactaggcttcacctaaaattaactgtccgggtttgagtaacagcacaatgtaaatgctccaaccagggtacagaataaaccgaagcccgatttatttcatgaaatgtaccacatttaacataaacacatgcatataaagcctacaccttgagaggctcagtgaaggaagaaggaagcttatgaagttcaagtcacagactccgaagaacgaacatgtatcataaggatgagacattcataatacactggaaatttgtcatccataaccatctactgcaaggttctttaaataacagttcttttggtgcatttaaacatatacagtaaatgagagatggaagaacagaaaagaataaacagaaaactaaggctccagtgtcttaagatcaacaaaaacaatgaaccctttcaactagcacttggttcaatgagcatctgactttcaagaacatctctgccaaaggagatcttgccctaaccaggagtctgaacctgcttgatggccagaaaggtcatcactctaggcctctgctgggtgggatttaattcctataaagtcaaatttcttatccaattcgtgtcagtacctcgtgttttcatcataaaacttgactttcctcatcacggatgtgttgtaccagtcactgaagacaatgagtgagaggccgttgtccacatccctccgcagcttggccacctcctccgggaagtactcttcctcactgtccaccatgagcaacgttcctgagggacaggggtgagaaacggtcatctcaccatttcagacatacggttttacactggcctcagtatctccagttactggcttctaatattttgtcctgtgcccctattccacgtcagaaggggatgtaaaagaaaggatcagggtctgaaagcacgtggacactggccagctatggcctgtttcactggtgatgacctacatgaggatatttcacttactcaaaaagaagcaaaattctgtgctagaatttctttgattaaaaaaaaaaatcaacaacttattgaccagaaacatattaataatacatagtttgttactcgaacattactgaccggaatctttcaattttcacttacataacaaatcataggccacaggcgttactttctgcaaaaatcacccagtcaataatgttgatgctaatataacaaaactgtaccaaatgtccttgtccccagtgatcctgagagtttcacatttcagctgaacgtcaggagcacagaccctagcctggcctcacccgtccccagccaagcggggcagcctgccagcacctggcatcgctcaccgtactgattagcatcaaagcacgtgaagggggagccgaggacttcgacgaagtagcccatgctcctcaggtgctggtacatgtccctgaagttggtgtggatgtggtcaccgttcctgagacagaggaagcccagcactaaccctcctagtccttccacggactgaaggccacatggccgcggggttcacttccaaaggagcagtttcactgcccagagggctggtccactggcacaaaagccagcctttcagaccaactcgccctgggctgcatatcaagtagtgataacaggaaattacctgcatagcatagacatgaaggagagaaaatgacgagaagacatagccaaagacatgttttgtcaagtgcaccaaagcatcactttagtggtggcacagatgtaaaaggccagcaagcagccagctgtgctgcacaaactcagcatgggcaagcagagatgctggcagtgaaccgcggtggccacataggcagccttacatgcctgccacaggtcaccctccctcccaccccagcctagccggggaaggacagggcaggggtgatgggctcaccagtccagagggtcattcttcatcctcaggttgtcccgggggaaatagccgggcgggtagcgcaggttgtggtactggtcccagaggacgcgcttgctccggggaggggcggggatgatcttcaccttgatcggaagcttcactgtggacgtctgttctgcaccactgtttgactgaaggaagagaagaattctgaaatgccccttctgctcagaagaaacgttttacgccagaaacgtggcacggaacagcccacggcctcttcaccgtgcaggccatgcccccaggtgctcgccaggccaggacccacatggcctgtgcctcatacccgagtgcccggcgctcagcccacggccacctccccaccagccccaggcacacgtacgtccacctctgccggggaagccacggtgaccgtgacgtgcccctgcgcaacgccttcccaggaggcagccttcttggtgacagaaagggaaatggccaggtagccggaccagggccacagcactgaggagtaggagaaagcgacctcgatgttgtctccgtgctgcggtaagtagggctgccactcgggctgcaggaggaagaggcagaggcctgggtgagaagctcagttcccaacttaccaacactggtgtctgagaaacactccactaaacaggcaaagtgaaatgtacaaagacactgagcagcctgtaaccaaggctgcccaggctgggtctggaccatcatccactagaaaagcctagaaacactatttttgacaaaacacttgttttgacaaacttcagttttaaagaaaaatttcctcccctccaagctttaacaaaggaagggatggggacacacatggtttgacaaagaacttgtttctgacagataattaacataaaagaaaatgctcaaatgtggggttagatctcagctgtgtgcttaaagaaccaaactacttaaaggaataaaataataaaaaagacacagatgtaaattgtgaccaattagataccaaggtcagtgactgggcaggcaggggcccaggagccccaaagagagctggccatgctgtgaaggagaccacccgccaggctctccaggctcgaggaagaagggaagcctgaaaggggagacagacagtggctctcacaatgaaccagtccttcaagctaactccctcacaagccagagaacagtcatatacttcccaggagggtaagcatattaaaaaaaaaaaaaaacaaccgtgaaaaagaagaaaaatattcatgggatatagtatcacagacaatgagaaaggacagggattttgaataagttattttgagactgctggttaacaactgagaaaaaaatgaactctcatccatctcatcagattgactcaatacagatgaaaacattaaatatttaacaagcataaaagaaaagtgagtcaaaaataaaactgaaattttcttatatttctggagagatgagtttctagtttttgaaacagaaataatcataaaagaggaaaataacatctacatgaaaaagtgaaacctttacccaaccacccccttaccccaaatttttaagccacttctaatattatttaagagacaaaacccagtaatttcggccacctttcagcatgacactcaacaccggagtgacgatgacaaggacaacctagactctgacaaacaacgggtcaagaaatgaaaagctaattcacataagagacacagaatcagaaacaaacatgcagatccccaactcatcagcaaccggaaaagcacacattgaacaaggtacccgctatcccctgtagagttaaagttataagatgaaccacataaaaacgaaaggctcatcaactgacgatgccgggtctatccacacaagaaggcacgagaaggagtgaagcactgacacactgcagtgtggatgagcctcttttaaagacactgcactcagtcaaagaggccagtcacaaagaccacgaaacgtatgattccgttcataggaaccgtccagaaaaggtaactccatggagacaaagtgcattaggagttgtcagggtctgaggcggaggcaatgggaagtgttaacaagggtctctcctttgagtgatgaaaattacacagaattacacagtatgagacttaacataactacttgcaaatatagtaatacccactgaaatgcacaatttaaaagggtagcattgcatggcatgtaaattttatctccgttttttaaactttcatgcaattgggaaaaaagaatgtaccaccagacacccccactctgtacaccatcagtggcagcctcaggtgatggacctcttctggaaaccatttcatattatgtcccaagagccacagtaacattcatgtcctcttacttggaattctaacccagggaaattatgttaagaatgtaattcagaacaaaagaaaaccaaacatacaaagatattcagtgaggtatttacaggcgaaatcaccttgttcaggtaagaatagtaagaagttatgacttagcagttccatgtaatactgaacaaccattaacattagcgcttatatagaataacatttttaaaaatgctttaacgtgaaaattgaaaaaaaaaaaggactaaatttttgcctacccacacaaagataactaaaaatatccttttcagataagggatagaaaagattcttttttttcccctcccaggcaactgacttttattaatctcacaaaatcaaaagaaatgtactgtctggggatttccctggcagtgtgcttccactgcagggagcttgggttcaactcctggtcagagaactaagaccctacatgacacactgtggccaaaaagtaacaaaaagaataaaaaaaaaaaagtactttctgtgatagcttcatgaaaagtgaaattctgccatcaagacattctgcaccaatcctggtggcctagtggttaaaaatctgcctgccagcgcaggggacacaggttccaatcctggtctgggaagtttccgtgtgcctcagggtacctaggcctgtgcgccacaaccactgaagcccacgtgcactggagcctgcgctctgcagcagaagccaccgaaacgagaagcctgcacactgcaactcgagtggcccctgctggcagtaacgagagaaagcctgtgcacagcagcaaagactgagcacagccaaaaagacagaagtgagatgaaacaaaggatgacacagtgtcgacaggcactgaatcaatttaaatacacttatttaaacaactacagtaatttgttacaaaatatgacttgaacttttttttaccagtggttctgttcatgtctgaggttaaaatcatttttctgttctttttccctatcctttattgttgtgataatgtttatatagaaagtgtaaaacaaattataaaaacaaaattcaaataaagaccataccttctaaatacaaacgcccatgtgtacacattaaacaataaaataattacaagtgggcctttaattatcagtgattaactgttaagatgaagactcaaatgcaattagctgattcaggaaccaaactcaaaatgcctagtataaccatagcaaattggtctcatcactgtatctctgacttatccgtaaaggcctcagaggagaacaaacccctgcttcccatccccagccgtggacaggaggaagcctgggccacatctaggtccccggcagccggagggcagtctcaccttgtccacgatcctccccgtgactcccatgccattgaggatggtgacgttgacgatagtcggcatgcccccatagtagataggctgggagcagtagggccacatgtaaggacactcggtcaggtcgatgtagctggggctcaaactgaaacagacaggacagtgttgcagcagacagagtcggagacggcaatgacgggacacaaccgcaggaaagcgtcatcagggcggacctgagcctcagccagggtccgggaacctggcctcacagcactccctgcggtgaggaggcctccaggccagccggcctcgcccgcagcacagtggtgtgcgtgggtatcacctctgccccacgagcctggagcctgcagctggcgaggaacaagtgcgtgagcggccccagggcagacctggactcagtctcaagtcatggggcaaagatggactttttaataactggacctgggataaatgggtggccatttggtaaaagataaaattagattcacaactcacaccatacatattggagtaaaccccaaatggaacagtctcaagtaaataaaagaaagcaaacaagcagaagaaaacagggtgagtctctcctttacctcagggcatgtgcctcaaaatccaggggcaaaaacaacaacggaccaactaacacagcagttagaacaaaaaaagaccgcagggccagaaacacttttatgacaaaaggcagctaacaaactgggagaaatacctgcagcaaagggttacgtaccctaatatgtaaacaacacttaaaccaagggacgaaaaccccataaaaagaataatgggtgaaagaaatgaacaaacacttcacaggaaagatatagaaaaagttcttacctacaaacagtgtttaaactcactcacagcctgagaactgcaaataaaagcaaccctgagggagcacttcccatgtgtcagacaggccagcggtacccccgggcaccctctgctcacagcctggacccagcgacgctgcttctaggaatcttccctacagacacaactccaacaaaactaggacacacagacacaagcagcttacaatgacaaaatactgacaacattttaaatgcccatatatagacacgtacttgaatacacaaaggtatccacactacgaagctataaaaaaggagaagcaagatctctgtgaatggatacaaagtgatttccaggacacctttacatgaaaaaactataaaacagtatttataataatgtatccttcatgtaacaaaggggatatataagaagatagatatgtatctgctcatttgtgaaaaaagaaattcaagaaggataaatcaaaaacacctgggcttgttacctgtgggagcagaggggcgggggggcagaacagagggatgggaggaccacacctggccaggcacactctggccttagagtcaccgtcctctttcacaatgcaatacgtaaccagctgaatcaaccagaatgtagtgggaatccaaaaagaaatacacatactaaccagtgaactcaactatactgaaaataaaaggcaaaatcagactgacagggcctggtggggaggaagaaaagaaatgaactgaggtcactaacaatatgattcagttcagttcagttcagtcgctcagttgtgtccgactctttgtgaccccatgaatcgcagcacgccaggcctccctgtccatcaccaactcccggagttcactcagagtcgcatccatcgagtcagtgatgccatccagccatctcatcctcagtcgtccccttctcctcctgcccccagtccctcccagcatcacagtcttttccaatgagtcaactcttcgcatgaggtggccaaagtgctggagtttcggctttaccatcattccttccaaagaaatcccagggctgatctccttcaggatggactggttggatctccttgcagtccaagggactctcaagagtcttctccaacactccaacaccacagttcaaaagcatcaattcttcggcgctcagccttcttcacagtccaactctcacatccatacatgaccactggaaaaaccatagccttgactagacagaccttagtcggcaaagtaatgtctctgcttttgaatatgctatctaggttagtcataactttgcttccaaggagtaagcgtcttttaatttcccagctgcaatcaccatctgcagtaattttcgagcccccaaaaataaagtctgacactgtttccactgtttctccatctatttcccatggagtgatgggaccggatgccatgatcttcgttttctgaatgttgagctttaagccaacttttttgctctcctctttgactttcatcaagaggctttttagttcctcttcactttctgccgtaagggtggtgttatctgcatatctgaggttattgatatttctcctggcaatcttgattccagcttgtgtttcttccagtccagtgtttctcatgatgtactctacacataagttaaataagcagggtgacaatatacagccttgacgtactccttttcctatttggaactggtctgttgttccatgtccagttctaactgttgcttcctggcctgcacgttctataaatctaaaaagaactacccacaactgtcatcctctagggagtaaacttgtgttcaccagggtacgagttacagctctaaaactttccacgtgtgcgtcctaggaccgagtcaacagagacacggtgaagagtgacagccaggctgcctgctgctagataaggacaaccagcgagaagactgagggccgtgagtgggacgggagacaggtggcatcacagacacagaaaaggtacagaagtatgtatgcggacactcgccagctcggtctgtaggaagggctgagaaacaagcaggagcacagccaccaaaagcacacctggagccaggagtccatttctaaaccccactctccaactgaaggaccagggctgcttggacagaactgatacccacagtgggcgtagaaatgctgccagtggacaatgatggagacacgctgaaaagacacaggagccaaaaagaaggaactccagagagccaaatctgggacaacaggagcaatgaataaacaaagacattaacggattatagtcagagtgaaacaaggatctctgtccatgctgatgtaactgaaataataagagaggaggacagcacttccttacagcagaatttcagttaataaatgcacaaggaatgagaagcaaaaatcgccaggggcaacctcatataagaaccagtacaggaaagaaccatctaaggatactaaacgtagtgacggaaggtatggcaagaaacaagatcatcttcaagcgtgcaccccaaagacacttcgcagtcccagagagacagagagcccctgcagtggaccctggcaccgcctctcccactgcccagccccagacactccacatctgtgccagggaccgagcgcagcgggcaccagagccggccccgccctggggactcagcctcctctaacagtgaccttgattcagggattctctgggatgaggaaagatttcagacctgtgctggcatgagggtcctctccccatttctcccgcctcctcccccagaagatctcttggtgcctgcttcctgaagggtccagcctgacacgtcacctgaacctcaggatgcagacaagcaccgccaagaacaaaaggaagggcactgagccaatgagcccagctggcaactaaccgcaacgccgatgccggcctggatcctggaccaggctgaggacagggtggggacaatctgggcaaaatccaaacatagtctgcaggttagcggatcgtaatgcatcactgttaactgctaggctatgtggcgtgtgcgatggttacataagatgctaataccagaaaagccagggcagggctggaatcctgatgtacgatatataagaacgtccatatgatttttgcaaatttctgtaagtttaaggttacttcaaaaaaaaagttttactaagtaaaaaagaccaggaattcattactttaaatcactgacattacaagcagcagaatgtggggaagtggggagcggtcctggtgtcccaatagaagcagcagcatgaagctccccaaggccaccaagccttgctggtggggtgggatctgttttgaggcaaacagcctgtgctgagggagcccaggaagaggagaaagacgggcacaccaacctggcctggggcttgtagctgttgaggatctgataggctcggaggagatccagcttgccgtggccttgctcaaacatgttgacacctggaagccgccgggcggacgcgatcagggcctgcttcatgctggctgggtttaccagttcacgtttctggactgtgctggggggagaaccacatatttgctcatctgctcttagcaaaagaaggaaaaccagaccatccctgacccgtagcagtgcaaccacacgacctccaaccttgctctatatctaatgggattttcagtaaaatttgtgtaagacaagggcaaacatgctcatttctgctcctgtctcaggactgaccacttacctccttccaagtggctgtgagagcacggactctgggctcatactaaactgaccaggaaaacatattttcctactaactcaatatagctgacctcagaggctgcaggtaggagttacagttcctgacaggtggacacagcctggctgggagaaggggaggatggaggtgggtccagcaggcattcgatgctgcatggcctagaggcatggccaggagggaagcccactgccccacaggtctgttttgtctagagaccctggtgggtcgggcctggtggagggctcagcatcagaacacaactggactcaggcagcagcaccccactctcgcctgctttagaaccagcattaaaacacgtgcgtttgtgtacctacatgtaattaatacaagtaaactgtgattccctaaatgcagagaaaaaatccagtaaacagtaaagaaaaattctctctccacagttgctaagtatttttcttcgaggatgcctggtcttggagtgttactgtgttttttgctaacaggtctagatgggaatctgacttcaggagatgtgagaataaagtagaacttttggtagaaacaagaactgctcacagctcagcccgaggcggacgccctgcccctcctgccgacggaacaagaccaggctgcagctccggctgctcctggggctctaagaccagagctgaggaagtgcttccctgtggcctggcatctgcatgagctgcttctcacactacaaagcactgctgaccccccagaggtgctctccgtgctgcagggaggaggaaagcaaaggcatcctccccactgaaagcatcatgctcagagaggctgtgaggctgggcacggcaggcaccgaggactcccctcccgcccgacagcaggagaccagacagcccccaccctcagcaacgccccccaggacccttgagacagactcctggctcctgcagacaagggcgaggccccgctacaagctggccagccacaggactcgtcccctggcctgctgccacctacccctcccaaccaagcagcactcacctcagcagcaaggtgacagcaccagccaccaccggggaagccacgctggtccccgagagggcccggcacccccctttcacgcccgagccccgcactccagcgccgtaggtgacaatgtcaggctttacacggccatagcctccaggcagctcctgcaacaacagcagtgtggtttccatcaggcccccacgagggcatacagcccttagcagttatgagtgaatgaaaccagaaatgccatcagctaaacagcaccacctgagcatgctgctggttttcatctgaaattcactgcaattcagaagaagcttaaatgatcatacagaaaataaaattatttttgatgtgtttttataatgaccagcataatgcaatgctctacagcatttaaaaaatgaatatctaaaattttgctaacatgcaagactggaaactgatttataaacaacttaaaaacttagaaatatgttagaaaaatcagcaagttaaaattaaaaattaggaaaaaaaaaagatacattttcttaataaggtaaaaagttacatgatatgactggcatttcaatctatcaccagaagggaaagaatgacttagaacagtcagtgtagccatacaagcaacccaagataagactttaactgaatattctctcaagcttccctgaaactgggggaaatgagaattccactggcacttatattctggaagaaagaacacatgtgaagtgaaaactccttcctggccaccacacataaatgggctctggacctgcacacatgggacactgagcaaagatgtcttcacctgcagcttcgcagattattcaggaacatttctcaaaatgccgttaaaacacttgccttgataaaggccaaggacacagcaggtgggtgagaaagaccaggacagcaggtacaggtcaggtgcctggctgccatccgaggaagcatctgctcagacgggagggtgagccagacgcataattacagctcatggaagtacacacacatgcatgcgcgcacgcacacacacagacactccagcaggaaaagagccccgcctacccaggtggtcattccccgcgaggagaagcgggcgatgttgtcctcaaagtcgatgccgcccactccgatgacatccatctggtcagcagggttgttcagagtcctgcatcaggcacaaaagcacaaggggagaggaccattttaaatgaaaggttcaaatgaaggcaaagtctgagtctgcagcagatgctcctgtgacgtgacgtgcggctgtggcagcggcccgcgcaccgccacctctgccagccccgtctcctcacacctgggcaccctctccttctctccttccttcccgccctgtcggcttcccaccctcccgccccaggctcacgtctccctctactgccaggcgtgaaggaacacgccctctgagcttcacaggaccagtcaccggcacagcatcacctatgtacgcgccctcacagcacctcccaactgctgcaagtgcatcctcctgcctccccagcttgagtccagatccagaggaaggaactacagccacagacgtgtccctgccaccgtcagaaacaaagctctcaactggtctcaggcagctgtcccctccctcacagcaaccatgggggccactcatctctcagcaacctgagctcctcaggcagatgacaaggatgtaccagggaagaccgtgcaattctccccagcacctcaagggcactagatctacaaagaaatgacagtgaagccgggggagtcaaggtggaagtctagacgaagctgaacttttggaaaatgtaagaccaccagttatggagctttgtctatttcagctccaccaccagtaaatgaactctggaaccacaactggctccatgtagctgaaatgacatcagcaggattctctgttttaacccaaggagtcgatcctggcactgcctccctagctcacccaccaccaacacactaccagctggttgtacaaaggcaccacagtgacttttcagttggctgacagtgaaagtttacaaatttctgtgacatcagagagcagagattagaacagaaatcactgggagaacttcccactgaagctagtaccaaagactgccaccttcctgccctccctctccctgtcagccccacactttgtgagtgttaaacccttaacatacagaggaaagcatcgacaaagctctgctggcgctgaaaagcgggacgtggagcgtagactcccaggcactatgaagtccaagtgtcaagggggccacaccccagagagctcccggaaggggtacctgcggggacagatcaggcagtgccaggcctacaatacacagcttggcttcttagtgcattatggtcacccgacctgccctacccaatgccagcaataagccacacccactcaggatgggccctggtgagtgggtaccaccctcggcccgcccaccagagggtggactctggatcctgtgaggctccatgggcagacacaagtctgacaccagggccacctcttctgggatccttgctaacacgctgagcacaagtagctctctgattacaggctcccacatgtgactgcccacaggagtacaaggattccagaagagtgaccagcatgtgcagagcagtcaggatggcatgtggaagagctggtatgaatggaaaggcaagccaagggtgtgggggcagtgggggcagcgggggcagtcagcagcaggagcaggtgatggcgaccgaaacatggggtccccagggagacccagagaggagccagacttgggggagatgtgcacaggacagtgagcaatgaggccacagctgtggaactctgcctgggccggaccaggcccctcatccaacttcctaagaaagatgttaccgggacacagccatgcccacttgtctacacacatccataccaccttcacactagcagggtaggtgagcaagtgcaacaaacaccacgtggcccacagagactgtctgctgctttcacagaaagtctgccgactccaggctagaccagagaccctgaaacccaaggagaaactgagatctgagcaggcagtagcaatccaccacagatccctagttaaggaaactgcttgtctgcattttaacaacagaaacactgaaaaaggaagggaaaggagcagccaccactcacagaagctcagtgtccatggcactctcccttggctgcctcaggccatccttcagccaccaccctgaggaaggtctcgcgccctccggagacacatggggtggccaggcctcaggaaagcaaaggtccctcagcctaaggacaggcagacctgcctggctctgtcccacatcccccgcgcagggaagggagggctggggagactgaaggcaggagaaggggctggaaaccgacaataacctggggtactgagctgcagacggccggccttgagcagggacatcagaactgggggaggggtaaatggagaaacattagaaagagaagacaagagcgcctaatgagagactgctaagtaactggtgtctgtcacagcagaacttagttgggaacatgtttacgccactcacactcgtgagtcacaacctggacccccacaaggagagtgggatcaatgacggaactgaggctggaaccatgacctggagcgtcattaatttcatagagttcagcctaatcctccgccctggacagtttcgcacatgctgtcagggctcctgaggcctgctgcatgcagccacacagccaggatgccacgcaagacagcacgcaagctttgcgggccatgagcacatagccgtgccagcggctctcctggaccggggcacgcgggggcaggactgagcgttcggtccttcccctgcatcactgcaaaccccctgccacagcactgaaccgcacccatcccaggaacccatcaaggacgatgacagacgccccatgccaagtgtgtcagcccaaaacattactagagacgctatctacagaataaaactcagagctgtaagcagaaaggaaattcggatctctaacagataccgcctgtgaaccagtgactaacgtcccggatctccagtcactctgaagtgacctgactcaccacacaaccgggcacaaagggacctgtctgtgacactgctctctgccctcccatccgatctgatccttcccgtctgtatccaccatgccagcctacacgctctcctgttaagtttcgctgtatccgcatcttttcctaaaaaggcaggcatctcatctcatctacctcctcaccctgtgccccgcgcacagtgggtctcaataaacactgtggaacccacttatttctagtagatttactctcctgactgcttgcaggagtaaaaagagtagaataaaaatgttaggcctccaaattgctattttcagtaaaggtgaaaaaaaaaattaaacagaaacaagactgtccttgagtcacaaccgctggagtatgtgggtacctgagattcattactaagtcttttttgtatgtattgaaaagttccacaacgcaaagttttagatagatacaaacagctacagaaaaatacagagacagacagacaacagtgtttcagttatttcaaggaaaaagatacctctaaggtcattcctatcagagatacttacccataaagaggtccatcattgccaatagcagaaaccatgatgacattgttagctgttaattcccacacctacaaaattagcaagcatttacttatgaaaggacatcacttttagacaatcaacgtataaatgtccaaaaacaactttcaaaaacagaactaaaacataagagagcccctggaagtgcaacatcgggccaggacagacatggtacgtctggcagccagtgtgtcaagaaaagagactccaggacacaggtccctgtggcagagcagacccgggctttcctgacacacccagaaaagatgggcctcatgctcaggtgagaggcaccaacagggcgccgtgacctgctgcccacaagtctctgcagctcacgccctcagagctctccccacgtgggtgacaaagccaccagcaggctagacgccaagcaaagtggggaggggagagcaggagccgccaccaagccagcatgggcccctgcagagacagggccaaccttgtcgacgaaggggtggtccatgaagtcagggccgccaatgctcaggttcagtacgtcaatcttcttcaggatggcgtagttgaaggcgtccaggaaccaggacgtgtaggagacctggccgtgtgaaaacagtgcttcaggtgttgcagtggaagtctccagataccaggctgccagtggcatgaagcagtcacgtgaacttcagaaagaggtcccaagaaccacaaaggctctgccatgtacactacacccagagcctctgctcctcgggcctggacaccggggagggcagggtcccaggtcctgtcccgctgggtctcacatccagctccttcctgaccttacagcccgcctgcccgcccaggggagaccccaaacttctagtcgtcgctcttgcaggacttgtcctaagacacatctattaagtttttccaaacagtttaacatatttaatattctttattcctaaatagactgaacgtcatttcacagaattatttctctaatagttattatttctctcatagcttcctcacaaaagttaaattccttcatgtaccaccattcaggtgatttataagatacaaaattaaatagagtagaaaataatagactgaaaacaatgacgtaaagtgctggagagaataaagactttcaatccagaatttgatactcagttaaaatagttttttgagaataaagatgaaataaagatattttcagataaactagggctgagagaaatcatagctaacagactacattacaagcaatactaaaggcatctcttcatgctgaaaggaaattatatgatgtagaaacttagatccacaggtaaaaataaagagcactacaaattaaaagcgtgaataaacataaaatgttaaaaaaaaaacagtagaaagagaatatgattcacaattatgctttttaaaggctcttaagacaatacagttacacttgcttgaatatgcaaaagacattctaggaggagcggatataagaacaaaagaaagcatcacatgggggacttggggaagtgaggtaaaaacctgctggatgggagggttgggagaattatccgtgtgccctgcatgtttgtgaattatgtattacctgggcaaaaattagactttaacaataaataactagccaggaccctccctctttccaggaacatttccaaatgcagagcgagggcgcaagcttctaaatcctcatgacccaacatgatgctggatgctgggcacaagcgaccccagtccagcaaagcagcaagagcacaaacgtggattatcctcaagtacacgtatgcccgaggcgtggtggacaggagaaacgggagggcaaggaacgcccctggagcagggcctttggtattctggtgaggctggtgaagggggcggcggaaagagggcaaagccacgtggggtgccaggagatgctcagcaccatggatgtgcattgcctttaaaccagccttctcttttcacattgtaaaaccaattctttaagttttaggggccctcaaaacatacctggttgttggtaaagactctgaaaatatgaagttctgcatcgggagcaaatccctggcactctctcatgctggctatcacacctgccacgaatgtgccatggcccaaccctgctgtccgaaaggaaaaagtcatgaagcatggctgataatgtgggccatcgattcaaacagactccttctccaagtccaagacacagtccccagtgcctctccagggcctccactcagagtctgcacctcaccagccccacctcgggggccaacagcttctgctccccccgaacagcaaggattcctcccaccaggcaacccctctcctcagtcacctcccaacctcctctgagatacttagaaaagcttctgccaaaggcacaaagcaacctgagtttgtctgaataactgtcgtatacagactatttaataatttacacaggaaaatcccctcagctgataaaagagagtatgggagcgaccagaaatgcccctcaggcccccggccacccaccgtcgtccagcgttcgctcattggtccagttggttctctccttcacgtttttgaagtgggggtgcttctcacttagcccagtgtcaaacacggcaacccttacattagtgccttattccaagaagagagcagaatcgtgttcagaaaaaccactgttctggattttcgtgtataaaatacattccctgttgggacccacacagaacaccaagggacccagaggcaaagcctgcccacagagtgcacacagtagggagatgcctggggcctggctgagccaaggccagcgagagggacagctgaggatggccgacaccagatgctaagtaagacccgcggacacacaggaagtccctctggccatccctcaaccgtcacccacacccgggcgtgaaaccacctcccccaaatcctccgctgatgatggactgtcctcttcaggccattttctccaggctccattccccttagaggggctttggggatagtgcagagcacaaggccctcactcataggagcggggggtggctcctcctcttgacaaggactcagtgctgttcactcatgacaacaactctgcagacacgagctttcacccacatgcagggaaaaccacacttaaaggaaaaccactatactacacactttcctgtaataacaagtctatttcagatactggacaaaagctaagtgcaccaatgagaaatatgattgatactgtcagatcaagaaattctagaaaatacgtaggaaaaaaaaatacagtatactcatattatttaaaagctaacaggaataagccttgatacgtaaatgtttttccagtaagagaattgtgtttatgtatcaatactaaatattaaataatcaatttacaatgaaataaccatcaaagtatattgtttcctttttttaaatgcacacacaatactagaaaatagctagtggggggggataaaaaatgcttttctgatgattagagaatttctgtttttgaagcttttgccttaaaaagataaaccaagaggaaatcataatttaataaaatgtcagtctcccgagtgttaagtctgagcaggggtaaggtctctgggtctaagccaaggagaaatggaaagacaccaagacaaactgtgacgtatcaggggccagagacatgagttgatgtttaggacgcaaacttccacatcagttaaaacaggaattttctgccatgattaatcagtaagaaaaaacatttgattggctgtgagttctattttctaagaaacagtctttaatattgtttcctgttctgaaacaaaagatcacaatctcaacaatcacttagccctgctgcacacaggccactgcacggaaggatgagctcaaatcaaggtgacatctctggatctgacttccttccctgggaaatgacagaactccactggactgccagtccagccctggcgtgggcagtaagtactgtgtctgctcacgtgccaacaacaggaaagaacatgccctgaccaccccagaaacataagacacacaaagtcaacaggactagacaaagacaggagctgccacggacacgcaggacaaagggacagctgagtgcgtccagctcaacctgcagaagcagatgcatgaggtggcacaccctcagctacgggtgctggagagggaggaggcctgccaggccccccacacccacctgtgtagcccatctgccacagcacgtcggcctgcagcgtctgggcgacctggcgcgggatggccctgagcagccgccgactcgagtgtctcccagtggcgtgccagaagccggagcccagggagaggctggccctgcgcaggggccgtgacgactgccacttctggctccagcgggtctcgttacagggcgagccaggctcagctgcaggcaaggaaagagagcagaaactcaggatgcatacctgtcaggggaaactccttccaccagtgcagtgaccccctcctgagacccccgtgcgggagagtggcactctctcccctctgctaaaaggaacttctcaacacagttacattcacaggacgttatttagccaccacattcttcccaaacagttctttacctggaatcttctaatcaataagagggagggaacaactgataaaatgattactgctaaagaaataaagtcagttttgatactgaaattgaagaaatgcttgctatttcaccaaccacttattctccatgaaccaacagggggcaggggagggggcagagtgcaagaaaacgtgcaccaaggaacggtgcagtttctccgtttactgcgtgatctcagacaggaagaagccctgtgaccgcaggacacctcgctccaaccttgtcctactgtgacctgttcaaggtcctcagcacgagtatttactagaacatcgcccttcaaaaaccaaaacacctacacaggactcggggagaactgctgggggcaacattttacatcttgattttgttggcgggtacccaactgcacttttatcaagacctgccaaaccgtgcattaaaaagcatgaatttaccatctgtaagcatgttttttaatggaagaaaaaagtagaaatatcacaagggtgtccctttacctttcaaaaaccatgctataaagaagaaaaaaacatatttcaaacccttctctagaggaccaccctgtaatactactgaggttcagtttctaaaggaagttattaccgctctccttccggtctcaccaggctatacccatgaaaatacaaggacctggagaaatacacagttgtgtcaattccattaagtgactatttgcacactgcaactgaaacgattctgcactgaccctcccatattgactctgtgccttcagtcaacagccagggcactgactgaaggacaatattcagaccaaggagggtctgtcatgctctccctccagcagaccatactacacccagaggactgaactcagttctggctttactcgttaggagcaatttagagaaaacgggacatatttgcaagcaacccattaaaatggtaaggccaggtcctatgagtagcccctgaaggaactggtatctattatcccagagacaagtaacagataggggacatcaagctgtcctccaaatgcctcgcagtgctgtctcgtggaaatcaggtcagctctgtcttacagcccactgagaccaggggtgggatccagagtgtgacaggttcccaccctaaataaagcaaagcattctaatgatagagccacagaaaaatgagttgggtttttttggctgcaccatgcagcatacaggatcttagttccctgaccagggattgaacccagggccctgcactgaaagctcagagtcctgaccactggaccgccagggaattcccaaaaatgaacatttaacatctgcttataacagcccaagaactctgctaagctctcttcacatgcactatttcctttcaccttcagaagaactcaggtgggtagcatcatctccatttcctggatgagcagaagcttaaagaaaagatgctcaccacaggtacccacagctcatgaccagaggaagaggtacactacttcctttcagggcagcccagcagctgaccaccatgctggagagggcacagaaggggaccccgaaccatgaagctccatatactccccatgcttccacatttcctaaaatattctgcagctctttaaagaataaaaagacacaaggcatacatttttgcacaggtctgatttgtttttatcttcatggattgctttgaggtgactgcttttcaaagagaacagcacgaaacatggactaatggaaagagctctgcaaggtcagacacccctgaactccgcagctggcacgtgaactggcttgtccccgggtgtgtttttaaacctgaggctctcaggcctcttatttcatttcccttctaatgaaagaaacgacaataagcagtaacagctattatctatttgctaccccagtttctgatgaacagggaaaaaccctttcccctgcaagtagtacacctgctttggaaactagcatattctaatcctcacttggttatctgagaaggaacttctctccacaggcccgtcgtaaggactcggggagtgagccctggagctgaaaggcactcagcaaggtccttccatccccgcacgtgcccggcttccagcttcaacaagcccggccgaggcacaatggtgcacggtcaggagggtctgagaaaagcaaaatgaaacccaaagaaaaggcattttgtcagatgcatccaaaataaaaatttgcactgaaagacacaaaatgcaagcaaggggactcaaagacaccatcttagtttccaagcgtgaaggggcgtcagggcctcacggcctgaaggctctgagagaaacctggtgaaaacctcttcccacacaacagagatcattcttactgcaaactttcaatcagaagcacaaagtctcttttctggtttttttattcctgctggaaagtgttcacagctgatgaaagacggggtgttcactgtactatttctcagatactgccctgtgtcaacacacacacccccctctgcttccagcacagcagaaatgcacacagaccagccctcgggagcagtactcaccctccgtgtacttgagggaacgaaagaccttccgctggggtgttacccgcttgatgtttggatggtcttcaagagtcagcagccccgccttctgtttctcttttatctgaatcacctcaaaatcactagggtagtcactggatggattgtttcgaggtataattctccagttgtcaattgcactgctcttcagggcgcttgaaataaatgaatttctagctttggccgtaaagtatccattgaaagccacaatgtactctgaaatcaatgaccacaaaataaaaataagaacttacaagcctatattatgacggtatacaagagtatatctaatataacgttttcctggtaaaaaacctatatatcataaaacctacaggaaaaagagcagtaaacagactaaacatcctggatggcagtttccagagttctgagctacaacgatctggatgaaccccactaatcacaggacacatcactcacaaccagacacctgagctatttttcaaacaccgaatgttaagagaagtttgagcatatgacagagaaatgcacataaggtttcaaggaggaaggaggaatttagagaagtgaaggctctcttcttcctgagaagttaacgaaacttagagcagatcttataagactcattgcttagttattcacaactggtcacataaactttcagcccctccaaagtccctcaccagctaccataacatctgtcccatggaatccaagtttagggaaataattcagaatgtcaatttctttgctttatataaaataattaaactgaaaaaccaaaccagcagaattaatatacaaacactacgcactcagcccatttggcattcattgcagaagagagagaaatgtttttggcaaaagctgatgtttataataaatttgaaaaaagaaaacaaaaaaacccaacacactgaggggaaagtccctaacattttaaataatatcattaccatattccacaaccgttgaggagaactccaccttcaaagccaggtgggaacagccggggcatggggccttttcaaaaggtttcttttccagtctgtcgcccagatgcttcttcccgcagagcaaaaccaccagcagaagcagccagatgttgacaagcttcatggtcgtagtgagtacggtcataaaatcgcataaactcaaatcgcacttttttctttcttgattataagttaatttttgtttcagctaaaagctgaaacattactgatccgccattttacagtcttgtccaacgtaaataaaagttaaatttcatggccccttgtggcttggcctgaaacaaggctttcatttctttcttcgtttcttctccatcttgggcctcaggcttcgctcactctggcccagacctctgagtcctacactccatgtgcaccaaggaaccaaaggccagcagggatgagtgatcactctgtgagccagtctacaaaacaaagcaagcacacagggacatgagcagcacaccgacagagccacggaggtttcgcggtctctgaaatctggataagagggtctaaaagcgtcactagctataagacaaaacaaatgcctgatgaaaccaagaaacatctatgggctcattttaatttagttactcttcacccctttcagggggaaaagaa

SEQ ID NO: 176 - DNA, 35097 bp, Hippotragus leucophaeus
  source 1..35097: mol_type = genomic DNA
gagcaacccgagaaacccaaggagggcggagaggatcgtttacgcaggctgggaggggcgcgaagggagtgaggcgcccagagatggcccagagatggccccgggctagttcagaggcctcctgcgccccaggtccagaaagactgctgcagaaaggggcgtggaagggagcagagctgcggaggcgggtcacgggttcacccggccagcggagggaggatgccaccgctgctgggctcacgtcgaaccccggctgagctgggctttagaggcttctagagcgggctgacctgccgcggccccggccgcggagaagtaggcccccaccggccctttctggcgccccgcttcccgcgccgcggccgcaggtgagccgagcccagccgcaccccgaggcatcaggtgtcgtgggaacggcgcccgcggcgcgaagggagagcccgccgcctctccagccatccgtgatatactgcgggagggtcgggtccgacggcggcgctatgaaggggacacaggagggagcggggtgcgagctgcagcggttcggccccccggctgctctgcagcccgcacaaggtcagtggcgcccctgcagttgcggggactcgggatgtggcgcgccgccaccgggaggccgggccgcacccgcgaggcctgggtagggggcggccttccgcgtggggctcggggctcggtggcggtctgctggcggcacagccgacctctccggactcggagtgctgttttattagaaggaagagggaggatgtacttgggaccaaagcccgggtgggtgtgcagggtttggggcggcgaggggttcggacagtctccgttttgaaagtgcgccttcagaggggcgctttctgtgacagtaaagcgaaggtttgcagcgagtttagcggtcagtcctcgtgaatggaacatcttttccgtaagcttggtgcgcgatgtgctaagttaattgtggttggcttctttttcactttgttcctatgggttactgttacacggcgtgcggctagtttgtttatagtttaattttaccagtatcagaaatagaaagggctgaaggtgagctcaaatctgtcattcgctaacagaggctgtattactaacagttcccttattttgttactgttcatctgtgagtttccatgaactggcatgaatcaggttctttataaatcccatagatacagtgtctttaaatgctgatgaaaatattaatatacccttttgaagaaggaaataaaatgttcttgagtgaaaatcctaagggattatcttttttctctccctatgtctttatctaggagttactgtactcagactttgacaggcatttaaacacccacagcagccatactttaatgagttctttcataattagttcactttgaaagcactgcatatgctattgtaaatatatgtatgctctattgcctcagcagtatctttattaatctttttattcatcaaaaacttaaaaaccttcctcatggatagtttttacagtcagtatctactgtttggagatggtgagttgcgaacaatgtttgactcagaaccaagcgttggattctagacttagaaaacccttaaacagtgacttgttagatattgtattagtacactttgacttagaatttttggtaaaaatatcacacagaatcagcctttctattctgtaaaaaagaacaatactgtccatagtggtttgtggtattttatttttaagaagtttccatgatatcgagattagtctgagggaccatccaggataggttccagtttacaaagtgacttctttatcactttggataagccgactatgaagacagtaaaaccagccctatccgtttcaaagggacaaaaaaagtatgaagcgctttgaaaagtaaagtgtgctatataaatataaaggccctccataaaaaacttcatgcaagtgatgttgccgattggggtttgaacttaaattgagattctgagttctttgcagacctcctttgtaagtcccctgaagctcacactgcctcttaggaactttgttggctgtttaggaagctgctatgtctgctggagctgtagggaaagtaaggctgatggtttagtgttagaccctatgcaagggctttattttcgttttctcacgagaaacacatgaagatgtagatattcttattcccattttgcagaagagaaaactgagacgcagacaggctgaatgacttgcataaggtcacagaagtgtctcaatgtagaaccaggattagaaacaaaacaggatctttgttctctacatcacattttttacctttaactcaattgttaaaaaatttttttaatataatctgataaaactgtatctctccaggaaaattgcccatattcatatatatacaaaatttagcacataatttcagagtccagcctgctttctgaaaccttttcggtgctttcaggacaccctactctaactatgtctgttactgaatgaggcaaaaagcatatatatataatatatattggtaccgtaatcttctattaacagcagccctttgaacttggtagttttcaactgggtaaaaattcattcagtgactgaaatgaaaagaaaaatgacttgctatgttctaaatgattctgtaaacaccaaaatgcagtttattttttaataattgtaatcacattctttttattttttaaattttaaaaaaattttgttttatattatagttgacttaaaatgttgtgttagtttccggtgcacagcaaattgattgtcgtccatatgcatatatctattgttttttcaggttcttttctcatatacattattacagaatagtgagtgaagttccctgtgctgtacagtaggttcttgttgattattttatatatagcagtgtatatatgttggggcttccctggtagctcactggtaaaagaatctgcctgcaatgcaggagagttcggtttgatttctgagttggggagatcacctggaggaggaaatggcaacctactccagcactcttgcctggagaattccatggaaagaggagcctggtgggctacaggccgtagcgtcacacggagtagaacaaagtgactaagcggcagcacagtagcagtatgtgtatgttaatcccaacctcctaatttaactctcacctttcccctttggtaaccttataagtttgttttctgtgactggaagtctgtttctgctttgtaaataaattcattgtatgacttttttttttttttttagattccacatataaacgatatcacatgatacttgtctttctccgatgtcatttagcatgatcatctgtgggtccatccatgttgctgcaaatggaataatttcttttttatgactgagtaatattccataaaactaagaatcatggcatctggttccatcacttcgtgggaaatagatggggaaacagtgtcagactttattttggggggctccaaaatcactgcagatggtgactgcagccatgaaattcaaagacgcttactccttggaagaaaagttatgaccaaccagatagcatattaaaaagcagagacagtactttgccaactaaggtccgtctagtcaaggccatggtttttccagtggtcatgtatggatgtgagagttggactgtgaagaaagctgagcgccgaagaattgatgcttttgaactgtggtgttggagaagactcttgagagtcccttggactgcaaggagatccaaccagtccatcctaaaggagatcagtcctgggtgttctttggaaggactgatgctaaagctgaaactccagtactttggccacctcctgggaagagttgactcattggaaaagactctgatgctgggagggattgggggcaggaggagaaggggatgacagtggatgagatggctgggtggcatcactgactcgatggacatgagtttgggtggactctgggagttggtgatggacagggaggcctggcgtgttgcaattcatagggtcacaaagagtcgaacacaactgagcaactgacctgaactgaatattccatatatatattcataccgcatcttctttgcctgttcatatgttgaaggacatttaggttgcttctatgccttggctattgtaaacagcactgccgtgaacattggtgtgcatgtatccattctaaccatgtttttctccagatatatgcccagtacttggattactggatcatatggtagctctgtttttagtttcttaaggtacctccatactgttctccatagtgactgtgccaaattatattcccttcagtagtgtaggagggttctttctcttcacacccagcatttatgtttgtagattttttgataatggccattctgactggtgtgaggttaatatcttccttgtagtttttttttaattggaagataattgctttacaatgttttgttggtttctgctgtacaacagcatgaatcagtcataaatgtacatagatcccctccctcttgagccgccctcccacccaccccccaatcccacccctctcgattgtcacatggcactgggctgagctccttgtgttatacagcagcttcccaccagctatgcattttgcacatgataatgtatatatttcaatgctactttctcagttcatcccaccctctctttaccccactctatccacaagtctgttctgtatgtctgcatctttctgccctgcaaataggttcatcggtaccatttttctggattccatatatatgcattaatatgtaatatttgttttctctttctgacttatttcactctgtataacaggctctaggtttcgtctgtcctcagttcagctgactcaaatccgttcctttttatggctgagtaatattccattgtatatatgtaccacttctttatccttcatctgtcagtggacatctagattgcttccatgtcttggctgttataaatgcagtgaacactggggtacatgtgttttttgaattgcagtttttttaagggtatatgcccattagtgggcttccctgatgactcaatggtaaagaactctccctccagtgcaggagatgcaggttctatccctaagttgggaacatcccttggagaaggaaatggcaacccactccaatatctttgtctggaaaatcccacggacagaggagcctggtgggctgcagtcctcggggttgcaaaagagtcggacacaacttaatgactaaaaaacgtgttggggttgctgggtaatatggtagttttattcctagtttttttaaggtagttttttaaggcacctctgtactgttctccttagtggctgtatcagtttacattcccatcaacagcataggagggttcacttttctccacacccaacatttattgtttgtagattttttgatgatgggcattctgactgatgtgaggtgattcttcactgtagttttgctttgcatttctctaataattagtgatgttgagcttcttttcacatgcctcttgatcatctgcaagtctttggagaaatgtctattgcctgttttgggtcttttgcccatttttgattggggttgttgttgtttttttttatattgagccacatgagctgcttgtaaattttggagactaatcccttgtcagtcacatcgtttgcaaatagtttcccctatatatttttaatatttgtccgtgggttgtcttttcattttgtttgtggtttactttgctgtgcaaaagcttttcagtttaattaggtctcatatgtttatattttcatttttatttcccttactctcagagacaaatcaagaaagatactgcggtgatttatgtgaaagagtattctgcctgtgttttcttctaagagtttaatagtatccagtcttacttttcggagaaggcaatggcaacccactccagtactcttgcctggagaatcccagggacggggagcctggtgggctgccgtctatggggttgtgctgagtcggacacaactgaaggacttagcagcagcagcggtcttatctttaggtcttcagtccatttagagttaattattgtatatcgtgttagagaatgttctaatttcattcttttataggtagctatccagttaccccagcactgcttattaaagagactgtcttttctccattctatattcttggctcctttgtggtggattaattgaccatagggtttacttcttgactttctgtcctgttccttgatcttcggaggtgcagtttagaacaatggcgcttatttgaaagcagatcttttctttggactccatcaaccatccttcaaaaacaaagaacatagatgttgcctttacttacagttttgttttttgtttttcctcctagagatggcaaatcctgaggctgctataagtagctgcagctctcatgaagaggaaaatcgctgcacctttaaccagcatacatctccctctgaggaacttctattagaagaccagatgagacgaaaactcaaattttttttcatgaatccttgtgagaagttctgggctcgaggtagaaaaccctggaaacttgccatacaaattctaaaaattgcaatggtgactatacaggtaggcacctcacatcatgagcttagtgaagtcttcttttactaacaaagatgactatgtgttttgttttgtttttaaataacttttaaactatatgcctcataacaataaattaggagatatacaatcttaaatcctttctcttccatatttgtgaaagaagactttttttcccttgtttcttttcatctttcattaaattgtaattttactcacatagtgtaactagatttcaggaaaagaaaattttaatattttgcttccagtcaagtttagctgaaggtttcgaaatcaactttggaagctagctgttgcccaagtagagaattcttttttttcctagttagttgcctgaaaatttcttcataattttttggattctcacgtccctgtgatcgtgggagccctgaagtagaagagtgtggagctgattaaaaggagtaacataggtagtgaaatatgagacttcattttaggagatgttgaatctcatttccttggcttctcttaacattttagggagaaattatgttttgtgattctttatatatatttatgatttactcttgtgaaggtatgttcctgctagtgagagtaattatctcttgtttaaagcaaaagagcaaaaataaaagcatatttcaataggaaaaataggtgataggtttattttttcttaatttggtgaaaaatgcatatgtaaataaatgactggattaaggagaatttttttaactctgaaagcacaccttttagctgattattgagcacaaattcttctcgattgttagaagctggcaatcatatgaagttggtgaaattcttttatttatttattttttaattggaggataattcctttacaattttgtggtggtttctgccatacagcaatgcagatgaactgtaattatatactctccctcttaaacctccctcccctctccctacccctctaggtcatcagagcacgagactgaactccctgtgttgtatacttctcaccagctatctgttttacacatgatagtgtatatatgttgatgttactttctccattcattgaagttgatgagattcttttttttttttaattttatttttactttattttactttacaattctgtattggttttgccatacattgacatgaatccaccacgggtgtatacgagctcccaatcctgaatccccctcccacctcccaccccatatcatctctctggatcatccccatgcaccagccccaggcatcctgtatcctgtatcgaacatagactggcacttcgtttcttacatgttagtatacatgtttcaatgccattctcccaaatcatcccaccctctccctctccctcagagtccaaaagtccgttctatacatctgtgtctcttttgctgtctcacatacagggtcatcattaccatctttctaaattccatatatatgtgtcagtatactgtattggtgtttttctttctggcttacttcaatctgtataatcagctcgagtttcatccatctcattagaactgattcaaatgtattctttttaatggctgagtaatactccattgtgtatatgtaccacagctttcttatccattcatctgctgatggacatctaggttgtttccatgtcctggctattataaacagcctaagtttctgatgctagatgttgtgtaaaggaaactgacatttgagtgattatcttgttccaagacattattttgtttaatttcagcaatacttctattgggtacatactggactcctttggtttagagaataatgagctgatatttataaagtttttgaatgccacatgacgagtactgactagtacggccagtggcagaattaatactttaaagacacgtgctctttctgattatcaacataaaaatggttgtttgattcccaatatatttggcaagttggaattgaaattcttaatttccaagtgataatgtatgtcacaatagtgaaagtatttctctatgttgtttctgataagtcggaggggaagcctgtatcagttcagttcagtcgctcagtcgtgtccgactctttccgaacccatgtaccacagcacgccaggcctccctgtccatcaccatctcccggagttcactcaaactcacgtccatcgagtccatgataccatccagccatctcatcctctgtcgtccccttctcctcctgcccccagtccctcccagcatcagagtcttttccaatgagtcaactcttcgcatgaggtggccaaagaactgcagtttcagctttagtgtcattccttccaaagaaatcccagggctgatctccttcagaatggactggttggatctccttgcagtccaagggactctccagagtcttctccaacaccacagttcaaaagcatcaattctttggctctcagccttcttcacagtccaactctcacatccatacatgaccacaggaaaaaccacagccttgactagatggaccttagttggcaaagtaatgtctctgcttttcactatgctatctaggttggtcataacttttcttcccaggagtaagcttcttttaatttcatggctgcagtcaccatctgcagtgattttggagccccccaaaataaagtctgacactgtttccactgtttccccatctatttcccatgaagtgatgggaccagatgccatgatcttcgttttctgaatgttgagctttaagccaactttttcactcttctctttcactttcatcaagaggctttttagttcctcttcactttctgccataagggtgatgtcatctgcatatctgaggttattgatatttctcccagcaatcttgattccagcctgtgcttcctccagcccagtgtttctcatgatgtactctgaatataagttaaataaacagggtgacaatatacagccttgacgtaatccttttcctatttggaaccagtctgttgttccacgtccagttctaactgttgcttcctgacctgcatacaggtttctcaagaggcaggtcaggtggtctggtattcccatctctttcagaatttcccacagtttactgtgatccacacagtcaaaggcattggaatatatgttaatatactttaatttagagatgagttgaaagaatatttttatttttggtcttattgtcacagttttggtaattagtcctagaaatatagtttgattataacacttaaacttagatatttcttaggttttattgtacacctgcttcaagccttcttgatgtcctgaagaattcattttgaaagcttctacttgcccttcaagctcctgcaccatctgacttaagtgtttctgctcacatttttccccactgtttctctaattgaattatgctggtgtcctcagtgtccccctcaaagtgctaagttcaactcgaccttctttgctttctccacacgctcctcaaatgtcccctgccccaagttatgcatatactacgagggtttctgttattcttttttcccttaggaaaccttccaacttccttagtcaaagttatcttgcttctctgagctgaactcctaaaggacttctcagagctcctaaagtttttattggtgggacaatgtcataagtgagatcatacatgaaaataaatgttgaaagtatgcaaaggcagtttcttttagttaaaaactagaaacccaccttatctttaaggacaaattagttcccaactgccaaatgtttaatttctataggatatattaggaattaattaggtattgaatcttaaatagatgaattaatcatttagtggagacctttatttcattgctgtttcaccctctttttctttcttttaagctgatcttttttggcttgagtaaccagatggtggtaactttcaaggaagagaacactatagcattcaagcacctcttcctaaaaggatatatagacagaatggatgacacatatgcagtgtatacacaaagagatgtatatgatcagatcatctttgcagtgaaccaggtgagtcagacacgtgcattctttactttggagaaagattagactggagaattgttagcaatgtgcaaaatagaagctgacattcaggtgtacaagggtgagcattttttaatgaaattataaatgtcatgtatgaaaccattaatttttttaactttgccaacaaacttttacaaaactataagttgagaagagcttttgtttagtaacagagagacagaaactttaaagacttaattaaaagagtcagatctagggcttgacataagaacttcaaagatttaaaattattaaccatgaccttggttgtaagtagtcattaagttttcagagtttatatgttcagggaccctttagaaataatgagattattaaccttgcagaatgtgtagagtaaccaagacctgaaattcatttaaaaaataagaaaggcctttatgtcacataaggcaatggttttattgtaacattgattaactgcttcaaaaaggaagcttgtttttcatacatgtaggtcaaatttctactctgagtttctaataaattcatttttgctacaagcaaacagtactttcttaagtctgaaaatctcctgttttgtaggaatctttggcagctttcttgaagtcagcatttccaacctgagttagtactgcagacaatatttctgcagtactaactgcagtatatataaaaattataactcttcttcaaaaattgttatagtgtaattagggattttcattttcccagagacaaactatgggataatatacatatttgtgacactaaggctttctgatagcattcagattacaaaaattgtccagaaatctataataatagaagtaagctacatgcgttgttaaatagaattatgtcctacagtttgtcctacccttgcttccctgatggctcagaggttaaagcatctgcctccaatgcgggagacctgggttcaatccctgggtcaggaagatcccctggagaagggaatggcaccccactccagtattcttgcctggagaatcctatggacggaggaacctggtgggctacagtccacggggtcgcaaagagtcggacacgactgagcaacttcaccaccaccacctacagtttgtaaggtcaaatagtagcaaaattctggagatattaagttttgagatccttgttttaagattactaagtttatgtaaattggatcttccctgctggctcagacggtaaagcatctgcctacaatgcgggagacctgggttcaatccctgggttgggaagatctcctggaggaggaaatggcaacccactccagtattcttacctggaaaatcccatggatggaggaagctggttcctaaattatctaaattactctgaagcaaattagtaatttctttttgacaggaggggtgggtagaggcaagagataaacagttcaataaattcttcctaaaacatttgacctttattattaaggttaaaagcagttttaaatatatagtatttggcattcaggcagttctgtttatcagatttcttttttctttatagaattgcatgcaggtagattccctgtgctagtaaataggcagatactatttggggtggagtttaccccttttggggcaagtgactccctaccatcttctaagcactatcatgcattttaaactgaaggtaaaaaagtatcttatcacaatattagtgaataaactttgtgtggttaataaggtcagttattctacatgattccagagaagtgaatagggaaaacatggcctgatatgaaacatctttgtctgctgtaaggaaataccttgatagttgaggtgatagtcaccaagaactgacaggtaagacagcagcttctcagcccttagagttatttccatgactagctttcctgaagagtggagccctaaaatgtcatctaactgaataatctctagggcttatcctgatttaacactggttgtaacagcatcactcttgtttagtatgtctatttatgtattggaatgtcaaagacctagttattttaatactatatcctggctttcatcaatcatgtttgggtcatctttactgggttccttctttcagctgcctcttaacttagggcagtcctcaaaggtctgtccttttcctgcagaatttcccccactgtcacccatcaccaagacagatgtttccaaaacagttgttcacactgttgtgtgaagagagctcacaagcacctcagaatcactctgttcaaagcagatgtatattctcttcccacctacttctcagagttgcttctctttctgatcagttgcttagatttaaaggtctcaggatcttgggaccacttactttttcgcagctcaaacaccgtctataaatccctacttctagttggttatcctctttcccctcccacctgtcctaccacttcttggcagtttattctaaatgattcacctgaagtcacagatttgactgcatggtactgctcattttataatagtgttcagtgctacatattaatatatttattccatgaagatggaggtacataccaggcactcaaatgtttgtgaatgaatgaatgagctcaaaagattcatgtgttcagatcaagtaataacagggagaccacaaaaaaaatgcatctgcaatcaaagaacaagctgtttaatctgctttgctttgggtgccacatttctcaggtaaggatttttatgtatttttatgtagtctctcaaaggatgccctaggacccatgaatccatgtgaaaaactagttctttcaaggtggagctgcagaggcaagtggggacagataccagcctcattagggcccgacagaagtcatagccacttaggtgccccgtgagtcagtcctaccggttgcctgcctttcagtgatagccctgtactaccttcggctcccagaatcttctgactcaggctccagattggccctttagctggccacagttctgctacttgcccctgaccattgttgactgggaaaaaaaaagcataacctaaaagttgagaataatgttttattcaaggacatcaccgaggactgtagcccaggaaggcagcctctcagatagctctgagagactattccaaagagggtttttgcagaaaacaaaataaaaaccatgtaatgaacatcaaaagatttactgctaatcacaaaaaacagatatctcaagctaatgattttctgggaagatgaatctggcctaatggcagttatttctttgatatacatcttagccatccagggcaagtatcctgttttcctccatcctgaattcccctcagggcataccctcagtgccactatagtggctgaaggcttgatgactggcaacacttggtgtttatgggaatggcagcaacactctttgtccataccatccagctctgtaggtgctcagacctcacgtgctaagtcacttcagtcatatccaactctttgtgaccctatggacagtagcccaccaggctcctctgtccatgggattctccaggcaggaatcctggagtgggttttcatttcctcctccaggggatcttcccaacctaggtattgaacctgagtctcttacattgggaggcaggttctttactgatagcacctgggaagcccccagactccacaaggagccttattaagatagcaaggaagtctggctgaaaaatcacttataaaaatagcatgtacctgaaggcctacaacttggatcttttgtgtttcaagatcttataaggtttaagacacaagtttctatgataggaggttcagatctttaagtaattcctatctggactgcttcacagggagtgggcactcagaagggctacaggggcccatacaggtgtaacccctacctgcctttctggcttttcctcctgtcacaggcaggaggtatctcacatttcaggcatattggtctccgtgataccttaccacattcagtatcttttacttctttttccatttaatatattgtattcctcttactcccccatgccccaatataaaactaccaattggactctgagtagctttagaagacttaaggcacttatttccttgtatgggaaacatctcaaaactaaatatgtctagcattgtactatttcctctagatgcaggacataatactattgaatgatttatacagcttatttatattactgtagatttctagcccattttcccagtcccagtgctagcagaaatgttggtgctataacaaatcctatcctaggagtttatcatcttactgtatgtagatgagctctagtggatgaaggtcctctatcatattataatagttttcacctcaccattaacttgacaaatatttgagcatgtactctgtgtactcttacctgaaagctgggtttgcctcttggtggacgtcaagccaaatgaaccaaccaagccaaaaatcagaaggaaggatttattatttgcagcaaataaggagaacaccagggatctttctcaaagtagtgtctcctgggacagtaaaattgggaaacttttaaattaagggcacctgcatatttatgaaggggcttgggcagtcgacaagagtccaagttttagttgattgaagtcatgagggtcagaaaaggttaagtgttacgggctaatctttaccactgaaacagaactgggaatctttacaatggatgtgttatctatgctgtggttacttttcttatctgataatagtcatttgttgtacattcgtttgttcccttaatattattagttactgagacctgtttaaggaccagcattgattcaaaaaggctgaggccaaaaatggcttctcttatgccaaagtcacacgtattctctttctccagggacccaccccctgcccagcctatctgctcacactatggttctaagtgctgaggttagtgcagtgggcttgataaattctttgctcggtggaacttagattctaatggaagaaatggattttaaacaaatttagcaaaataatttgatttccaacagtgatgactgctatgaaaaaaaaaattaggtggcataaaacatgaacagtggtctcaagatggtcagaaaaggcctctctggggacttgaagtctgaggaagaatatttcaggctgaaggagtggcaacagcaaaggccctggaggctggaaaacatttagtatgtttaaggcaagtgtgcaaaggagtgagggaagagccagaggtagggctttccaggccctggaaaagagcttttaagtttatcctgagacacaggaaatcatgggaggactttcagtaggggaatattgcttaaaagtgactaagctatattcttgcaaagataaagattacaaaaaaatcatctttagacaaagttttgctggttagtctggaacagttttatcccacttcctatattatagcaaagcagaactcttgactatagaaaatagttcaaagataaataaagtttgtactcacattaaatgtaaaagtcacttcctaaagatagttctttaaaggaggaaagaacttgaaatgttgtctaaggttaaagtcagcctttaattttgcaggtaagaaagcagaggctgataaagtttgtgacttgctcacaatcacagaaatgagacttgaacccaaaactctaattcacaagtgctctttgccctctgccatcccagtgcacagtagcatgccaattactttccagtctccacctggacaggaggtgggaagccagcgtttcaaaggcagggagggaggggaatcatggcttcacttctgcctggctgggtgctctcatcttctgtttctctttttggttgaagtatttgcagctatgcaacgtctcagttgggaatcatgcatttgaggacaagggcacggagcagtcggccatggcagtctgttggcacttctacaagcaaggaaacatctatcctggaaatgatacctttgacattgacccagaaattgaaactggtgatattcttctataagctagaacttccatttttaactccttgatttaaagtcagtaatttcatctctggaaatattgatttggcctatgctagtaggtcatagtaagaactgaatcagttatgccaggtactccactatgcctcatgattcttaaacaaaccaacaaacaaaaaatcagcaagacaagtttattattatcctcactttacagaagactaaagtgtggctcagaaggtttagtaatctgctcaaggtggacctagtaagagacagtgctgaaatttgacccaggctgtgctcttagccattttattccacaacctctcttctggataagccagtttaatagatagatattgcccctataaaacaaatgtttgaaaattcttaaatatatgatatataaaactatctcccctcaataatacttcactattcagtatctttgggggtaagttgaggagtaatgatattccctcgtagctcagtcagttagagatatgcctgcagttcaggagacctgggttcaattcctcggtcaggaagatcccctggagaaggaaatgacaacccactccagtattcttgcctgggaaatcccatgaacagaggagcctggtgggctacagtccatggagtcaaaaagagtcagacacaacttagcagctaaaccaccaccagtgagaaccagaatttagaaaagcatagcttattcctgttagcaaagttctatttacaatttgtacctaaaacattagcttaggtcattgagttaaaaagtaagtacttttagcagtagccactgggactttttctttgagaagaataataaaggattatagtactgactagtaaaaaccttctaagatgctgtcttcctttttttaaaaagtatttattgagggaaaattgtcaacacataatattttttaaaaatagatactttaaacataaaaaattttatcttagacactctaggtgcttcaaatgtatgcataggatacgaaaagggagaggggcctcaaaatttaggctgaaaaagacaggaaggaagatggccttttatacacagtgaaatagagttcagatctttctctacctccatctactcaagaaatgttatagtcacatcttacaaacaaataaaagtcattgtaaccatgtggtatggatgtttagattttaaaatcttaattcacaaaaataccagaatctgaatatccagttttcatgatatgatcccttcaggatgcagttttctatgtttatttcaggtgctattttatgtttcgttcctttctatggcagaatgtttctttgtggaaccaaatgaaccttttcacattggaacaccagaagaaaataaactcaacttaacactggactttcacaggtgagggaagcaggtgggagggtaactcctgtttgtgtgtacatgttttcagtgcactaaagtctcctgttttccagactcataacagtggagctgcagtttaaactgaaggccattaacctgcagactattcgtcatcatgagctcccggactgttacgactttactctgactgtgagtgtgggctgggctaatttgattcctgtctggagaaaaatggttttatctagttatgtgttccatctacttctgttgagggttgatcaaatgtatagggtgttcttgtcctaattggatatgcacagaggagacattggttcagctagctctgtagtcctttcttaactgcattttcactttccaaggttttagttatcatggtcaacctctgtctgaaaatattaagtggaaaattccagagataaaccattcatgtattttaaactgcatgtcattctgagtagcagagtgaaaactttctgaccctcctcagtatgaatcatcctttggtccagtgtataccatccattagtcactcagtaaccctttcagttatctacatatcacagtacttgtgttcaaataatctttattttacttaagaatggccctaaagctggtgattccaatatgccaaagtatttctttaggtgaaaaactgaacgctcttaacttaatgaagacagaaaaccaattgtatgttgagattgcttaagctacaagaagaagaaatctataggcgacatcgtgaagaaggaaaaagaaacccgtgctagtttcactgttgcagctcaaactgcaaaaattggggccacagtgtgataagtgtgtagttaagatggaaaaacgcatttaatttgtgcaagatacttagagagaccacattcatataacttgtattatagtatatgttataattttcctattttattattgttgtttagtcgctaagtcatgtctgactcttttgtgaccccatggactgtaggctcctctgtccctggatttcccaggcaagaatactggagtgggttgccatttcctcctccaggggatcttcccaacccagggatcgaacctgcgtctcctgcattgcaggcggattctttaccactgtgccaccagggaagcccactttttaaaattattattgtttttactctcctgtgcctaatttataaacttgatcaaaggtgtgtatgtataggaaaaatattatatatgaattttggtattatctgtgatttcaggcatccactggggatcttggataaaggggagggactcttgtacccacttgtttagttgttaatcatcggtcttctgtacctcagtgtaagttctctgagggcagggaccttgtcttgttcactgctgagtcttcaggaccaagaacagcacctggcaaatacaaaaagaacaggtttgtaggtttgtatggttagctctcagcggttggtggcagtctgcttaaggtcattgccaagggttcttgctgctgagttgcctcactgaggatatttgcagcctatggaagttattgctcacagtgcctcctgcatgctgcctctgaaagttctggataccttcctctttgtattccagttgcagatagagctttgatgctatgtatgcagcacaagatgcctctcatgctggttcatcacctcacaaggatcagagtcagtaacgcaatgctgagaggcatatgcaggacagcatttgataacggcttgccttcatatgatccggatttctagtactacattagctgctgctgctactgctgctaagtcgcttcagtcgtgtccgactctgtgcaaccccatagactgcagcccaccaggatcccccgtccctgggattctccaggcaagagccctggagtgggttgccatttccttctccaatgcatcaaagtgaaaagtgaaagtgaagtaggtcagtcatgtccaactccaagcgaccccatggactgcagcctaccaggctcctccatccatgggattttccaagcaagagtactggagtggggtgccattgccttctccgactacagtagcagtttgtatcaaaagttatgtccatgatactcaactaattggctgttagaaatcaagttttcagaaattgagattaaaaatattttaggatgtagtataataattatgcatattgtttaataagaaaaagcactaattctgtaagactgtatttgggctacacattttgaccctaatagtaaccagcaagttgtgaatttttaatatgattttttaaaaattaagctgttatccacagtcttctctctgtctgtctctttgtctgcctctctcttatagagaaatgatacttttttaaaagtctaataatctttcaaggctttggtcaactgaaaccttcttcatggacctctttgtgatttcgcagttagaaatacattctgtgctctgaagccctagattttgtttttgttttgtactgtatgtcttaccaccttctcctttaagtttttctagatgtttatcatcagctccactagaatgaaagttccctgaaggcaggaactgttttatcttttcctctctcagaaaatatagtaggtgactcagatatttgttgaatgagcaagcaaaatactagtgaaatgtagatcttttcccatgacacactacagtggaaaagcatcctggcctttagccacatgcagatgttatattttgccattcttggagaattatccccagctatgtctgttcattgtgtattcagcagtacatctcatagaactgtggtggaaactatatcctatcaggtaatttgataataaaagccattggtgtgacttttgccataaataaacatgaactgtggcagtatatccctgatgtaaaatacaaggactttcagttcagttcagttcagttcagttgctcagtcgtgtccaactctttgcgaccccatgaatcgcagcacgccaggcctccctgtccatcaccaactcccggagttcactcaaactcacgtccatcgagtcagtgatgccatccagccatctcatcctgggttgtccccttctcctcctgcccccaatccctcccagcatcagagtcttttccaatgagtcaactcttcgcatgaggtggccaaagtattcggagtcagacaaatctagattttaatgttagcttatgagttagtagcaatgtaattttaggcaaattatttaattggcatgagcctcagttttctcatttgtaaagccaaattaatgcccacctacctgacaaaattgttgtgaagataaaatatagaacatatgaaggacctaccaaattatctgatatgtggtagatgtttgattcaacagttgattaaggttatcttgtttgtgcccagttgggttcataatataaaagtagtacattatcattcattcatagtagtttgataaattcttgcaacttgtattttgaagctctttattaagtgtatagacatctagggttttttatgttcacttgaactgactcttttatcattgtgaaatggcactttttaacccttatcatattctttgctctaaactttactttgatgttaatataaccattccagctttcttataactagtgttagcatggcatatcttttttcatccttttaaattatttgtagcttatatttaaagtaggtttcttgttacacagcatatagttgagtcttgctttttaaagccaacctaacaatctctaccttttaattaaggtgcttatatcatttaaattgcatgaaattattaatatggtttctttctttttctgccttcttttggattaactgagtggtttttttaggattccagtctatctcatatgttagcttattagctataactctttgttgtgttattttatggtttatagtacacatatttaacttattacaacctactttcaagtgatcgtgtgccagtacatgtataacataaaaaccacctggcatggttttccttctgcatacagggcttcctttaatatttcttatactgcagatctgctagtaataagttcttttcgcttctgtatgtctgtaaaagtatttcaccttcgttttttaaaggtagagacttctagcctggctgtttttaccctggagctttaaagattttgctctttagtttctattgtttctgatgagaaatctgctgtcttcttcgtctttgttcttctgtatgggatgtatttccccctctggatgctttaaaaatttttctcttcatctctggtttcagtggtactatatacctttatgtcgttttcttcatgtttcttgtatttggggttcattgaatatcttggatctgtgggtttatagtttttattatgtttgacatttactcagtgttatttcttcacatatttttctatctctttccccttacttttcagagattccaataatacgtatatttgggcacttgaagttgtcctctttctttgatttaattttctaatattttctctgtgcttcactttgaatagttttactgctgtgacttcaaatcactaatcattttccctgtattatctaatctgttattagttacactcagttttttctttttcatttaaagaattcaatttcttctaaaccttgcttagatgtgattgacattaagtcagagtttattggatatttactgagcacctactatttgaaagaccccaaggctctttgtatgggcaaagcatggtttcttcttggcaaagatttctgactcatttaaatagtgctgagcatcttccttgtgtgaggccgggtctccgcaatgataaagatgggcatacattatcaatatccttggttgcttgtcatgggaagaaacttatagtctaacatgagtggaaacagagtaactagatttactaagtttatttgtaatcttttgtctgaagtggtatctgattacaccacatgaagattttcaattaaactcatctaaaagaatatgcctgcaatgtaggagacccaagttcgatcactgggtctggaagatcccatggagaagggaatggcaaccgactccagaattcttgcctggagaattctatggacagaggagcctgacaggctacagtcgatggggtctcaaagagtcaggcaaaactgaatgactaacacaacagatggcagacttgaaaagaactttccttttactttaggacctgagagaagaggcaccaaaaatgaaaacaaaacccccaaaccaggctgatttccttagtttgccttccaggtgtctgcaaggagaaggtgggggggagcttgaaggggaagacagtggaagagctatgaaagctgttctggcatgactttgtcctgttggtgcctggtgtcccaaaacaggtatcactgaagccagacatactgttggttccctgagaccacgtcctttgtaatattgtacatacggttccagagtgacaaagaaaacgaatctcagaaggaaaattgaaaaagctccacctgaaatgtttcaagacggaaataatgagcatctgtgttagtaagaatagcattaaaaatctatccctagccaaggctctgctggaagaagggggataacatgtttgtacttgctcaggaggacatctagaggtgctgagaatgagaggagggggaagttctcttgtgttacaagtggttcagggcttgaatactatcctagaaacaggatttttagagaataaacattctttacggaagatctaactcaactttctcagctcacagagaaataaagggaacttcctgaggttgaacgaagttagttagcatcaggtgagagttgagggtctgggtttcctgtaactttgggagaattgtttcctagtgaatgcatggcagcaccttggctttaaaagcactaggtatgtttttgacccttttcctgttcttcacagataacttttgacaacaaagcccacagtggaagaattaagataagtttagataatgacatctctatcagagaatgtaaagactggcatgtatctggatcaagtaagtaatgaattttactagttttcaaaatggttattaaataatattaaatgtttattaaattactcgtcccaaggatacgtggagcttcaaatgaaagaactggatcatgtccaagtccctaattcattttagttatctaatgttccaagtaattcataagttaatataaatggtttttcttgccttttccatgagccttcactggctagtccttactaaaaaaaactgcttataattcccccaacaacaacaataaaaaaatcacatctactcaaaccagtatttatcgagtgtttattgcataagtactttgagctacactttccttacttcagtgttttaaaatatctttaagataggtagcatccctatctttatagatgaagaaactaaggctcagaagtgaattttggtgtctttggtcatatattcagggagaattcaggtaggatttgaccctgaaatatcccacccattataattatcttctatccaggtcaaaaagtagatgaaataaggacagagtacagtcctagaaatatggacacaaactcaagtataaattgagtatcactgagaattttggagctgaactagatgaaactgactggaaagaattgatctcatttcctagttccttgtagtggtgtgtaatagtgtgttgtgcttgactttaatgattaggtcagagggtcttggattctagtaaggagaagcaccattccaagtacctgctaagctgcagttttccttgcttcacacaagacagtcagcaggtctggtggtgagacccaggaatgtgcagtgagtccttattcagaccatacttggatgataattactttagggttccctactaatggattcacaaagttcagaaatagtaatgagatagcatgaataaatgaaataaaatgtcttcattttagtgttcttttcactaataggtaacttcaaatatatgaaaacctggactcacaaacttcaattataaaatttcaatcacaaaattgtttatttgaaacacaagcctgttttgtcatctgtaaacatcttaatacttcacatacttgggaacagggaaaatgagagcatacgaaggtgtcgggacataaactttctctcaaatgtttgtttcttggattttaagtttttctgaagtggatttagtccttcatacaacatttagatgcctcttgacaaaattatgggttgcttcattacagtatagtcttgagttctttccatcagcagagagcagcccaacttgttgagtaggacatgtgacagccaccctctgctcttcacctagctgtgcttctgctgggaggactgagtcccagaatctctgggtgggtggctctgccttgtcattcaagtctcagctaaaagccactgcctctgggtgaggccttccttcactgtgcgaacgaacctttcttctccccattccctctcccaaagctccctcagtagtagtgctcaaattttagtgttacctggagagcttaggaaagcagtttctgatttaccagggctagggtaaggaaggaggatgttcatttctaacaagttccaaagagatgccaagaaccactgacagagtaacggaccctggagacaaactgcaaaggtctgaacactaactctgcacttactggcctggaatcccaggcaagttctgtgaccgctctgggcttcagttttctcacctgcaaagtggggataatcacacctacctcgtggggttactgtgaggtgcaaatgagttaaatcttcaaaaatgcttgaaactatcccaggtaggaaatacacttagtagcttttggatttactttcttcctatcacatactcctatcaggaagtattttgttcatttacttgtttacttttttctcttgtctcactggagtagaggttccacaaggtcagggactctatctgtcttcttcactattgtattctcagcatgtgaaaacacacctgatgcttaatgagtattttagacctagataagtatatttaaataagatatgcaggaaccctaactgtattaagaacaaaagatgacaggtgacagttaaagatcttcgatacatggttttgaggacttttaaccttctttaaacactaacagaagaatctgtatcagaggtctttctgtttgttatctttgtggaaagaatacttgaatttttaaaattattctaaacatgagtgtgaagaaggatccatataaaacttgaaagtgtttctgaggagggaaaaaaaagacttgacacattatgttttttgtcaagtgatttaacatgaacatgtcaattctccctagattaatctataaattcagcatgattccccccaaaaattaacagtaagattgttattggaatttgacattttggtcctgaagaaatatgggaaaataacaagcaagactagccagtaaaaattctaggaaagtaatgagacgtatttttcttaggcattaaaacacacaaaaaagttggaaggggaagatatggtacttgaatacattcaacagccatttggtacatgataaaaatagcatttcacatcatttgctccttttattggcaaaaactaatgaatactgatgtccaatgatgaagacgatgtgtgatgtgtgtaggcatgtaaactggcatgatatttttgcagagcagtttcttagatctgtttttagaaagatgcatatggtttaacccaacaactccatctttggatattcatccacctaaagaatcacttgaacctgtgcacaaagaggacctggagaatggattgtagtagtgaaaccagattacagcctgaacgtccttacaaataaagtattgtacatctgtactgaaacgacgcaatgcagctgttaaaataaatgaggctaaaaatggggggggcgggtaagaagtagaagtaagtgtcaccacactgatgttccagtacataagcaggtaaccctctttcctccagttcagaagaacactcattacatgatgaccttcgatgccttcattattctgacgtgcttggcttcgttaatcctgtgtgttcgatctgtggtgagaggacttcagcttcagcaggtaggagtcactgctttctaggaatgcactggtcattttgattgacagaaattcaccatgcttcccctcttttccctaaaggaatttgtcaattttttcctcctccattataagaaggaagtttctgtttctgatcgaatggaatttgtcaatggatggtatattatgattattattagtgacatattgaccatcattggatcaattctgaaaatggaaattcaagctaaggtgaaattttttcctatttatgtccttgttagtatcagatttgccttaactgtcatttgtttttccaaaatgtaaggattcacagagtacaagatttctttcaaacattgtattgagtaaacctgaaataacagtaattcataagaatctggtcaggaaatattttaggctgtttttcaaagtgtgatttaagtcctctcaatcagggtcacttgggtatctgataaaataccccacgttagacctactgaatgtgaactctgaggttggggcctgtgaattcttgcacacactgaaagtcatacacacagcaagataactaaggtaaaagatttttttgttgttgttcttagaaggaatgccagaatcttcagtagaaagagttggactgtgggtaggagatggggagtgaggccaaagtactgttgtgtgagtccttgcagttattcctttgtccattcaaattgagaatattcccattttcttactgttaccattgatgtactgcaaggttttccattttaagttaggactaatccaacttgtatatcaaccctcccccaaagcaaaaaaaaaataataataatactgttcaaactaatcttgtttagatttctgtttttctatcctcgactgtaattaaggatgagtatgaaccacatggggagcctgttttggttgagattcctgggcagagatctcaaatgcaatagctcagatatgataggagcttacttctcccttatgtaattgtcagggtgggttttccagcctggcaagtcactcagctccacacagtcattcaggaatctaagtttctcccatctttttctctgatgaccattaccattgaaggctcacccagactgcataattgatgctggattgtctcatgaacaggttgcagcccatggaagggaaaacctggtatggtaggtagtaggtctcttacagtcttacaccttggctcagaatggcagccttcattctgtcctgctggagaaaatttagccacatctgattgcaggggagctgggaagacagcccacacatgtacctcagaaagagagagtgagtttagaagccatggagcagctgtcaccatatgccagggtaatatatatcattgaaatacatatttaactttagggaacaaataaagagaagtagggggagatttgcagcaaatcttcatttttactaatcccacctaacattaacttcagtgagcccttaatggtattcagcagtctttctacatttttctagaccatgcattccccctgccttctagctgatcatttcatattttttctcgcttgaaacttctaatacctcttttccatcctttctttcaactgatgacctcacttcctgtttcacaaaataataaacagaattgaaattctacaaaatcccacttcatttatctacccatgagcatcaatgcccatacactttgcattttctcttactgtggatataatatttaggttactatccggggccaactcctccacgtgcctatcagatgctgtccctacttgcttgttccagacccatcagcatcaatgcctgtacactttgcattttctcttactctggatataatatttaggttactatccggggccaactcctccacgtgcctatcagatgctgtccctacttgcttgctccagaccatggctccagctcttactctgtttcttatgcatccttaatttcctgttttctgccatggcatttccatgagcatgtttttttttttttctttctaaaaagacaaatctcaacctgttctctctccagctacttccccatttctctgctctcctttacatagcaaaagacctcaaaagagtatttaatactgtttctggctctgttcatccagttctatcttgtatctgttctaatcaggctgcatggaaagtgtattttccaatgacctgtaactgttgctgtgtctaatattcagttatttatcctcattttgacccattagcagctctttaacactgcaagcactttctttgttgatgggttttttcactggctgtcacttacctaatttttctcttgaatcatggctggtcttcccttccctttgctgttccttctgactttaccaagctatttaagcaacagagcttcaaggcaccatgcttaaacacctcgtttttctgcctttgttttgtgatcttatcctgtcctattgccttaaagagtacctgttttccaatgattttcaaatctgtttctccagtttggaattattccctgaactccagtctcaaatatccaactgtttcttccacatcttcacttgaatgtctacacagcttcacaaatttaacataccttaaacaatcattgtctcaatggacatgagttggcacaaactccgggagttggtgatggacagggaagcctggcatgctgcagtccatgtggttgcaaagagctggacatgactgagtgactgaacaaaacaactccacctccaaagtcaaaactcacttctctgtggcctttcaaatttcagttaacggcagctcttttcagctgatcaaggaaaaaaaccatagatccatccttggctcctcttttttactaattccctctcctccatatctcatccaagagaaaatcctgtttgtctaccttcagaaatcacctcatcacctccaccattcccagcctggtccaaagcaccatcagctctcatctgcgttactgcagtagccatctctctcttccacagtctgctctcaaccatagagccaacattggattacagcactcctgttcagagctctcaatctccctcatttattcaaagtaaaaggcaaagttgttaaattatacttgtgaaactctaaactacctgcttcctcacctcggtgactccttactctcctctatcgttctctagccagacccactatcttgccagatgccctcctgcttttgggcctctgcagatactggtccctctgcatggaaagctcttcccctagattcttgcttggtttgctccctcactcccttcatgtctttgctcaaatgcccccttttcagtgagaccttccctgatcacccttttgaaatgcagtgcacagccatcctttgtcccctcccctgaattttctcctctccacttaccatcagcccatgtatgaagggtttcgctaattaacttctgtcatctctctctacacccaatagaatgtaaatctcatgagggcagggaattttgtctgttcactactttgtccttagcacctaaaatggtgcccaactctttgctactcaataaataattttcgcctcaatgaatttctgctatataactgataatttttttccactgtgttttagagtctaacaagttatgatgtctgtagcatacttcttgggacctctaccatgcttgtgtggcttggagttatccggtactttggtttttttcagaaatacaatgtaaggaattccacagatctccaagctgttggtatttctctttcaaagttactgcactggtttgtttgaaggacaagggattctaatgacctcttttactttcccagctcctcattctcaccctccaggcggcactgcccaatgtcatcaggttctgctgctgtgcagccatgatttatttaggctattgcttctgtggatggattgtgctggggccttatcatgataaggtactggtaaacaactttctctgttgctgttaagctctcagagtagtaccagtggcttgctattcttttaagataagctccttttactttgtgactcagcctaaacattgaaggtattgtgtctgttgccatgtttttaaactggtgaggtaagaccaggtggcactaatggtaaataacccgcctaccaatgcaagacatgtaaaagatatgggttcagtccctgggttgggaagatcccctggaggagggcagggcaacccactccagtattattgcctggagaaatcccatggacagaggagcctggcagggttgcaaagagttggacgcgactgaagcgactgagcgcacaccagcttgagaggatggttgattccttggttgcctcagctccttttgtgagctgtgtcagatagttaagtccttctttccatcagtgaagccaggtttgacaatttgattcatcaatatatatttatgggctatttaggtaatttttactgaaatgtgactttatttttaaaagtagtataggaagaaacttgtagaaatatttgacatttttgtttactagagttatagtcttgactataataccatcatcttaaatggaatgaactttagaacagaagcatgagcatttgtcttcgagacctgaatgctctgcagaagcatttcaaggatctctctctgcagagaggagctggtctgtcccttctttcttcttcagttcaggcttctcctatgaagaggaacatcaagagggagctcctgattccaagaaaaccagtaggcatgcacctactatgtagatcacaaaacaaatgtctacaggaatgacttttcccggttgtctccattgtatacatgttattaaacttttgtttgattttctcgttttaaaaaaaaatatgcctgtggttacccgagggtatttgtttgaaagggtaacttgggatatctagttccactatttttattatggagtcatgatcaaagtctccagtaggaaggaacatgaaataaaatgaatattttttttttgcagttccgttctctgaatatggtctctgagtgtcttttctcgctgataaatggagatgatatgtttgccacatttgcaaaaatgcagcaaaaaagttacctggtctggctttttagcagaatttacctctactcattcatcagcctttttatatacatgattttaagtcttttcattgcactgatcactgatacgtatgaaacaattaaggtaggttcatcaagaaccgtgaggagtgacattttcctagaacttgcagagagtcaataaaatacagtacctaatggggaggagatcaatggaatggtaatttcttctgagtagagaaaaaggacttcaattttagatcccgagaaacagaatttctagaatgttgaaaggtttgtctttgagtaactgttttcaaacaagctttttaatcttttattagcattataaggatcattaggtattgggttagtgaaacatgacatttcagatggtcaaaattttgtggggagcttttaaaatccaattttcatgaagaaaaattgacctctttatttgaagtgtgctgtaactgaacgcatcattctgctgggcccttcttgggaccactccagaggcttggtctccagaacagtcaaggaactgataggtcaagaactcgccatgtatatgttccacatttaggagtgtgatttgaaaagctgttatcatttagtcgctcacttgtgtccaactctcaatcattaatactgttattcacgctggattttaaaaatcagtttgagccctttaaaatatggaaaggcagaataaatatccatatgtattcaaatttctaataaccttcccacgtggtgctagtggctcaagaacccgtctgctaatgcaggagatgtgggagacttgggttcgatccctgggttgagaagatcccctggagaaggaagtggcaatctactccaatattcttgcctgtagaatcccatggacggaagagcctggtgggctacagtccatagggttgaaaagagctggatacgactgaagcaacttggcctgcacacacacgttagtagtagcacgttaggtatattattggcatagacacttccatttggggacttctgtttctgaacatgagaggggtaatgaaacatgatgccatgtgaatagataaggagaaagatgatcaacagttgatggattatatattggtaattacagataccttgttcaggcaaccagggctgtgacttcattcttactgaatcaggtgtcaagaactgactgtcctcaatgctcacttgaccaacttgcttagagtcaccagggagactggaaagaatgtcgttgtacctgtccaaatcccttcccatggtgctctaaaagttcgctgacttcacctctgcatgtagaaagctatattttattcaagggtgatgatatctgaggtctcaaagaataatgtgaatggacagctcttgacacaagcttaagactcttagtttagatgttaacctctttgcacgactcagggcacttgtcacatgggtgagccctttctgatcctttctggcccagggcccattctcgagatcttagatccccaaactgaaataaatattagacctttatataaatctctctgtctggaagagagactccaaaatggtatgcaggctgatttttccctggaaggaggtcttagattcagattcatcatgtccatttcaggttgactcagacccacgaaagagagcccaggagggcactgcagaatcttagacccacttttccttaggcaaacctaagagtggctctagaggctccatcaccatgaaaatacgtggaagcgagtgaactatccctttagaaaaacccctacctaacccaccgctgtgggtttcccagctggcactagcagtaaagaacctgccttccagtgcaggtagatgtaagagatgcaagttcagtccctgggttgggacgatcctctggaggagggcatgacaatccactccagtattccatggagaatcccatggacaggagagcctgaccatagggtcgcacagagttggacactactgaagcgacttagcatgcatcccacccctgtagccaaatgatccactctgaatttgaaataaagctgttctcaagggacttattaatgaaaactttttttttaaattcttctgtatagcattaccaacaagatggctttcctgagactgaacttcgtatatttatatcagagtgcaaagatctgcctaattctggaaagtaccgattagaagaagacactccagtatcgatattctgctgttgtaaaaagtagctgttaggctaatctgtgatctggagagaatatattatgtaaatgagttgggagataaaaagaggtattttaatatgagatgtagtatgtctgaagactactattttgagcaaattgatgactataattcatcaagaactgtgtttatatttttaaagcaatatttaatgtctatagctttgtgctaggtttatttaaaaaaaaaaaaacccactttgatgagggaaactgttggattcttgtcctgtttattttgccacttttagaatatgttttccatacctttctttactcttgcttccagttattttgactgtgctgactgtgtcatcagtagaaacagtgcctggtctgatgtcagccaagtcgctaaccctggcctggacaattctcagtggtcatctgagagacgggatggttgctgtctatccagtaatcattggtggctcagatggtaaagaatctgcctgcagtgcagacctgggttcgatccctgggtggg

SEQ ID NO: 177 - DNA, 9847 bp, Hippotragus leucophaeus
  source 1..9847: mol_type = genomic DNA
tcctggccccaggcagctctttattcatggtcagcagtggcctgggcgcaggggattggccagggtttgggcccagccgcccaacccccaggttggggctcctggcaggctcagcgacagctctgtcctccagggccttgcagcacccaggaaacccttggctggccagggctgagctccatgcagcccctgggcccaggaccctcatatctggccccacataacacaaagcacctccatcatccagaccgtgggagatgggttagagttggcactgaagtacaccaaaccacaagaatcccaccagctcggtgtcttctccttaccccagcagggataagctgctgggacctcatccatcctgacctccacccacagccagacagagacaggacaacgcaggggagggagcggaggggctgctccagacctctgggcatcagatgttcacagtcgaggttaatttacaaagggcaagggaccacggggtgggatcagggctaggctccagggtcccctgcaagagaaggggtaggagtggggttggggggatgggccggccagttctggcccggctgtcccagacctaccaccacccaggactagttggggcttttgtagggtgggggcgcctacgactcacatttccgaaggccgatgggccagaccaggagactgcacagagccagggtggcggccacgcccacaccacctgtcacgaccaccatcacccaatggtagaaagccacacaggctttgcagcagagctccaagctggggaggagcaagagggagtgagagctatcactaggtaccctccggccccaggctggacctcctgctcctctcagctagtgcctgcgctttcctggcactcagccaggggtcaccctccacccccttatcccctccagcatctgatacctcacccagtaaggtcagctctgccttcaaagtctatcccagactccccatttgtcctccctcagtacccccaacccagtccagcccagcaccacccacacccctacatcctagtcccctccggttcccaccttcactgccccatctgtccttccaagagccactagagggcgcagtgagcaactgagtcaggcccacccctctgcccacagggctggggccacccccaaccctgcagtcctccccccctgctgctgcccctgcacgacctgcgccatcccctccctgccctcctcactctccagacacccaggccttctccactgttctttcaacataccaggcctggtcctgccccagggcctttgctcaggctcttcctctccatttacctagaaatccctgacatcccccaggtttcagatcccatgtcacctcaaggaagcccttcctgacctcttgccctagtgggccttcctaagtggtgtccttcacaccctcgtacacatttattcatgggatactactgtgcctggaaccctaaggcctaaggatctgaatgacagggattccaggcttcccactgccctgtccactcccgtcacccaacccatctttgtgtcatcagcgcccagcacaaggcacactgtccactctgaataaatgggtgctggaagtggggaataacctggtctccctgactctgaggccaccaccgtgttgggatcttctgtcagttatggaatccatagtctgtgggcagtgcctggcatacaacacaggcttggcacaccttactagacatgacgacagctggatggggtactcacgagcaggggtgcaggctctggatggccataactgccagcccattggccaccttgtccgagaagctcatggcgccgtacacgaaggctccactgtgctggggggacacaggcaggggggtcagcaccccaggcctcggccccagtccccaacctcgacttggccccactcagcaaccctaccgtgtgagggccgatgaggtcagccgtcatggccaacgaggtgaccaggatggtggcacagcccatgcccagcaacacagctgccacatacacagccacgcccagctcatctgccagcgccacccaggctgcaaaggccaggatcaccaggaggcccacaaagtaggtcatctgcagagcacccagcctggcgtcaggcccacctcattgggcagccctgagccggacaccagccctttctggtctccaacctggcccccagccccagcaaacgaggactgagttgggtcatccctaaggagcccccaactctgacctcggagaattccgaggctctgagcctgctgatactgagtgatccatggagcgcatgttctactgctaagctgtctgccatggctgccactagagactggtggctactcatgtctcaacacgagttaataaaggaaatcaagtgaagtgtttggttcttcagtcatacccgccacccctgctcctgacctctagagggctgtgggtggtcacagggtgctcaacgcccacgttctacaactcatttcccatcaggatgtgggtgccctgtccggagtcgcccaggttctgggggcacccccctccccgccttcccactcacattcctcccgatgcacttgttcactggcttcatgaggaaggaggagcagaaaccgctaaggtacatcaccagcgggatggtggcgatgaacctctgtggggtggagagggcacaagcacgtcgggcctggctcagcaggctcagggacccctgtcccaacctgtccgcccagctcaccttgggcaggtggagggagtaggtgaggtacatggctatgtacgtctgggacaggttcacaataagcctcgtgctcatgtacagcaggccaacctgggaacacacggagcatggggccagggggcagggtgccaagtcaggatgagtcaccctgcagctggcgcctgaccattagcagtgaccgcctagctggtcaggtggagaagatggcaggatctattagtaatgtctgtcctgggtgtggaggggaaggggtacatttgctctagtgtctgccatctctgcctgcagcccagcacagtgagggccctggtaggggaggagcatcaaccccaaccttgtttgaccctcctccccctactgtcatacctgataaaaggctggctcccgaagccagtgtttccagagcagcaagggctgggcggtagagggagccaacagggggctgtgttcaccgggctcctccacctgccgccggcgcccctccctggtgcccaggtggaacagcagtgagaagacagctccgacacccaccaccagcagggagaggttctggggaccgggtaggagaggggtcagcagtgacacttggccccaaccctgagttcaggaccttgggagcacccctcccaacccccccagctcacccggaacactggcacatcctggacccccagttggtcgctgacatcctcggcggggccagtgcggggagagccctgcaggtggagcagaagccaggcagctccatagacagcgatgttggccaccacagtgaaggcatacctgtgggacagtcaggcctcagagaggccgcccagaagccacacaaccgcttccttcccaggcggtcacccagtcagagatgctagccatgcctggggaaggcctggccacatgatgtcagccaccaacacgtcaggtagtccccggaaagcctctgctggcctcagtttccccagcctccacattatcagacttcctgctctgaaccaagactccaccacaaggtcctgcctgcccagggcccagagtgcagagattccacgaagcagggccgagtcaggctgcaacccagagacctgagatactcagaaaccctgggcttcagctgggcagagttacccgggcccacacctgcctgtagcccctgagccctgtcccccagggcctcaccagataaggagcctctgggtttcactgggactctgtttccctttctgaaagtgaaaacaagaacacccccagagtcacgaggctcttgtgggtagaaagcacccggagcttgacttctatgagcccagcccgccccctgcagctggggcctttgcgggcccagtcattgggcaatcccctgatgccgttagtgcctgcagctcccagccctaatggggaactgggccgtggacaggcggggcctcatgaccagcgttcatgcctgaacggccacctgcaggagtgacatccctcctgcccaacagtcaccccctgatccccgctcccccgacacaggccccactctgctcaaaccctctccctgggcacatgttaatcaacctcctgggcttgtcatgagaatgaaagatggtttgctgtgctcacacacagcaagtgttctaaagtgctcctgctaccaccgcactagaatcgccacctttaagtaagtcagtggatgcgctgggggccagctgcacccacatgtgacaggcaggatgctaagatgcccagagatccccatgccccgcttcctctccgtctaaccgcctccctttggggaacagaacctatgaatacaatgggatgtcaggccatgctaagataacgtcctacggcaaagataagggattttgcagatgtaattaagaaagactatccctggcgggcctccaggagaaggaaatggcaacccactccagtattcttgcctggaaaatcccctggacagaggtgtctggtgggctacagttcatggggtcgcaaacagttggatacaactgaacgactgagcacatcctgggtgggcccgatctaatcaagtgaccctcagaaagaaggcggctcacaccgtccctgagatcagagactctcatgctggccacaaagcagcagcaaaccccaggacttctaaaaggaagcaaacacagcaatcgatgacaacgtaagcggggcagagggacctgaaacctcagccgacacctcaactgcagcctcaagcctgaaactgagaacccagctaagcaaagccagactcctcacctgccagaactgtgaggcagtccatatgtgctgtctgagctgtctgaagctgctgatgcagtgctatttgttacgcagcaacagctgaatgatacactgattgacagatgtccattctggagctgagacccagagccacacagccaagcagagctcagacatcgtaggttgccctgggccccctgccccaccctgccctgccccagaggtggtacctcagagccgtgagctccaccttctcatggtcgttggtgacgagctctgggatgaggctgaggtgggcgatttgtgtagcagcccagccgaactggaagatcacaatgaagggcccgtagtagaggagcgcagcccactcaggtgtggcgggcccgcagcccaggcaggggctgaagatgaaggggaaggacagcaagacacagatggttcctgtggacaagcagagtgtggagggcacgtcgcaggccttcctgctggccccgggccccccagacacagacacagacaagggtacacagtgagtgagggccagaggcccaggctccctgggctcacagccctgtgacagatagggaaactaaggcggagagatccaggggtcccccgagaacacacacccaaacaggacagagcagctgcacctccccatccaggctacctgccccttgtgtgtggcgggaaaacacacagagtaggtcacatgccatacccatgagggggcagaggcaggaatggggggccccatgccagctcaggactccccaagcttgccccctaggtgacagctcaacaaactgaagcagagcttgaggccatgcagcaggttgaaagagcgctgtggggtcccccggggaagtgcccaccacttccccttcctgcctccccaccaaggaggacttttcctcccagtttctaccaggtgacgctgggtggggctggttggaccctgccctccctgaaccctagtgtccccatcagcccatgagggggcctcttcctggaaagtaccctaattcctcagaacaagcacaggtccttctcgaggcctcaaaggccctgccgacctgccccgtcctctccctgccctcccctcctcccacttcctcccctcggctcactctgctccaggcactgggcctccagctgtccctcctgccccagcgccttggcaccatctgtgccctctgcctggaatgcttctccccactacatctgagcaagacccactcctctccatcccttgggactgaactcaaatgtcacctcctccaaaaagctcccctcccaaccagctctgttgccagcagtcccctccccacccggacactgtctgaaccctgctttctcttcttcacatcccttagcactcacaggaattctttgtctgtctgcctgtctgtctgagggtgggtaacaggtctctccaagtcacttctgtgtccctggcacccattacagagcctggcacaccaagatcttgtcaatgagtgaataataacagtggcctttgtttacagcccaaagcagtacatgttattattaaccccatttcctgatgaggaaactgaggcccacagagtgagctatggaactaagagtccggcgctccacccttctcctcccatccccggagggcctggagtcagacttccgttcttcctctttcctgccctggctcaggctctggaggtgacctcattccccagaccttgggcccgcccccacagtccagggattgggaactgaaacccaaaccaccctctctatttctccagaattggtgcctgagaagggcaccccaggcccctccagatgcctggaggtctggtggccactcagggccagacaggaactgtagactctggtcagaagaatgtgctgcgtagccagactctaccctgccactgctcaggtagttaaccattgtcagcgccccaggctgcctggctgtggaacttcggcaagtgactttacatctctgggcctttgcctccagaaaagggagctaatgaaaataccccacaagatgggtgtgaggattaagagttaatgaaattgggaactcctactactctgagccacttcctgtctcagcaacttcaaagccatgagacttcacaactttgcaaatgctgttgcaactacttggaatgctgccccataagcacacactcctattcatcctccaaaaccccaaagctaatgccccctccagtgctctgcttcttccttatgaagtccagtctacccacctgctccaacctggaccccacaggagtatccatgtgctctctgggtcctctgtgggctagaaggggagcccagatgctcattaaaggtgaacatcgagtccgtccccactacccacagattcaggggcaaaacagagtggaagtggacactgtggccaaggtgaccttcattcgagtcaccttatcaggcctcacaaggggccaccctggcttcctctccccacagatcttcctggatcttcctatgtactaaccccaaggcagggggagggtacaggtagatatctggttggggcacccattccccacacctgttttgcctaaacacaaagccttcagtttaggggacttagattttggtctggggtcaggtgagaccctcactgaagctcagccctctgattacaaaaggggaagttggcgctgctactaggtcccatctcagggcctttgcacaggcagcatccactgccaggggccacctacccactgaaggctccatctccttagaagggtctcatctgtccatcccagaaaacaaaaagagtcctcacacctctttggcccaggaacgacctgtttggtgtgtgtgtcaacaagtctacccaaatatgaacaaaactgcattcgagattgtgagttcagctctgtaagcgatcccaatgtgagcccatggagggacacctccgtctgcagtctgagtcacctgcctctacctgctcccctccctgggtgctcgtctaacagcctgagcgtgctcagtgtctaagaaacctgaaatccagccccaagccgctgcagacacagcaatgccggccacccgcaggcaacctggaggtctgctgaaccttgcaaatatgtcacgcacaagggcccggggcaaataactgcctcttcagtcactgtttccaggggcagggagatactagccggccctcctggctcttgaaaagttgccaccctgaattctcataagtggcaggattcctgactttgcttcctgaaatgcctggcgtgccccaagtgccaggatgcagctagtacttctgccaggaagagaacagtaggcaaagtggcccacagctaatctcagggcccagggtccaggcgggcagaggagggactctaggagctgggccttatcagggatgtgcactggggagggtactcctgcccctgtgacacctacctcctccccttgcagacagccctctagtccaggcaacacccccagaaggaacagagggtaaccccatagccttctctgaagaaccccatcccatcagctggacaagcacagaaccctgacctttctggctcacccggcccacaacccagttcccagggcagctccccaaagtcaccaattgccaggttgcccaagatggggcagaagacagatggacaaagtgcactgaggggacagagagcaacacggggttctaggcaacctaactcagagctgtcatcggtggtcactctcatacagaccgagagaagtcaggccataccagacagactgacagtggaggcactggcagaagatccaacccagagagggttcagggtgcccctgagcatcagacagatgaagaaaagcaacactagagggtcacacccagagtcacatggaggaggctccacgggtcacccagcagccatcagacagtcagacagaggaagagtacagagcagttaagtggaccgatgggaaggttcatgggctgggcagatagaggactgagcagtgggagaggggccggcagtcggatgagggaggccggaccggggcttaccgaccaggtgccaggccttgcgcgggccgaagcgggcgcagcggcctgcggcgcggtcagcctcgaagcccaccaggggcgtgcatagcccgtcggccacctggccgagcagtagcagcaggccggcgccgcgcgagctgtaggcgcgcaccgaatgcaggtagagcagcaggtaggtgaaccacatggacgcgcacaggtcattgaggaagtggcccacagcgtagctcagcctcgcgaccagggacagcggtcgcgggggcgctccggctccggccgccgggggccccgggcccatggcggcactccgggctcggcctgtccgtccggcgctggcagactggaccccagagccgggctgtccgcgtccagttcgccccgtggcgcctctctcctccgccccaccccgccgagtgcttttgcagctgcggtgctggtggacccgggacaacctcgggtggggcggggaatctcgggagcggcgtccactctcgccaatcggagccacacgccggagaaggcaagccaatcatcacgaagagggggcgtggcccgggggcaaatgggttcccgacgccgggcgccagcgggttcagccccgccggggctgcgaggtcctagcgcccaccgttcttatcattggtttgcggaccccctcccacgcaggtggggggcgacgccaagggtgctcctaatcagactcgcgccttaagacacaagccgtttcagtctgcccgcaaatttacgaggcctcttgtgggccaaggaggacggggtgggctggggacgcgggtgggt

SEQ ID NO: 178 - DNA, 229310 bp, Hippotragus leucophaeus
  source 1..229310: mol_type = genomic DNA
ttttaaacaaggacttggcgtgccctcgcgaaatgtgtgagcttggaggagtgatggtaggagaacacagctgagtccattcttattaaatggtcaagtctgtacccttgaagctagttgagagagagaagggagaggagctgctgacattgacaatgaatccaaactggagttgcactagcggtgtctaccacgttgccgctgccctcgcttagccttctgggaattgtagttttgtggcgagcggctcccctggcaagtcgggtatactcggcccggctgtgactacagatcccagacggcgccgggcagccgcccctcccgtcccggttcgagtgtaaactcccggcgccggggcgggcggccgcgcgcgggccagcgggctgagctctgcaaggcttgggggcgcaccgctcgggggacccaggccccgccacctcccctccgaccccgggctcggttctcactttggagcagtgcgaggacgggaagctggagccatgcagtcggaatcggggatcgtgccggatttcgaagtcggggaggagtttcacgaagagcccaaaacctattacgaactcaaaagtcaacctttgaagagcaggtgagtggtgacagctggagggaggcgcggcccgcccctggaggacccgttgccgcccactctgaggcgaggaaagcagctggcccggactctgggacaaggaccccgtgcccttgccccggggcagagggcgaactgacccccgcagctgggggccgtgccggcccggacgggtgcacctatgagggtctcctcccgagcgcattttgggcgtgcggcgggcagccccggacagcccgcgaggacgaggggatccctcggttggggataccagctgcggagagcgggtgggggctggggagtgccccgacgcggaggtgggggagaaggagcgccgggccgggacgcggtctgggttagtttcgagtgaaccccttttctgaaaatcccagcgggctgagaacttgggggagggagagcttacggtggatcgagcgcgacgttagagacaagcaattagctcctatgttgttggccgcttaggagtcggcccctctgggaaaaccgacctcgggccgcctccaggtgaggtttcccgagccccgcccctgaccttcccggccgcggcacccctgtgcgggaggggcggggtgcgaggtggggggtgcgtgtctccttgtccaggtggaactcccgggctttggggtctcattcaaatgcaggccttccctggagggggtggagcggggggggggggaactttgagacggagatttggcgagtgaccgctgttgggccgcgacatgtctttaattctctgggcacttctaaaactgtttgggaggagagtgaagacacctgctggtctggcgtcccatcacccttagtgctcacttcttaggctgcctccactcccacttgtcccttggagcagtttgggtgtcttttttcctctctgtcctgtggccactcaggacatttccaacgtttactaagagagaggtggtcagttgaggcgctgagagtagagagggtttagttccgcccctcagttgtgaggtagcatgaggctggaactagaagcttcagcagtgcttctgcatccgtttcaaaccttctgccggccgctcactgtcgatagcgtttgggtgaagagggggacagggtccggaaatcatggtgaaggaaggactggatccggagtgaagggatgtgatcagagctgctggggcatgggggattggtacttgtgcagttaagttcgtttccttcagggctgtgtcagactctgaatccactttggagaaggaaatctgtggagagcacaccgactgactgggtggctgaagcagcctcttggcagatgcttcagggagattggaaggaaacctcctatgcagttagttgcctaaaaccagcctttagttggtggtttctcttcataatggctgttttgtgtgtgagcctagattgtgtgtgttgggggttgggggtgtggagtaatagtgtgtaaagggtattgttggttatgctcattggggctttatctgtattcggctgaagggaccagtgttttaccgagcagtctctgcttttgcttctataagcaaatgcttacatggccagaatgagggagggagtgtgtgtgtgtgtgtgtgtgtgtgtgtgtgtgtgtagtcctgaaagaaatgaattaaccggactgtttggaacatttttgatggtagctgatacataacattaaataaatttgagagagtgaggaaaataccatctggaaaaacccaaatgaatgccatgaaactcacgttggaggatttggggcctgttctttttcagagtcggcaaaaaaaaaaaaaaaaaagacttgcaagggttgagcatcctcaggagctagcttgcacgtgtaaagaaaattcgtggacgtgggaagcactggtttcacacgttgaagctggaaacaggtgcaggatggaaccggtgcacagagaaaggctaaatgaaaaaagttgtaaaacttgtctgtggagcagacacatgctctttgcaataaaccagtgaaataaaatctgtgaataaatatatggggttggcaaaatttccctatagtacagttttccacagttttctgatgtattgtcatcgacatctgttgtgtgactttgcaagggctgcatgttcagggcctcctcctcctggctttttgtcttaagtctgcctgggcacctcccttcttgtaatcttggttggaaaaagttgaaatcagaaggggaagatggctgcaactgccttgtctgtcagatgtattttctggattgtcttttggagttgaagatatgtctagaatcctcctgaaaaagaagactgttaataacagaagactgttagttgtgtccaactctttgcgaccccatagactgtagcctgccaggctcctctgtccctgggattctccagacaagaatactggagtggattgccattcccttctccaggggctcttcccaacccagggatccaacgtgggtctcctgcattacagccagattctttaccatctgagccaccagggatgcccctagaatctgcctacttgtcaccaactcctctgctcccactttagttcagactgccacctggcctcactggctaattgtctcttacctgttctcctgcctttatccttgctgactctcagtggatttttcaacacaggagccacaatgtctatgttaaaatcggttttcaacctgaatggtggcttgccccactcaggggtaattcagcagtgtctggagacatttttggttgctacagtggatgagagttactactggcctctagtaagtagagagtggaaatgctgctgaacattctccagtgctcaggacagtctcacaatgaagaattatctgtacccagattgttactgctgaggttgagaaacctcatggtaaatgtatcacatcatgttctctcttcagaaccctccctggtatcagtaaaactcgagacccttaaagtggtccaaggcagaccacttaatgggcgggctccctgtcagcactgactgtgggtctcttgttgcccctggtccctctgctgcacccagcctcctcaccattcccggaacactccagacctctccacttctggccctttgtaagctacacttgctggggccagcaagtgtgctttctgtctttgtccagagagcagtagcgttcattccctccccagccgacttcatgtcttcccttaaatgtcattcctgccttgagcacactctgtgctgtggctctccgtctaaactctcagtgtcccttgccctgctcggtttttcccacagtacttacattatgacctagtctatcattttctaatgggttccagttatgctatgtttctctgtactaaattgcagggtccaaggggatagggatttctgggtcttcctggtttactgtgatgcccccaggacctagaacagagtttcatcatcagtgctgttgacactttggactggataggtctttgctgtgggggctgtcctgggcattgcaggatgtttaacagcattccaggcttcttcctgctcaaggccatagcatccctcctcaagttgtgacatccaaaaatatgtccagatgccaccaaatgtccatgggacacagactcacccctgtggcagatgaacaggcctagaacaatgcctggcacaatagtgttttgttgtttgactatgtgttgttttctccctttgtatttcattctggatgggccatttgattctgttttttgcatttaaggctgccttccttttaaaataggtatccaccatgctgtctccaaagaggagtttatatattcttcatctggactaggcttagatgtgcaagtgtttgatgaggaaggacagtttaattcctaacccagacctcctagactttaggaatgtgaagccaatggatttaggtgatggaaccccactttggtcacaatgactggagaagctgtgtcatagagagacacacacaagagaaaagggtctcctgaagaaatgtttgcagtttggttcctccccaaaggtttttgaaaccttggtgtattctcctggaaatgagccatgaatggtgggtggcagaggaaaggtgccaaatatgagagggtgaacccagatatcacacatgggcacagtcaggtcagggtcagatgtggaaccattgaatgggtccctctcagggaagggactctctgtagggctttaggtcctgaaaaataatttttttttaatatgttagcatctttcaggttcatagttcttttgttttgtttcagttcagttcagttcagtcgctcagtcgtgtccgactttgcaaccccatgaatcgcagcacgccaggcctccctgtccatcaccaactcccggagttcactcaaactcaggtccatcgagtccgtgatgccatccagccatctcatcctctgtcgtccccttttcctctgcccccaatccctcccagcatcagagtcttttccagtgagtcaactcttcacatgaggtggccaaagtactggagtttcagctttagcatcattccttccaaagaacacccagggctgatctcctttagaatggactggttggatctccttgcagtccaagggactctcaacttggtgctaaattttgtggctttgtagctgctaatgcccttttcctggacagacttcagaatttatttaatctaattccagtttctcctcttctcaaagttttaataatggtttagataatggttctttaacttcccacaaattagaaatgggaatgaaagtgagtattaggtttatattggcagggtgagataaagcaatggttcccagatgctgattcagagagacgtgtgtgaaatcgttgcagatttgtattcagatgagaaagaaaagatggttgtgtccaactcatgctcacatgcatgaatttccatgtaaagtcaccagcatttcttgaatttagtctgagatttttcctgggcttcccaggtgacactagtagtaaagaacctgcctgctgaagcaggagacataagagattcaatcctagggtcaggaagatcccctggaggagggcatgacaacccactctggtattcttccctggagaagcccatggacaaaggagcctggggggctacagttcatagggtcacaaagagtcggatacgactgaagcgaccttgcatgcacccacatcttcctattaaaaataccctttcaagatggaactgtccatcttgtattgattttggaaaattttcttgatttttctttctgtctaatctgtagagaattactttacatggagatttaagaggattgttctgtcatttctgtctgtccctaacaagctgagtgaccttggggaggctggatgacctctaaactcagtttcttcatctggcaactgaggggcctgcctcctaagggtcttaaggacattaactgtgacattgactatggaaaagtattagcatgatgctgggcacatatttagtgctcagtaaatgttagcagatgttcttgttatttctctattacttagcagtgagtcctgaccttccagaatgtgtttgcatttggttgactctggctttcttctctaaggccagcgttgttatgcaataaaattatcccaagtttagtaaaatctttttgcttccccctactaatgaggtgctgcagataaatcttttgtgttttataattttgatgcagtccttaacagtttctttatgctggttaaaaaaaaacccagaacatctgtggcatcatcacatacatacagtttcatattctacacatatatattgagtacctgcaaattcataccgatgaatgctgttaacatttactgaggccgcactgtgtgccagcccccgtcgtaagtggttttacatgtgttaacttgcacaacctgcttgagatgataataataaataagagcaataatgttgtgggttataattttaaaaacaagtaacatgcagtgcttactacatgccaggaatgattctgggtattttacttctgttaactcagttaagtctcacttctaccttgggtacttgtatttttgctgttgacattttacagagaaggaaaccaaggcatcatggttagatgggcctggttctggctctggtcctgtgctccagtgcactagtctgggctgccctgtgaaaggcacggggcctgcctgtgctgcgccttctccaaaacttgcctctgtagtgggagggaagggaacacacagatccagccaaacatacaggacggagcgtgataatcaggcgcatgagccatgggaacgtaatagaggaagggaaactggggtgggcttttgtcagtaaataaggggattcgattttggcattgaatgtcaagcaatactcaaagcatagttctttataacattaaataaaatgttacatgccttaaggcatgatctttttttttttttgatatgaaccatttttaaagtctttattgaatttgttaataacactgcttccatcttagctccccgttcagggattaaactcgcaccctctgcattggaagcatggagtcttaacccctgcgcccccagatgcattcctgcctttatacttgccaccagagtcccagctcttcctcttgttctgtggtcacctggggtggcagagaatggatgcacatagacaggttcagaagtagccatgcttaattaaacacagtgcccatggctttgccacttaactgttgtgtctgtgttcacagctggactcttagcctcctagactctcaatttctttacctgtgaagtggaatctatagaagtgtcctcttaggattggtggaaattttaaaactgagataacacgtgtaaatgtgctttgtagcgtgcctagcacatgctagtaatatcaattccttctcttctattttaccatgattgcaattttccccctccgcagcacaacactaaagcaagtgcagaattatgtatctgaagcaaaatggacaagattgaagtacgttaacctggcagatgttcagatcttattatgcaaattgcttgtgtggtatgattagatggaaaacttgattaaagtgggattctaagtgttggttttgtgtgttattggagatttccttttcccgagtactgctatttatagaattatttaagtgtgtgtatgtgtgtgtgtgtttaattctctttgagttctgcagtgccgtttgcacaggctgatgtttatatctgctccagttgtgcaagaagtggaaaatatcctttttttagaacaggtcacatgtgcttactgtcaggaataggacctcagtgtaaaaaaatgtatcttgggacaaatcaaagttactaaatttccccttccaactgctttgtttcagaactggcagtattaggataaataataggagaaaattttggctaaattgtgggtttttttgtcatttttcaaggacggtaagcaagagtttcatttgttttgtgtgtgtgttttaagtataaaatgtactttgctgttaggtctgtctcatcaaagtaaattataaaaatatgtttgactcatctccaaatatgcattatttggagaaaacagtcaggaaggcgggtcagagatagtcagtgtagttgccccaagcttttcatattgtaaagacaaatgtagcatttataaggaggtttttgtgagtctgatgaacagtgtgtacttgagggcaaggaattatagcaagctatgaaggctgcatctttcctgagccaactgagggcgagaggaccagcgggcagatctgggatttctgttgaaacacccacaccctatttctgttcctaaggcctggggaccaggccccttgtgtctctaggtctggtcttaaacatggctaccttctttctttgctgcatcttccttcctgtggtgtttcatgcatgctgtgaaggttaaagacatacacctttggagtgttcgcacagaggtggaaccagggcaggctgagaggaatgcagtgcttcaggaagtggagacaatggtgagagaaagacccaccaggaaataaatgatacccaaaagtcatgagcccctgttgtcctccccaggtcatttctcaaatgtcactcagtcgctttcagcaaaggcagtataactttggggtcagagggacatggatttgtttgttttttttttcttttctgtacctacctcatttctctccttccttacaacacttatttattaagtgcttatcgtatgacagctctttgctggcgtagggaatcaaaagtagaatcagatagactagatggtcctgtcatcttggaggtgggggatataagctaataatgaagcaaatagatgaataagacaagtgttcatgctaggaaaacgaaatagaatgttattgatagagagtgcctgggaaagaagattctttattggatgggtctttagaaatgacctcttagaggaagtgatttttgaggcaccaaatgtctgggttaaaagtgcagatcttgctgctgccattcgctagctgtgtgactttggacaagctcaccaacctctctgagttccctcctctgtaagatggaatgataactactttgcaaggctgctgtgaagatgaaaggtaatgcatgaaaagagttactgtatgaacagtggagaaagacatgcaggcattaatcttcactgtaaataagtgtttataattagtcttaaatgtttttctaatgtccagggagtcagagatttatggttgtctttacaaatctacccccggactaaacgtggagatgggtcttggtatttttattatccttcctttcttccaggatcatcttacttgaatggtctccttgctcatttcacttttgttgcattgagatcattctggtctggccatacttcctttatgtttagtttaggaacagtttttggctgcatctttggtgcaaaggagagggccaagtcacctaggattaaaaagtaaagcctgagatcgatttcagcaaatacacatgcacaccacaaagaaatgacccatgtagaactcctgactcccagggctgttttcagcccctgggtcacacgcttcctgtctacactgatgtgaaaatgtcagtgttcctgcagaaagtaaaagaagaagcctctcctcccacacaccacttctagcttccatcagagttgacatccataggcaatggtgtgttttaattcactcctttacgaaagaaatcttcaaagcattcaaatgtcagtaactgtgttctttgattcaagtgtccacgggaaaagggtcttgggtgtgtgggagcaaatattttaaatccaaacgtggtaagttgaaattttagggaaggcactggtagaattgtgtctttctataagaaaattgtgggctattgagcaatttcaggaaggcttctgtggcctgcccccttggcacccccgcccctgagtgggagaacttgctgacacattgacacacattcccctactttccctcgaggtagagagccgatgggaagggtggtcgtccccactgatgggaccgtgtgtagcttttgtaggataggttttctttctgggaagcttaacttgcttccatgggaagaagatttgaggcagagaaaagttattgagtcccgtggttgaggttgtacatcagatcaggataaaatagataggaatgctgtacttacttcggtaccttttctgtgatatgttcctgaatattaactggtcctaaaaaaagcatgcttttcaaaacatacattttatttttataactggagattggaaacttgatgaagggaaaagcacacagaaaacataaggatgattttcctgtttaacttggaacctagcgcaatccctataaagtcttacctgggcacctcagtgagatgtggccaccttgttcttcttgcctgaacctaaacagttggaggtggtattcacaggcactccaatattgtaacaatcccttctctgtcaagaggactgagtatacttctgtttaatttttttttgcatttgaaatctttaagcaaaaaatgaaaaggtattatttcagggtcagtttgctctgtgtaaactgcaagtaacttgagaaataactcaaactcaaataactcataagtctcaaataactgcataacttgagaaaattggcatctcagccaatagaaccctttgcaacaaatttataatacttggggcagagaatgactgtgaataagcataatgactgtgaataaacattaaaatagtattggccagttaggatcatttccttttaagggaaaaggatgacaccaactatgcattcttgaaaagtctgttcatttttcaaggtagagtttacaatagcttatgtaaaagagcctctaaaaatataaacagctggcacgattcctggtgacattccaaataaaagtttgcccatttgcttcaaagaagcatggttagagagtaacctctgagagaaactggcccctggcttgtggtgtatgggacaatcagtggtagactttttggaaccacgtcttgcatcaccttggcatggtcatttatccactggtgtttaggtagataaacactaatcacatcttatctagatgaaggctagaggtataaatgctaaatgatggggtcgtgaaatgcaactctgtcgatattgatagcatgtggatgctttatatcactgttgattcagaagtgaatgagagagaatttgatgccgttcgattgatcatagtatcgcagttgctaaaatgcatgctttaatggcaaggggctgaatggcaagagcaatgaattgggatttgtttctggagtcagtgatacacatgtcactctgctggccgaggtatccctctttctcactcttggtttcgtacacctgtcatctttctaatcagatttcactggcagccagctcccttgtcctcatgtgtttcccctaatgggcacctttattttgcctgcccatagtcacttttccaaattcttgtaacagccccttcccacgtgcttagcctgcatgcttgagtttcatggctttggggtggagaaatcgatacaggctcgccactcttctgtatcacagggatcagtttcagggagttacatgtagactaacagaatgaatcccaggatttgcttgggtgctcacagagagtctccttttgtttccattgatcttgaacttgggatggtggttgtgttttagaatgaagccctaacttggaggcagagaaaactaagtccttcttttgggttaatgttggttgctataacgaagtggcagatgataattatgtaagtagtagttcctggtaggcagacagctttcctccatgtgacaaatcaagaacccaggctccttccatcttctggttctgtcattgcctagaaccctggcatcttttgtgtctggtggtggaaaggaagaggagaaggtgtaacttaagtcccaaagtgacaggcatcacttctgctcagattctctggcaaggtccagtttcatatctaggtctggatgctggggtgggaactgggaaagagagaccccagctgagcagcaaaacctcttaacttagaaaggagaacccacttttggtagatagctagccatcatcaccatggtcctagtaggagggttttggcttctgaatcgagttgtgcctatctttgcttaggtttatccttggtcttttctgttattttattttatatcttctttttctgattaaacgtggttaatttaaattttctgtcactccaatgggggccacccgagctgatccattgtctgagccccacctctctgtattgcttcctatttccagttcactgattaaaatcaccaccccatttccgaacaacaacagtacatccaccactaccaccatcaccttagtgcaatcattttcaaaatatggcctccagaccaacagtttcagtgtcccttagtaacttgattgaaatgcatatttgcagcccctacccatgaccttctgaatcagaaactgtggctggggagtcccagcagtctgtgtctttcagtaagtcccccaggacatgctgatatgcacacacttccctaatgcttttaccataagtcctgtgtctccatataggaaaaataccctggattggaatatattttgtaaaaaaaaaaaaaaaaaaaaagggtgttgcttgttatggtcaggctagagagggtcactgataataatcacatactgattttaaaaaaagaaaaaaggatcattccctctagaatgttagtgatcagatgtacatcagtgaaacctggtagggtgctgggttgtccagatgtgagctctgagtgacttggagttaacctggctgtgcttccgtaagaagccctctcccaggtctccgagggctgtagtttatcggagatttgcaaagtgtgaaacttgaagcacactgcagtcacttgactgaatgatttggttgagaaacagtgatggtggttttgagtgtgcccacatgaccaaattgttttccacagaacttctgctgaataaaatttgaaatacgactgtcagcctgttttcctgtcttaatgaattccagacagtttgtagaatgtgggagcttccaaaacagaggggcggggtgactgcgaccagccagcctctgtttagtcgcatgttagggtgtcccgacataacagattgtccccctcattctgaatctcaccaggccatccttctctctagaggagagggcatggcaaggccagtgttatgtcaaacaagcagggcctatagggtagatctggacttcttacttaccaagaaattcaacctcttcttatttttaatccacctaaacccaagcattttgattcttttttttttttttttttgctgcatgctgatcttctccagacaaaaagccctgatgcttttttggcaaagaatcttttcttattgtaaactggttaagagctgtaaaccgtcgaagaagtctagagttctgggttcaaccttcagagtaagaaggatttttaacttaaatttcagtttgatcagctactagtttttttttcctctttgaacaagttattcctgtagcctctgtttcaacagaggactaagtggggtgagtggataatagtatgatctaagttgtaagataattgagtgaattacaaagaaatacttgacttaattccccagcccaaagcctgtgctcagtaaccaggctctcactgtgattccatctttgcccacagcaccagcagggtgcaatgcaatgaatttttgacttgaaatgaatttttactttgagacactgcactaagataaaatgactcaaaggcaatgagcaggaaaacaagagggctcacagaacagaaggggagtggggccagattatcttggttagatgatccagaaccatcattccgactcaggccaactctagccatattcttctgtagggttcttctgcctttttttgctcagtggagtcttatgttggcttgaccttgggcttctgaatctactaaccctgtgattctcaaaagtgaaaaattaaaaatgttagtctctcagtcatgtccaactctttgcgaccccatgaactttagcccaccaggctcctctgtccatgggattctctaggcaagaatactggagttgtagccatttcctgctccaggggatcttcctgactcggggatcgaaccctggtctcctgcattgcaggcagattctttcctgtctgagccaccagggattagcatgaggaactttgggagtagatgctggttgaacagtggtgaactccgggatgcctcacagggaggtatttaaagacagcacgtgctatttacgggtaagggattacttttgttgccagaacaatctttgcctttatcaacatgtttcctttcatcgtaatgataggccagcgaggtggaggaataaataatgaggtgcgctaacttaggtttcacaatgctgtgtagggcagcagccgaactccacggttgtgtccacacgggtgtctgtcattcccaactgtcacgtttcaacttggcctgtagtaagttcctgctttagcttttcacatttcacaagacagcctcgttatacagttacctttatccagtaaaagctgtaatacctcatgttctcaaatttcaatatctttgtatctttcactcttgtagaattttttctgtcctagtagcaccgcttagctattttagagactaaatatccacaccaccatgatagcttgcttttcttttctttttctccagctttattgcagtgtgattgacaaataagaattttatatatttcagttgtataacatgatgctttggtctgtttatacattgtggaacaatcaaccatggtcaaatgacacgctttgcttgagcctcacagagtttctcccccagacttgtggctaaaccaaccactgggaagcagaaagggagattagtttgaagaacctccatctttctcaggaggaaaattcccattatcttgtccacataagtggatgccttcatcagttatagtttagacttgttacctgggtaacgagggtcccggcttcattggctggctgggaaggtttggtgaggcagtgaatgcttacctgtagtaatggcgcagtggatgctggctgtacctgctgctgtacctgcattactcttgctctctgcctcctgctccacccaagtgctgctactggtgtcattgccattagaatttaggagtttacacaggaaacagagaagtggttcatttgtacaggtgctgctgacactatcattgttttgttaccattaagcacatacagtcagttttcatgtgtttgggattcttccagtgagttttcaaacctagacttgcatttggttgtcacccaacagtcttttggaccccttaccccagctgttgcgtgtgtgcagaggaatgggaattagtttgattcccaatcagtgggagacatatcctaccagaaaccagacatatattcatacaaacacatatggaattctcaaggcagcattttttagggtatttgcagcctttttgtggtattgtctggactgtttgaaatttggttctctgctcaacagtccctttcctgaattttataaacagggaaaatgacagtttctctctttccatgtaattgaaatccaccccccctgcaccacatccatactcacacccccacagaagtgaaagaggtggtgagttggatacttgagggtgagatccagtgtgtttggggaattcctgagcatagcacaggatgaagcctgagaaggatggccagaaactgcccagcctgatggatttctgagctcctcattctagtgagcgaacaggatgaattggctgtttaggctggagtggaaaatgaagacacacataactaaagggaagaggaaatgggcaaggcagtttggggagttttcagagtacatttatgtcttgggtgtctcaacagatggacgtgaagagctctaactcttcctctattttcttagagtcatggtttgggaatgatttggaagatccttgggcaaattttcctttcccatgaggtaaaatgatattcagtaaatatttattgagtctactgtggagtctagagatgatggtgaacaaagagggtccaccttaaactgttgttgcttttggcacatgcgtggctgcccagggctaacacagaagccacagcagatcatcctgggccagaggatcccttcctgtgggggaagaaaggcgtgtacttgggctcagttaccctgtgaaagaaatatgcttaagtgacatatttattaaaggagagtagtgtgtcatttggggcttctcaggtggctcagtggtaaagaatctgcctgccactgcaggagaggcaacagatgcaggtttgatccctaggtcgggaagagcccctggagaaggagatggcagcccactgcagtattcttgcctggaaaaatcccgtggacagagaagcctggcgggctacagtccatggggttgcaaggagttggatgtaactgagcaactgagaacacacacacacaatatgttatttaatccaatatatccaattattaccaagtcaaaatgtagtcaatataaatattattattttttgattgaggtgtaattgacttataacattatattagtttcaggcacacaatgtaatgattcaataattgtgtatattggaaaatgaccaacacaagaaatctagttaatatccatcactatacatagttagaaaattttttttttctaaaaatttttttattggaaaatgaccagcacaagaaatctagttaatatccatcactatacatagttacaaaattttttttttctaaaaatttttttcttgtgattagaattttttaaagatttattctcttagcaacttataaatatacaatacagtattttttggttttttttttctaatttttatttaaaatttaattaaaattgaagtatagttgatttacaatattaaattagtttcaagtatacagcattatgatttattatttttgcaggttatactccattaaaagttattataagataatggctatagttccctgtggtatgcagtatagccttgttgcttattataatacagtattattaactatagtcaccatgttgtacattccattacatgacttacttatcttacaactggaattattttctctttgactaccttcactctttttgcccacccgcacaacccctgtgtctggcaatcaacattctgttttctgtatctgaagccactccccctttttttaaggttctgtatgtaagtgagatcatagataatgtaagagatcatgtatagtgtaagtgagaaacatattttaaactgatttcactgacgacagcctttagctgtcaccttgtttgaagcccttatttaaaaaaggacgtgtattttaagaaatcaagcatcttctacctataaatgtgttgataggaaatatttattttatttctgtcagtcacctgaaagaggccccaggaaacatgtaacttgtaaattccctgggcacctacaggatagtgaatgtccaataacaatttcttgaataaagaacgaccagtataaatgggcttccctggtggctcagatagtaaagaatctacgtgcaatataggagatccaggtttgatccctgggtcggcaagatcccctggagaagggagtggcagtccactccagaacatagccaaaaagaaaaaaaaaaaagattgattcattaacagaggaacctgacacgctatagtctgtggggttgcaagggtccaacatgacttagtgactaaaccatagcattgaactaagggctaacagagtcatgtctgaaacgagattatctaatacctgtgctttctccgtaagatacctcagtcttctcattctcagcaccactagaggacagctcggcactagcaggggcttccctggtggttcagacggtaaagaatctgcctgcagtgtgggagaccggggttcaatccctaggttgggaagatcccatggaataggaaatggaaaccccctccagtattcctgcctggaaaaatcccaggacagaggaacctggtgggcaacagtccatagggtcacaagagttagacacaactgagggactaaaccaccacgagacttgggggttgttggtaaagttaccaacagaaaacaaaagaatgcaaatagcatagtgctaaatgaaccccacccccaccccaagacacttgtgaaaactgaaacgaggaggccgagtgttgccttgtttgacctcagttggaaatgcatgtgtgcgtgactcagatttctcacttctctgtccacagatgactgtaaaaatactgcaaatattaattttggggttacaagtaagttttagtgagtcggtaaatttgcaaatagggaatccgtgaatgatgaggagtggttgtattaaaaaacttctctagtggttctttctctgatctaaaaagcatctcactggggaacatatttttaaacaatgtctgctctgaaattgttgtggactaaacttgaagccacaataatgaaacttttccaagcatctgatcttctctttttatgagtttatttatcaataaaaatggtttatcacttccagatctttaaagttgggtggggctgttcagatatatattttgatatcattttttttgatataatttctgttgttctttagaagatgaagagtgagaatatggaccagggaaaagagtacagaacaatggtggcgaccactgctacagaatccagcagaagacaataagatggcttagaaattctgcaggcagtttttgaagttaccaagctcagtttagtcatggcctagaagataaaggtgatgcttttgacttcccagtgtattgaaaattagcatattttaattataagcacagtcactattataaacattaattgagtgcttgttgagaatgcttggaattcttttaagaagggggaaagaaaagaattgttttcagtaggtccagtagtttcgagtggcacagcagatagatcatacagtttaataacaaagaaacacaaacaaaaacaataatagcagtagcacctagcattttcaaagtccttactacagactgtgtcttgtgtcagtgctgtaatctcatctgcattttggagactgaaacccactggggttaaagtaatgaaaattatagacaatagagttaaagtattgaacgttgccatctttttctgcgttccatctgtaccttttgcacttttataatgtatccttgtgtattataaaaagaatggcttccttattaatagtttgtgtgtgtgtgtgtgtgtgtgtgtgtgtctccctttgtctctctgtcttagtcctgggataaggaagttacctctgtaatttttttttgtatttttcatgtattagaaaagtaagaagccgaactagctcagatctagctcagatctagtttacgtacaagtttattgagacatctactagctccatttccaatgctttgtataatttaattctgtgaggtaagtgtatgtgtgtttagttgctcagtcgtgtctcactctttgtgaccctatagactgtagcccactaggctcctctgtccatggaattctccaggcaagaatattggagtgagttgccattcccttctccagaggatcttcccaacccagggatcaaacccaggtctcctgcattgcaggcagattctttaccgtctgaaccaccaagggaagccccataagataggtaggatcccattttatagataaacttaggcttggccattgtaagtcacttgcctgaagtcgttcaaataagggcagaaccaagacttaaactggaggactgtttgacttcaaagcttccccccttatctgccctgctacagtagttgctgttcagtggctatgtcctgcctgactctttgcaaccctacagactgcagcacaccaggtttccctatccttcactaactcccagagtttgctcaaactcatgtctgttgaactggtgatgccatccaagtgtctgttgtccccttctcctcctgccatcagtctttcccaacatcagtgtcttttccaataggtcagctctgctcaccctgctgcagtggttactgtgtatattgaggcatggaagggaaggctggataggaagagatcaggggcaacaactcatgttgactttggaagagaaacaggactaggtgtctgatgaagtaaagagagactctgggtgtggttgaacatcttaatccaagataaatagatctgtttattaaaggtgctcaccgaatgcttggctgccttgtcctttgttttcaaagctgtttctgatgattgaaaagaggtaggctgtgaaggcttcaagaaaggtagcaaaagatgggatggtgtgaacgtagtcattcacagggctgtggtgtgtaagttgtaaatttttatcattcccactaaagatcttctttgaatgaccttagctggtgacaggaaaaagtcttgtcttcatgcctatccttgtggtctcccactgaacacatatagttcctaacatcttggtattttctgtttgtctctctctctcttttccccctctaacttgacttgttaattgcttttcgtgtatgtctttatgaagttgtagccagtctattatgttctggagtgtttatctttgaatgccaaaggtcttgaaacatcgtaagattgtgtaatgaacataacttctgccttgacatgtgggtgttaagaacattagtcattgcaaagtattgagttaaatattttcaataaaaggatataacgatctaatagagaggaagaagttataaaaattctaattgatggctttaacgatgaaccatatacacagtgggttccagcagcaatgggttagagattctcagaatgaatgtaaaggcatttttactttttattagtgggagaggagaaaggccaacaataaaaggaaaaagcacttaattctcatgtatactaagaaaaatgaaaaccatttgagttttcagcgcttctgctcctgatttagtacctcacatgtatctttaactgccataaaaagtgttggagatttccatgagatgttatcaataaggacttctgggctgcgtcttgtcaggaagcccttattcttgcaatgatctgttttctggagagtgtcaggtcatccattgcaacaccatcagagagccagggttttcctgagcaaatgagctaggtaggtctttccttgttgagttaattttatgaagagttttggtcaacattagtcattatgaaactatgtgcctgctaccctggtttatctctgtagacatctctccatggcagaagatggaatccttgtctcttcatgtctctgagcatcagaagatgttagagttatatttgtctgtttcttgctagagagtgttgagtgggtactggtcttctctgaactaaacagggaacattgtttagttgagtgtttggttatcagcactctcttatttgggatcgagtggtttaaattggagacactgtgtgctacctgtcctttgccttgccagaaatattcagtcattctggtaaaaaacttctaagctaaataccttttctttcctagagaagttacatccaagaccttgttttaatttcaaaatagagagcgtaaattatgtctgtggctgctgttaaaagtttctcaacagactggctgtcctcaaagggtgtccgagtcaactatagcacttaggggaaaaatgttcatctccaatgtgatatcatttacaagtcgataattgtcttcaagatcaatatatgatattttgggtgttggagagtgtgtggaagggaaatctcacatctgtggtaatatttctggaaggattattgatctctggtcctcctatatgtgatactcaatttatttgctgtcattattcattgaatgtgtagataaggaggttgttttgaatgggagccaagcaacctgttgatgtaaagtctttttttaccttttatgattcccattgttagcacctctctccttgctggctggattccctgtcattttaagtaggcagcaattactggtttgttcaagaagttggctcctgctgccaacgatcctattaattatcacttcatctctcatttagtcttcttagtgttgagagagggtgcatgtaagcgtgtggccaagcagctacagtcacatctccgtaatcgtctcctttttgctacagttcagcagactcaatgttcagccaaagggctgaggcggccctggtgagtcttttcaactcttctgtaggttgttcggtcagttaaaacctcttggttggcatttgtgtggggagttcagacctgttccggatccatctgtgaactcagatgggacactgtgaaaatactgggatgattttctcagaagctgttttctctctctggggaaaaggcgaccatggaattgactctttgtcagtcttcaaagaaggtaatgtaaataataaccaaagtgacttagtttttacaagttcatgtcgttcatgaatgtttttttgaaaagtgacactctttgcgtgatgttgaatctttggttcttgtcactcatgaatagttaaattactttctgtttgtttccagaaatgtttactttacttgtttcagtgacttttttttttcagatattccactggatcctttgattagatttggagtgcttatgcttccttttccactttttctgttatttttggcagtgatggtgtttgaagctgttgaagtgattcactgcaaagtgaattaattttccacatcttcagatgtgttttccagttgcccccaagtttctttcccgccaccctctcatatgattccccatccgcagttctgtcattcttgctggatccattataaatgctgatgtcactgaatttcttaaattacagctggtggggattaacagaaattgtaagcgaataccacttcctcattttgctattttcttaactaattattgtcctttcaagttctgtaggaagctggggatttggaagtaagttctctgtcttgatgttaaaatagcacttttctgttattgttatttttcaaagatagtttgatttttaggatgctccctacctaatgtactctttcttaatctcagatagactttccccatttaggattttgcacatcgagttgtcttctatcctgggtaaagggttttgaatacttcccttaagtttccttatatagaatatttttactcaacagtccttcaccatctacagactgttaatggtactaggtgaagggttgtgattcattgattttttttttttttcctccagagtcttttgtcctttaaggaattcctgcctctgtccgcattgttttcttatttagaatctgaatgttcttggtgagcattcttggttgctctgtaccttcaaagatgaatttttctggctttgcagtacctgttctagcatttggagcctggagtccagaatgtcttgtcactctgtggcttgattgagggctccctgaaccttgtctaggagtctttgggacgggactttggaggccacctggatgtgtttgtaaatggtgctggagctctccaggtggcaatattgatcgaattgcagtccatggaaacagaaatagaaagggttcagcatttgcactttcctctggtggtgtttttgcttattttgtgtatttagaaaaggcagccgtatgcaaactgctgacttactattttccctggaatggaaaccatttggattatttcaatgagttttagctaagatttgtttgttcatagtagtagttttgatttctgatgtcctttctataataagacccaaatgtgtctttttactctatggaaataacgtgttccttggagccttgggattttgcaaaccatgaatttgaaaaatcatgtgtttctttcatagtcaaaatggaaactctttagtgaaaattatacgtagataatacttctttttgggtcagttactttttttgaagaaaaaagaaaatttttggctgaattatttaagatttcagagcagtcctttttcctgcttaactttcccactaattatttttttttctcatttttaaagagaaaaagattaaactgagaaattgcagacccaaagcacatttactccactatctgatgtaagatggtgactggtttttttgttgtctttgatgatacagtggatttagtttaacttttagtggtaagatttggactaggtttaaaaatagaacttccttactgtaagaactattatgcactggtttgagttcctgagtattaagataattgtttaacctctggaaaacatgaattatagggtctctgtaagcttaactaacacttccttctaacattgtgataagttctttgatgataagattcgggaatgatatagctatctgaaaaatatttcaaatatcactgtggggttgttggttaaatatgagcttttaaaagtttggataaatagaataaagagaaagaaagaatagttataatatgggtgaaatatttggaattaggtttttgtttttttttttcggtgcacagcatgtgggaccttaattcctcaaccagggattgaacctgcacctcctgtgttgaaagtgtggagtcttaaacactggactgccaggaaagtacctggagttaggtattttttttaaaaaagagtttttaaattatcagggcaatgtcactacatataatgggagttttctagtggggaggtagaagttgaaaacattatgaagtggtaggaggagtcacagattaggcgtcaaggaaactgaatttcactaggttgatgactgtgaatatttttgttcatcattttatctcagcagatggcaccattcagaacctaacagtcgctcaataaatgttgactgaatgcctgtattaggaggcctggttccaggcccagctgtgccattcattaatcacgtgaccctcagctaaccattcatgaggagccatggcagatattctgcctactggtgcaggagacacaagagacgtgggtttgatccctgagtcaagaagatcccctggagtaggaaatggcattccactccagtattcttgcctgggaaatcccatggacagaggagcctggtgggctgcagtccatggagtgtgcaaagaatcagacacaacagagtgaccacaatacacacacacacacacacacacacacacacacacatagagtctcctcttatgtttaatcaaggggaaggtctggacaatggtggctgtgtggtgctctgttgattccttcccccaactgcacctcagtagatgttacttatagtcacctctctttgttccatgaacctagaaggagccttgggcccttctgagttcattgctctaggtttccatgtctcactgtggacactagaggcaaaacttatttgctctcccagaagtatcttctgtctgaggtcccttactgtggctccttgatttggagttccttggtttgtttttgatacctcaatcccaagtacaagtaggcaacattctgtgaagtttcttggtcagcaggtgttcacttaaacaatgaaaacaacagtagcacacaccattgtccttcctttcaataactgttctggtagatttagcagataaatatagaacttaatgaatgagtctggacaatattcttccagtggaataagagatcaagaaatgattagcttaacagagttttccacgtttgttttctacaacccatttatcctttgaggaagggtttgttcagtaccgactgccttccaggcactgtgctagggttacaatggccagtccataagacatgggttctgccttcttgtaactcaccaaggtgaatgtgatgttaggtgtgtaattacagctttagggacaaaagatggaggggtcagttcctctgaggggagaagggaagagtgaaatctcatagaagaaaggaagtttaagtttgttatcgaaagatgatggctgagcaaatgagaggagagccttctagacaggacacttggaaatacagcccagcattttgccttttggacgtcgtaaacttttgagtgtggctggagcactagggagcatgggtggatttaagcagacggagagcactgtggctgccagatgaagagtaggctggagggtggccaaggtctggtgtcacggaggccagttaggatggttccagcttaatagcctttgtgagaaatggtgatgctcacacaccatttaactctgaagggaggtcatgactgtgagaggatacataccttggtcacagattttaagggcaatgaggacagaagtaagatttgtgtgtacactgtttactggtggcaacagtgactgctcattcattcatttatccatcacatcactgggtgcctgttttgtaccatatacccgggaagcaccatagcggataaagtagacatggtgtctgccctcaaaaagtcgatattctcatggaagacacagtctagtattcagatggttatagattattatgtatttataagttaagtgagaaaaattctgtgtcagttctttccatagacaccctctccttttcttgcagcccactcatattctgatcaacatgttttctgttccctatcggagaaggcaatggcagcccactctagtactcttgcctggaaaatcccatgggcggaggagcctggtagactgcagtccatggggtttcgaagagtcggacacgactgagcgacttcactttcacttttcacttttatgcactggagaaggaaatggcaacccactccagtgttcttgcctggagaatcccagggacgggggagcctggtaggctgacgtctatgcggtcgcacagagtcggatacgactgaagcgacttagcagcagcagcataggaacttttgagggtaaagttagataaacattgtattatatataccttgtatctcacatgcttacacacacacacacacacacactcacacactccctctctctttctctgattaaagacatctgtcttcattccagaggcagacaaacacttcaaataaggcatatgagagttcccatagtcagtctgctacaggtaaagttctggatacgttctgatattttctgaactctaatgttttacatacagtaatcctgtttgtttagttccagatccaagcagaaaagtctttgctcttgtgatctctccacacataactggatcttgaagctggctctggtggctgcttcatgtctgtgttccaggttatagcctgtgtttgggattcatgtacaggaggaagaatttgcctctaggcagcaagactagttgacatcagataagtggcttctttaaaagagatgttttggtacagaaatgacagtaacaacaaattcttctccaattagaactcttctctacattctccatctaactcaggataatgtttaagattataaggagtcaaaattcagctggatgggtctgataagaattccgaggaggccattctgggtttaagcactcactgttctttgaagatgaagcattctgacatgacagtggtaattgcaactggttttaagtggcaaagggattttctccattttgcatgagttggagaggtcgtgttttattagggctaagactgaatacagacgctgcgagcttcaaatcccagccacactgatgagcagctgtgtgagtttgggcaaaatgctaagattcttggtttcttcacctgtaaaatgtggcagctgttaagcaggtaagacctttcattaaacctgtctgtatttggactctatgtctactagtctgtgacactgagcaacttgtttaccctgtatcttgctttcattaatagtcataatagtaatagttactaactcttgaggaaggagtaagaattaaatgagataaggatttggcatagtacccaacacatagtactcagtataacttacttgttatttttcctgcatcgttatctcaagtgttctgaaatgttctgtaatgctatttgatgactaactgtattctttctgaaaattaagccatcaccaaacacattcattgctctgtgatttcttctttctttctctctctctttttttttaaatttaaaaaaaaatacagtttctgagtttggagtaggattgccagataaaataatggatgtccaggtaaatttgaattttgcacaaagaataatttttagtataaactttctgccaatatttcatgggatgcttatactaaaaaattattatttgatcacgaaatttacatttaactggacactctatatttttatctgtgagatcttgcaacccgagttttggggtaataccccttttatgctgtcatcctttttttaaattttaactcactgaaaagtatatgaatgcttatgcaaacatagtgagtttactcacttggaacatgagtttagaactagttacgcaaatttgatgggacatttcctgtctgtagtaaactctctcctcctaattctttaacagtagtgggaccatcacattgagattatggtgactcctgagtagtatgtagtgaggagttgcttgaaaattctgaagtgctgttgtgtcatttctccccagagggaactgggtcttaatcatgacacgctaatggggaggtgtgaattccagagaatcctgaagacctcatcattgaaggaaattacctcattagtcttagagttgccgacctagggatgatcgtacccaatggctggctggcttttacaaaataggaaaataaacacatggggtggttgggttaataacttagagtgatttcattatacttaaaactgaagttaatttttaagtaggtttggttcttaagctattagactagttggagatgttgagaaaattaaatccaagactaagatactttccgttcaaccagcgtttatttatagtatctcttggttgtcaagcaactgcataggggtagagaggaattgaaaaagttcccccagatccttagtgttgagtggagcagtaaccattatgacacaagacagaataaataaagccagggtctgggctagtaacgccagatctcagatggttgaatgtaagcagtgattaaatctgaaaagcaaatggagtaggaatggatcctactgtattaagaagggcttcttggagggtcatactggagagaacttttcaaagatgagaatgatttcatttgggaaatgaagtgttctaggtgtagtcttagcatgcagcatgaaggcagccgcattttgaaaagaatgtgttatttagacctgacaaaaatatacctagcacctcttctcttttgtgagactgtttatggtctagaagttccagatcaggaacttgacttcatgtaggaggagctggacacagtccatgagggtttcctaaatatttttttgtgcacctgctgttgctgtgagtgaggtgacctgagagacccgggcagcgcttagcgactcttgtgagtcacttcaaacgcactgcaagtcactccagttaaatgtgggtttttcctgacaggaacatttccagcgatatctctggtttcaattgggcaaaaccaacagcagaagaattcaatgagaagctttttgtgaggccctctgacttgggggaatatttgcttatgtgactttggaggccagcttaactcatctcctgttgggatgacatttgtttactagacttggccatagtcagagttaatagccttaatggttttgaatggtcccaaatggttctccagcagtgcaccattagcaagtggggaggtttatacagatggcatgttataaacacacacctgcttcagcgtttgtgggtttaagagaagagctatccccatcttagatttaactatggaaatatggggaactggaaagtaagagttaccatttaagtaaatgctaggatctttttcaacagttcttttctcacaattttgctttttttttttttctttctctgaaatgattctgtatgaaattaatgctattaaaaaatggccctccctcatttggtgattatagagatcacccctgattctccaggaaattaattaaagcataacaggggattcacattggtaaacagatcttaaaaaggcatatcatgaagagcattggattgggtagcttgtccagtgcacaggagggcccactgagactgggaatggaaaactttagttttcagttatctatttgttgggctctctagaaattagcaaggtgtttagtgatccctgggatttcatgtttgcgaattagggttagcctgtgtctttcaagttcagacaggtagttcttggtggatgtttttgctatttcaggttctagtgggtaaaatacagcctggatgcaaacctttgttggattcttaaacatgaaagaccataaactgcttatgttcgcttgagtctgtctgaatgttgtcattgttgctcctttcttgatgagtgggccaaatactatgcagttttaatatctcaccttgattcctattgccttgtttttggctgttcttagtatcttcctttatatatctgtcattaagttataattgaagcttgatgttttatatttagaatgatgcatggaggttcagctgtgccagccatttaggcttcatggcaaatgttggttcatgccagaaagtttttgaaatctggtctcttttttgggatatccaatctgagcaaaccatccccttctacttaagctgaggggcacagggaagcaattcaaaggtgatttcagcatctctccatgtaagaacgtcttgttgctgataaaaattctggcttgttagttgcctttctaaccaggagtcatgcagcctcacagggacttgctctgacaagtctttgtgtcacttcgttcgtttaccgtccttcacccacagtatcagcggatgccagttctggagtgggcacatagtgatggtagatgacacccaggccacaggctgttgcccaggggctgccagaccctgtgaggcatttcacagctcttgaattctctgaatttgagcttcttttgaactccatccatcaatccatataaccagttattcaacatatgtttatgaggtttttactgtgtgccaggcactcatctaggtttgaagaacagagcagtgagccaaattgttgaaaatccttgtattcaaggagcttacatgtcagggaggggagagctgtagaaacaaatacataagtaagtaaaagacaaatgttaaatggcaatgcatgctatagagaagatacagcatgggtgggtttggggtgacttgtaatttagcattgtgtgggcaaggaaaggcctcactgagaaatggcattggaggaaagatctgaaggagatgagagagtggatcatgccagtatctgggggggaaagctcagcagacagagggaaggattaggacataggccctgggtaagagggtgcctgattccaggacagcatgactgtcatcttggctgagactggctgagcaaaggggtaagtggtagaaatggcactagaagaaatgagatccaaatggaggaagaccctgtagacatttgtacacactttgccacttaactcatgaaaaatggagggcctttgccaattccagctagaggagtaacatgatatgatttcattgaagtggcagcccagtgtgctagggaaaacaatgatctaagaactcagagatcatttaagtcatggttttgtcaccaggtaggggcattttcgttcagcattctgagcttaaaatttttttttctctccttatgaaaacaaggctggtggagtagataattgcaaatgaccttcctgggtggtttgatacagcttctctacgttcatcaattttctccccctccccatcatcttaatgtgtttgagtatttcctgtttgtggctgattacatttctgtatatgcagagcaggacctcagacatatgaagtctgatgctaccttttattcaattgtttgtaatttttctataaacatctcacacactgaaaaccttgcaaactatgaagcagttttatttattgatgttaaagatggcttgcagacttcttagcctgaattaacacgggttataacactttatcatatagccttaatactagtttttggttacacagcatagagctgatttattaatacctcactgttacagtgacctatcgattgaagtagagtgattaaccggagacagtttctgtgctcactgagttgaggaggaggagacaggtctggttaagaaagtaccgtgcaaggcggtgtacatgaaagagggcaggaagtcatggtcagcctggggcccgtgggagtcctctgcagacttaccaggtgaactttcagactagtattctttcagtttgtttgcaccatccagttagactttgtgctatgcaaggtgggaggtgccagaggccggcagcctctcttctacagccccaagcaacttgtctctgccccaaacttgcatcacactgtttaagagtttcaaggtcttacagttaaccccctttaggaggcaatataggaaccatcttttatgactggagaatgtccttggggcatctcaacctcctcctttctaccagaatatctcttccacttcttttgatgttttagcatcttacatagacaggtggccctgcgaggtgcatggctggtcagttgctctgtctcccttatggggaaatattgccccagccttggcttatctcaggcctcccatttgaactctttgtcaagagtcagttggagccccaggcatttttacctactgacacaatgtattcctggtgttctattaattggctttgtcttggacagtctagggatattgtaagtttccaggttgaggattctggatgcaacttcccaggaggtagcagggccgctgcttggccagagcagtccttccattgagtctccttgtgcgtttttgggagtgggttgctggaggcgcttctgccgccaggagttagcatagttaccagtgccaggactctgagaagaatgaggccatctctttagcaactaagctgtccctatggtggtgcttaggaggccgctgactgtgccagtgaatgctgttggagcgactgaggcccagaaaggtgaaacaactttgccaggttagtggctgagctggaactagagccaggaggtcttgactcccacggcactgcttccttttcatcttttctacctggtgtctttgcacgtattctttctgccatcttgaacactttctgagcactcctttgcctattgtctgctccactgttcagtctcaattcaaaggttgcttcctgagccacttccttgccccctcatctgaattagcttgctgtgttattcttttatggcttcctgatcttttccttcatagtagttacttacatactcaattacttacataatgatactatattcatccatgtcttcaatgtcttgtcttcccaatccatgaagtcagtgagtgtggctcttttgttcatcactgtgttcccagagattagcccatgaatagacattgtataaatatttgttgattaaatgagtccataaatgaaagaatgattaaaaggcagactgcattttctcttgtctattcatattaaatgtctgtgcctatcctggctaagggtaacaactgttattgactttgtatattgttgaggatgctgaggatgtgatttttgtctccagatgagtctgtggccttgtggaattttattaaagttgtctctgcaaaaaccaaaaacccagtgacacacacaaatcagctttctttaatttgtgtgggcctgacatgttaggccatgatttatcagtttattttgctgtagttgcattttttattacttaattctgtttccagaaatgaggtttaattttttttttagatactgctcctttctttattaaaaatgaataatgaaacaatcgctttttcttaataagattcataatgtatttttggagagatttgtttgggtttaaatgatggaacttttaagtggataggaatggaacaccagaggtactttctgtagaagaaggagtaaagtttcaaactgtacaaaaaaaaaaggcaacaacagtagactttctctgtttttaaaaccaaattattcctagtgttcatatcgaaaagatggtcttttcccaagctaggttgtgtgtgtaatttatagagaaagcatgcattgttctgaagtatggactatggttgtacaggctcctggtagattagctcaaaggtacctgtgaatagtcacgccctagactatacgaactgaatagtttttctaacagaggcggaaagtctgatgcatactgtttcccagccattcatgcctcaggaaaggaactggggaggtggggagcgaaacccagcctttgccctttgtatcctccaatgtggcacttggctccatgaccctggacagctgagttaacttctctgagccacagaacctccatctgaaaaggggataaaaataccacttacttcagaattatttgaggatttcatgagatcatatatggaaagtttcacaatgcctagcacgtgataaatgccctggagatgtcattacttgggggatagtacagcggacatggtgatggtttaaaggtttatacctgggaggtcctggcctgggtgtgaatcccgaatctctgcagcttatcctctggaccattttgacctaataacttgcctttcatgtcaaagtttcctcatacgtagaatgagaatataataatacctgctatttcgggtttgttgtgaagatgaactgtttgtcagctcctgctacatgataaatgctatgtggatgtttgcatttgtgatcaagaaatctggcttctgctgacggatggtctaggattataagtaaggttccattgtgtaccagatatgcgactgtgaagaaattactaacttctctgagcctctgtttcctctttttttttgtagtatatggatgattctaattgcagtgccaagttttgttagagatcagagataatgtatattcgtagtgcttagcatagggcctggaccatgggagttcagttcagttcagttggtcagtcgtgtccgactctttgcgaccccatgaattgcagcacgccaggcctccctgtccatcaccacctcccggagtttactcaaactcacgtccattgagttggtgattccatacaaccatctcatcctctgtagtccccttctcctcccaccttcagtctttcccagcatccaggtcttttcagatgagtcagttcttctcatcaggtggctgaagtattggcgtttcagcttcaacatcagtctttccagtgaatattcaggactctctttaggattgattggttggatctccttgcagcccaagggattctcaagagtctcttccaataccacagttcaaaagcatcagttcttcagtgctcagctttctttatagtccaactctcacatcagtacatgactactggaaaaaccatagctttgactagacagacctttgttggcaaggtaatgtctcagctttttaatatgttgtctaggttggtcataacttttcttccaaggagtaagcgtcttttaatttaatggctgcagtcaccatctgcagtgattttggagcccctcataaataaagtctctcactgcttccattgtttcttcatctgtttgccatgaagtgatggtatctgatgccatgatcttagttttctgaatgttgagttttaagtcaactttttcactttcctcttccatttttatcaaaagtctctttagttcttccctttctgccataagggtggtggcatctgcatatctgaggttattgatatttctcccggcaatcttgattccagcttgtgcttcctccagcctagcatttctcataatgtactctacatataagttaaataagcagggtgacaatatacagccttgacgtactcctttcccgattaggaaccagtctgttgttccatgtccagttctaactgttgcttcctgacctgcatacaaatttctcaggaggtgggtcaagtggtctggtattcccatctctttaagaattttccagtttgttttgatctacatagtcactcttgagagtcccttgggctgcaaggagatccaaccagtccatcctgaaggagaccagtcctgggtgttcattggaaggactgatgttgaagctgaaactccaatactttggtcacatgatgtgaagagctgactcgtttgaaaagaccctgatgctgggaaagattgagggcaggaggagaaggggacgacagaggatgagatggttggatggcatcaccaactaaatggacatgggtttgggtggactctggcagttggtgatggacagggaggcctggcgtgctgcggttcatggggtcgcaaagagtcggacatgactgagcgactgaacaactgaagtgaacatagtcaaaggcttaggcatagtcaataaagcagaattagatgtttttctgggaaaaaaaaaaaaaggcaaaatcgttgtctgaggaggccttacaaatagctatgaaaagaagagaggtgaaaggcaaaggagaaaaggaccatgggaaatactcagtaaatgagaggcacagcaaagatttttgttatcattgttatcactgtcacttgattgtttccattaaaaagtttttatggctaatatgtttctgtcttatataaaatgtttattctaaagtgaattccacaaaccctctatggaaatcaacgtgattaatatgtggaaaatgacgttgaggtctcttgttgatatatttctataaatggagctgtttcagcaaattgaaaatactcagtaaaagcctcgtaatttcgtgtttacaattttctgggtcacgaagggtcaaagttagtcagggtcaatgttaggtggacagttttatattcatggaaaatgactcacaggaaacattaggaactaaaatttccgtaataaaaaaacaaaaaagccatctcttaaaccatgtttaaattgagtctgtgtctatttcatatcctaactggcattgtgttcataaagttttgacattgtttgaatttctgttgttaaatctcattgagggctgataatcatacattgtaacacacgtcaccggaaataattaagtactgattccagtgctggtaacattttccacttgagtcatctgggtcactgtgtctacagtatccatatttacacctttgtgttgttttgcaatagatctttaagttcaacttcctttttttaaaaagaaataaaaccttaaaaggtagggaagcaacaacgtcatttgtaatccagaactataaatgggctttgagaaaagcagggtgttttcttatgtttgacctgggagtgcctggtgtttcagtggaaggtgagaacttgcagtgagcagtcagatgtggggagaaatgcagatggttgtacctaggttgtagatcctctcaagtcaaagtatggaggtgctaatagaattcctagattctggaaggatgagtaaagctattcaatcagaaatatgtgggagaacgtcttccagatgtgtgcggatatctgctgagagtgttagttggtttgaaggatgcaacctggagagaaagttaatttgagttcagtgtcaatggaggatcttttaagccataattaggagggtggtctttattcagtggccagtgaggaggcttgaaaaagttttattttattttattttatttttttggaaaaattttaaataggagccaaaggatcctgtttgtgtttctgaaaaggctctgtggcagggccatagagaatggattgcagaaggtggtgacaaagaggaccaactgaggagttgtgtacgttggagatgatacagtccaggactagcgtggcggttgtagagatggttggggctgagacacactggggttgaagaagcacagccctgggtgatcagttggacataaagtggagagagtgaggaggaaaagatggcttttagatttctcacatgggcaggtgggtagaacactagtgctgtttacagagatgaagctcttggaagagaaagagtttggggagagtggatattcttctttgtgcatggggtatgagatagaatagctgacacttgagagagcacggagacaggcatgattctagggatagagtcggtatttcagacaggtttacattctcatgcatgaaacgcaatcgccagctaacagtcacctaaacagactgggatccatttgtctcccgtacaagaaacccaggcctctgtgacccctgccattctttcagtaattccgtgatgccaggaccatccttgtagtgatttatcttggcttttcttctgttgcttttcatctggtgactgcaagatggctgcttctcctctgggcattcagaatgaatgccagagtgctcagttctgtcctactcttgtgaccctgtggactgtaccctgccaggctcctttgtctatgggattgtccaggcaagaatactggagtgggttgccatttcctcctccaagggatcttcccaacccggggatcaaactggggtctcctgcattagcaggcggattctttaccactcagccacctgggaatcccctggtggtttatgggcaagttcaagtgccaggaattatattttgtttggatgcttcttgtctttcttgcccatctgtacagtattaaattgcctacatcattagagtctgcaatagagtcatcgttttaaaaatcctggttatttttgactaaacagtttagtggtcaggtaggaaagatgagatgccctatttaactacagtatccctagtcaaatatgtacatagacacactcagagaagcccaccgtttcctattaacatgtagattatgaagtgtgtttcagctttaactatatttttgtttgttaccttcaaacacatataactctgaattgtctttaaaacataataaacataccttttccttatctgattaaaattcttaacctgtggaagacttttgttctcagatttattccatatcttcctaattccttaaagctctctctcagtggacccctttgggattagagacaatgaggaaaattctgtttggtattcacttactgatatgcattgcatgtaaaagcagggagtgtgtgatggaaaatgtcatcccctttactatgacttttgtatctgtgaaggatataattattctgtgtttaaaactagagaggaaatgtttgttcactcttcctgaaggtaaggttattgagggtatcataagatgcaaatatttgtcctctattctcttccagtttaactcaagagagtctccccatctaatatatgcagaattctcctagtgactgctttagctcagagtggttctgagaataaggaagttttctgtccctgaagtagggcagaaggtgcatagattttggaaaaaggcttctcaggcttaccacgatgccatgtgatgttgagaatagaatttaacctctctgaactgatagatgctatgaaatttgggatgagagcaggagatagttgtatggtccctaccacataagtatagaaaaaacagctgcaacaagaatggccgggtacactgaagatgcaagtaatatctagtggagagtaggataaggaaactgggagactgctgggagactttaagaaggccttttggaggagaggactggaagctcatgtatttaataggagaatgcagagggattacaggatggtggaggatggccccaggctgagcacatagacatggtgtgcagcgtgtgtttgatgctttcagagactttctgttttcaatgatggacaaattgagaagagccttggaagtctcgctgagtttggactttgctttctaggtgatggggaacaaccacagacacttgaaaaattcatacaagtttaattttgatagaagtggattttgtgggtcaaagaatctgtgcatttaagatgtccatagattttaaaaattaaatattttgagatcgtggtagattcctaaaatgtgtggttttaagaaataacacccagagatcctgggtacttgcccagttttccccagtggtaccatccaatacaatatcacagccagaaatccactgaagacttttgagaacagtccacaatatgcctgaatctgtgttttaaatgggtgatcatggtagtgatggcctggaatggattggaggtacaacgtggagactaggagatcctttggaggttaatgatctaaaagaggacctgaagaccatggtgataggattggatgggaagggacacctgaagtagtaataataggatttggcagtcatgtggggttgataagagcatttgatgccttgtgcaattgctcagcaagtaggtattgaggactaattgtgtaccagtctctgctaaacatcgggttgaaaggtgagctgacaagagaacaggcactgtgactgaggggaggtgggctggtgaagctgtgttgcttgggacaggacagtgagcactttgcagagggggtaaccgccactctgcttctcctggttatgaccatgtgggaatgtaggtccattgtgattgataattctggtttctcataagctagaaatctagatttttatatgagatctcccaatttttaaatattacctagtacaacttggaaaaaaaaaatagcattcacctgtgggcttgattgacttcattattgccagttcctagcctctctttctcagtgggatgtttagagcttatgtcaggaatgtctagggtttatttcagttatccactgctgtgtaacaaaatcacccctgtgtgttagtaactctttgggaccccatggactgtagcatgccaggctttcctatcccccactatctcccagagtttgctcaaactcatgtccattgagtcagtgatgctcaaccatctcatcctctgctgcctccttcttctcctcctctcagtctttttcagcatcagagtcttttccactaagttggctcctcacgtcagatggccaaactattggagcttaaacatcagcatcagtccttccagtgattattcagggttgatttcctttaagattgactagtttgatctccttgcagtccaaggggctttcaagagtcttctccaacaccacagttcaaaagcatcaattctttggcacttagcctttatggtccaactctcatatctgtacatgactactggaaagatgatagatttgactatacaaatgtagtagtttaaaactatggctgttttatctctcacacttctaaggggtgactgggcttacctggctaatttttctgctggtcttgcttggggtccctcatagaggtactgtttagttgtagacatatgatggtcagggctggagcaatctggagatctgtcttgggccctgatacatttggaattttgtcttcctgcctgtagtttcacagcctctggtagcctttccctgtggaaaggtaactggatttcttacgtggtgactcagaagatcttcagagtaaacgttccagaattgaaaggaagctaacagtctcaccgaaattaggtccaggattgccaaagcatcactctttttcttagttaatgcaagtctcaggccagcccaggttttttgtgggaggaaactacacaggagcatgaacactcaggcctgtttgttcactgactacggtttttagagactacctacaactgaagtctcaatacccagatactggagattgtgttgatcaagataagttggcagatcagggcaaattctcctgcttgccagcccctattcctctgaagtttttgagaatttcctgatactaagtttcttttatggtatcggtgattctggagaaatttacttttcagtatgacatactttggaaccataactcatttgtagttatttgctttctagccctttaaaaatactgctactactaagtgatgagacagactgattctggttttggttgagcatgtgcttttcagatatgcaaccagtttattaattaatgttgattttctgatcatgtatccttttaggaaggaggccctcaaataaagtccattgaataagaatcccaagtctttactgtccaccagtagggacagctgtccattattatgacacttctgagtattcctggaagcagcaatacaatttgcaggacctaatacaaaatgaaaatgtgagacccctggttttaaaagtaagaattttaagatggtgacagcagatcatgaaactaagcccaggcccaatgcactgcgtacctgtgcaccaggctggccttgtgtagccccttgaacatgtgtgcaaatgttgcattaaagtatgttttcccagaagagaaccattgactctaatcaaattctcatttgattttgacacgcagaaaagttttagaagcactgcttagacaaatcagaaaaagtggaagctttgtgtctgaacagccctctgctcccaagcaggcactataccttttggccacagcagccggtcttggctgacgttaggctgaacattctgccacgcagattcctgaattccagggacaccagcgtcgtggggatggtctatgtggctgagcgtttcacaggttgtctccctttttactgaactctatttctgaagcatacaaaatagattacctgtgcaagcgatgggcatttacattcctttgaaacagatattagccccgtttgttaggctggggatttggggatcaagatttctgggaggcagccggtggactccagataaggctgccgcattgcccaacttcatagggtttatgcctttatgagagctgccgaaacacggtgccatggactgagtggcttgaaccagagaaatgtgttgtctcagttctggaggctggaaatctggagttgaggtgtcagcagggctgtgctctccccgaacgctccagggagggatctgttcccggcccctctcctgtcttccggtggctccttagcttgtggtgacataattgcagtcttcacctggtttctctctgttcacctttcccctcctgtggaaggacactggtcatattgggttagggacccattctactcccgtctgtcttcatcataactaatggtatctgcagggatattatttccaaataaggtcacatttgaggtgttgggacttcaacataaaactttgaggggcacacagttcaacccatataaggggtattttccaattgtgatttaggaatggcagctccaggcattctgtaccgctcagcccaagtggccctacatggagggcttgccctggaagaacctcaatagttaagagaggtgtttgtgaagctggcttttaataatacatgagccactttgaattacttgtttgggcccttgatcgggagcatcataaactcttaaattttttttttttttaatcatccctgtcaatcagtggatgcgaaggtcaaattactgtcatgcctacattcctgacccttataatagaataataataagctaacatttattgaatgcttattatgtgctaagaattgcatgtgttatctagttttatcttcacaacaactctattagatagttactgttattcttccagttaacaggtgaggacgctgagatcaggtgtggttgtgtgacatgcccatagtcacatagctaattaaatgacaagctgagatttcaatccagttctgtctgatttccaaatccaagcaacattgcagggggtgcaccctgtatttttagaggaatgtttgcatgtaacagttcaccatttaaagcctgttttatcatgggccttttcttttttctagatcatcctaatgaaatattctccatctatgtttatttgactcaggattcttaacctttttcagagtgaccatagggccttccataggttgtatttctatctacttcagtaagggtaggaattttccatttgaattaattgaaattacaaatggtaaacagtagaagagattatattttagctatgttttttaagagatccttaaaagaacataaaagttaactcatttccttgacattggtgagaatagagtcctaaacctcactagagaattccctagtactgataaggaaatttattctcatctcatttatgctgctttcagtataatgtgctatatggtgagagtggagacaagttctctcgaaaaacacatttttgctttcttccttctttcccaggtagcaactgaaattctctttctctgtcagagtgatagtccagttaaatccatgcatgtagatacatgggttctttcctccaagtgtgagaacagtgctgttttggaagcagagacttggtatcctctgatggtttattttattcttgtttagttgttaagctgtgtccaactcttttgcaacctcatggactatagcccaccaggctcctctgtccatggaatttcccgggcaaaaatacgggagtgggttgctatttccttctccaaggggatatttccgacccatggatcgaacccatgtctcctgcattggcaggcagattctgtaccactgagtcacctgggaagcccctgttggtttttggcaagttcaggtgccaaaaattatattttgcttcgatgcttctcatctctcttgcccatctgtacagtattaaattgcagacagtatgatagtcatcttttttttttaatccctgttatccttgactgatagttcaagtcaggcagataggaaagaaagatgaggtgctttatttgcttgcagtatacctagtcacctgtttacatagaaacacatacatatatatgtattcacacatacatatacatacacacgtatccgcataaagtctttgttaaaatggcatgtcagctagtgttgctttcagaccgtaaaggtaaggtaagtaaagtcactcagtcgtgtctgactctttgcgaccgaatggactgtagcctaccaggctcctccctccatgggattctccaggcaagagtactggagtgggttgccatttccttctccaggggattttcccaacccagggatcgaacccgggtctcctgcattccaggcagacactttaagtttcagaccataagaactgaatatttcccgactctagttgaattatttatcagggtctgtgggataacttattatacttatttgcaaggtttggataaaggctgtcttgaataatccagaatatgtttcaccccatgtgtctaaaagcaacatttcacacagtgtagtcccaggatcacctgcttcaaaatctttgggggcatggtcaaaatatgaattcctgggccctggtactgcagcctcactggtcctggtactgcagcctcactggtcctggtactccagcctcactggtcctggtaccccagcctcactggtcctggcactccagcctcactggtcctggtactgcagcctcactggtcctggtactgcagcctcactggtcctggtactccagcctcactggtcctggtactgcagcctcactggtcctggtactccagcctcactggtcctggtactccagcctcactggttcttccactccagcctcactggtcctggtactgcagcctcactggtcctggtactccagcctcactggtcctggtaccccagcctcactggtcctggtaccccagcctcactggttcttccactccagcctcactggtcctggtactccagcctcactggttcttccactccagcctcactggtcctggcactccagcctcactggtcctggtaccccagcctcactggtcctggtaccccagcctcactggtcctggtactccagcctcactggtcctggtaccacagcctcactggtcctggtactgcagcctcactggtcctggtactcgagcctcactggtcctggtaccccagcctcactggtcctggtaccccagcctcactggttcttccactccagcctcactggtcctggtactccagcctcactggttctttcactccagcctcactggtcctggcactccagcctcactggtcctggtaccccagcctcactggtcctggtaccccagcctcactggtcctggtaccccagcctcactggttcttccactccagcctcactggccctggcaccccagcctcactcattccgggtttccagggaaccattttgtccggctcctttgtgactcttcaccacaccgtcgtttgagatccatgatgtgaaatgtattaacaggagaataaagagtaaatttaattttctctgtcctggttcattttcctcttttgtcatcctctttcctgtcttttgtcttccaccccctccgtcaaatatattaaaagtatttcaagagctattctaatggtgtactttaaaaaaattgttcataaatgtcttgtttattttagcaatattacgattccatctttccttttgtggtgtgtataaaaggagccattggggaagagtgtttgttttcttttaaatgccctctattctccacagtaaatctccaggaaggaacaacatgctgtttgttcttttctcaggatgaactgtggctttctttgatagtggatattgtcatcaatggtttcagcaacttatgactcgtcctttttataaatcccagaatttagtgcgtgcgtgtatgctaagtctcttcagttctgtccgactctgtgcaatcccatggaccgtagcccgccaggctcctctgtatgtgggattctccaggcaagattactggagtgggttgccatttccttctcaaggggatcttcctgacccagggatggaacccgtgtctcttaagtctcctgcatcagcaagcagttctttaccactagagccacctggaaaacccgagtttctagagcgtgctttttggggtgagtgtaaggaatcaggattctctgagaaatccttttgtggattttctgggatctcagaataggccgtcacaactccctcagtgtatggtgtcaagaacttaagcctctaagtatatgaaagagtcgtaaaactagaggttttaatggattgttagtaataggacgtttttaaccagaagtattcctgacaggtgaattccctcccttcctctcccgtattagagaaatccctttgttgtgaagctgcacgagcaagattgtctccactttaatccgtagtaaataatttgttggattccaagagagtaaaaattgtccaggtgactcagatggatgcttctaaaggtatccagacagtggattatccactttctaatccagacagtgatgttagaagcagattcttctataatattcttctttattataaaaggaaaatcatcacttatgtgttacaaagtggagaaactgtgtggtgtttccttctgaagtgtcagattcaaggtctgtttcctcttagagaccctcaggttaatctccagcattttgtattccagcctgggaaagactggcctggactgtgggctctagcacctcactggttttgtatgtttggactggttaatacaagtgaccacttgttatttttttgtccaagtgctgtggttggatttttctcccccccaatggtacaaatctcttatctccctgctgtgtctctctgatgaagctttgtactggcagagaacccttggtggcagagctgggctgatgaatgtggccctgactataatttgagttgtcccgggaggggtttgagcgtttctcatgaggactcaatggcagtgagtcaccgtgtgctggggtactggtgtcgtgaaataacagctgtggcagcagcaacaatttagtagcagtcgctggttgagcatttattgatgctcccaccttgcccgtcacgtgtgttaaatagcacttaaattggcagtagtcccatgaactcagctccatctatcatctccattttacacataattgtctcaaagacaggagactagtaagaagaagaagtggaacttgaactctgatctcttgggtggccacacgtgtccatttaacagccacactacattctttctgactgaagtacacattgttgccagcttccctacccgctcttaaatcacatcatagtcagtttttacttagcagttttttttactgagtaatccagggaccgatgactccctttccttatttttcatttattttaagtgagagagaaagttcaaccttgggaaactgagcatgaccttcagcctgagaccatgtccatttactgaatcctcgagggataaaaggaatcttgtcagggggagggttgggtaagagaggaagaggtagacaggtagacacatccagggagatttgtatctccttagaggagcaggagggacattaagtataatttaagattatagttcagaggtcagccaggtaataatgctaagggacactttatgcaaaaaaaaaaaaaacagttctctggtcaagtaaatttagtaaactaccttctaacatccagttaaaaggcaccaacaaccaaaacaccaagagcacctcacacttactaaatgcttcgtgtgtgcactttaagcacttggttgtaccagtactataaggtattattttgatcccaattttactgatggagaaaggtcatcctgctattgggtggcaggggtgggagcctaaccaaagcagcctggcctcaggcactggactcctcctcctagtacctcttctggtgacatctcctgagcatgaatatatgtgccagcccccagccttagttgctgtgtgtgtttttgtttacctgtttaaccttctcaagcatcataatgtgcatcagcatattaaaggttctgacgtgtccagcagtcaacacacttgttagtctgtgtccagtgtttctcagagttacttcactacaggattcatctgcctttgtcgagcaggaggaatgaagggaaaataccggcgtgtgtgcacttggggaaaagacaaccaagagaatgattttattctgactttgcttcctccccagtgcagttttgagacatgatttattttcaaaacagagcagactccctgagaatgtggctttattatctaactgcccagtgtttggtgaccttcatcagggtgccgtcttgcttcccccgggggcatggatacctgcttctgtctactttatgggaatcttgacagtaaatgaccgtaaaactctttgagctgctttaaagaaagacactattgaagtccaaggtcttcatgatgtatcaaatatccagacttccttcattttggttaactttgaaaaataaatgtgtgtcctagcaggacagattaactagtttagctcatcagagggagggaagaagatagagctgcaaaatgtttattgctccccagagtcaaatcttcaggcccttatagcctggcacagagatgcttggttacaacaggagcaatgttgatgttgagttccccataagactgtgggagccttatgtttgtgtgactgactttgtccttccgagctccaaatatctgaggccagagacccaaatgcatatgtctgggcatgcatccttggtagtgtatgcttttttaaaagttttgttttagctgtatgattgtaccagtaaaaatccatttttatcagtgtactaggtaaaaatccatttagctgtaaatgacaaaatccagctcaagcaagaaaggagatttactggttccttgaggtgaagagtgcaggtccttttagggttggtttgaacttaaggatggttttgacccataggcctggtgttagtatcatgggcttgatttctgtgcatctactgtgccttcatggtgacatgtcacctttagtctttttttggttctatctcatgtccagatgtctaccagatattcctgaggctactaattccctttagtttatttttggttctacttcatgtccagatgtctgccagatattcctgaggcagtttattccttccacatccagagatgagggagattgagagattaggtatatttctggaggctgtttctgaatagcaagaaagaagatcaaaccttttttattacccagacttagatcatgttcccatgtatcagccaatgcctctgatgaaggaatggctttagactgattctgccatgttctactcctgcgttctgaggtggcatgtaactttgcaaaggaggtatggaaaatcagatggtttccacataagtgagaatggatgcagggttaaactttgagactcatgacacactttacctgacagttttctcttatacactcatgttagcagttacatgtgaaactggccagttaatgaataaaagacctaggtcaagatttaacttacaggggatttagtttcaagctctctctctcttagtaatacaggctacaccagatcaaattgagggattctcttctttttagcttgttgaacagtgtggtgttttggcttttaatttgtaaagcattaaattgagtctctgtctgccagtggtttttaataccaagtgcgttttgggtgagtgaatctgaggtttcattaaggcaatataaatgaccctagctttattattctcttcttcctattgagctcagtgtgactgctccttgcttttgacattgaacttcaagctttactaaataaaggatatttgtttccacattggtctcctggatgcctgacattacattttatttcataaaaattatgccaccattaaaaataaaatcattaatattgagaggcataaattccaagattgatagtagtagccggaagtgtactgagtgctgactgtgtgacaggaaggcactgcgctcagtgctttatctgcagtgttctgtttgttcatctcagtagccctgggagatgctatcattacttgcattttatagttggagaaactgagattaaataacatgtacaagttcacatagagaggaaactgtggagataaaatatagatcttttgactctgagtcctgttctcttgatcactattccctccactattttcaaagccaggatattacatccaatgttaatttggaatgttgggaaagttgcattatgtgtatgtctttctgaagttagtgcttctatagactagtcgtggtagaggattgaaaaagagcatttcctagcatggatcttggaaaaacaccaaagagttcttcataaaaaatgtgcattttccctgatagccaaaacaattttgaaaaagaaaacatttggaggactcacacttcctgatttctaagtctgctacaaagctacagtaatttaaacagcatggtaatggcattaagacacacagattgagcagtggaatagaataaagagctcagaaacaaaccctcacatttatggtcagatgatctttaacaggggtgccaagattataaaatggggaaagtctttaaccagttgggttgggagatgtccatatacaaaaacatgaagttgtgttttgccatatgcaaaaatcaactcaaaaattaagatctaaatataagatacagcactataaaagtcctaaagcagaatatggaggaaaatcttgatgacattggactatacgatgatttcttgagtatgacaccaaaagcacagacaagaaaaggagtgataaactagtgggactgcatcaaacctaaacccttttatgcatcaaaggacataatcaatagattataaagagaagctgtggaattatagaagatatcagcaaatcatatatctagtagaggttaatccagaatgtataaagaatgtctcgactcaacaacaaaaataatcaacccgattaaaaaatacgtgaaggacttgaatagagatttctctaaagatgacatacaaatgaccaacaagtatggaaacagctgtttaacatcattagtcattaagagaaatgcaaataagtcacagtgagctatcacatatcacctgttaggatgacttttactaaaaacaatagcaaacaagcagctacccctcaccccttaaaaaaaaaaaaaactcagaaaataacaagtgttggtaaggatgtgaaaaaatttagatatcgtgtacactattagagggggttgtgagacggtgcagatgctgtggaaaacagtatggtggttcctcaaaaaattaaaaatagaactgccatatgattcagcagttccacttctggtatatatccaaagtaattgaaagcaaagtcttaaagagagattttcacacccaggtgctattcacaatagccaagaggtagaaacaactcacatgtctattaatggatgaatggataaacaaagtttggcatatgcgtagaatggaagactatttaaccttaaaaatgaaggagttctgttacatgctacaaccttgatggccactggtatgtgaagtgagccggttacaaaaagagaaatagtatatggtttcacttatatgtgataactaaaatagtcaaattcctggaaacagaaagtagaagggtagtaaccaggggttggaggaaaaaggggagttttttagtgggtattaagtttcagttttgcaaaatgaaaaaactttggagattggttacatagcaatgtgaacataattaacaccactgaacacttaaaagatggtaaattttatgatgtgtgttttttaaatcagaattgaaaaaaattgtatttgtcttctggtactgatttaagtacttaattgagttatttgaacatcttaaaagttataaaccctgagcctacaggctgaatatggatcacaggtatattcatatagactcataatctttttttttttggaggggataaaatgtgaaccagtggtcatcattttaaagaattaggaaatttcatgttaaaatctctgcttctaagcttctcttggagaactggaaaatctgaactttgggccttgtctagtcaacaaatgactggaactaaggagcagccaacctctttatagacagggcatgaaacagactacattttttctcattcccttttttttccccttatatcaagtccaagggctcatgtacagttgatccttgaacagtccagaggttaggagagcccacactatggaaaacccatatataacttaaaattgcccctctgcacctgcagattcattcaaccgcatatagtgtagtattccagtatttactattgaaaaaaagttcaggtggacacatgcagttcaaacccatgttgttcaagggtcaactgctaacttcctggtctgtttgtcggttttaaattaaactccttaatccctaatgccctattactactggtgttgtaccgtgcatgctgtgcatgtcctccactaatcagtgtctgccttccctaagtagcctcttctgttttaggtctgagagttctgatctcttgtctttaagaacaatatagactcggtgcttttttttttttttccccttttttcctttagctgttttgcttgcagcaaatgtcctaccagtcatgttctaaatatagatgtgttaaatttcaaatgtgaaagtttttgatgggtctgaagccagtttgctaatcagggcaaatgctatgattggcgccagtgtttacagaccctgggggtattgtgaaatccgccttcgccactgtgattcagctcgggggtggaatgaagctccctgacccctggaaagttctccaagttgtttttcttctcaatagtggggtgattcgttgaatgtcataacttagaaaagtacgtgttccttagttcattttactagtgctggattactatcaatagtatggtcataaataatttttgcaagcaaaaacaaatcatatttttttctgatcttttcatgtacaatcagtaaggaaatgtctatttattgaaagaaatctagagacccaagggcctgcctcttcatatgaaattaaaaatagttacttgtgcaaagtgtaaaaattttggttattggaaagttcagactgatccaatttttaaaatcttgtatcttttaagtctaattatttactctttaaagatagggctagtagtgtccattgtaaggaggggcaaaatactcaagaggcatcagttgccaaaattttcaaagctactccctgcctaatattcgtgtgtgtctgtgtgagtgtatatgcagggagcactattagaaatgcctgtatgtttcatgctgggtctgttttgtttgtgtcatagaacttgaaagattcattttcgtgtgttgaataatagtgagcagcagtggaggaaccttagtctccagtaccagtagagtggaggtattcggagaactttctgataatgagaattaaagtaattaagttgctgtgccctgagactctgaatccttatctccccttgccagaagtgaggctgtcatttagagaagtgggtgtctctgttactgaaatgagatatgactgtagttgatcccatcactctctggtgcagaatttttcaccccgagcagcagatcagagaaatcaaacagaacaagccagttaaaccacactgctttgctggctgaagggacccaaaagtaaacaaagtgacagacttttggagttcctttcccaaatttgatttccctgtttttatccattaaattggtcaacagcagcactcactggtaaaaaacaggaacaacagattcaagttttgccgtcagctacactgtagtgttgttctctctcttttttccttcccctcttttttcttcctcctccctttctttgatctttctctccctccctcccttcctcagttcaattttctgtatatatatatatttaaattccaaaggaataataacataaagaaaaacatgttaattttcttcctcaccatcttgaatccagccctgctagagaaataatattaataatttgttgtgtatcatcagtcatttccttgctcaggcaaataagatccgtagatagaaaagtttgtttgaatttttagaaactacttaatctgtttatttttggctgcgctaggtctttgggactttgtgcaagctgtctctagctgtggcgagcaggggctgctcttccttgtggtgtgcaggctactcttgctgcagagcacaggctgtaggtgcatgcatgggcttcagtagttgcaggataagggccctagagcgtgggttcagtagttggggcgcagggacttagtagctgcgggcaagtgggatcttcccggaccagggatctgaactgatgtcccctccgttggcagtgggattcttatccactgtaccaacagggaagtcctattttttgaattttcacagaaatggactcatgttgtgtgctgtaactttactcacctgacgctactttgtggctatctctccaaatcagtacctttacctaaaaatcgttactttcagtgtggtatatttcatagtatgattttatcattcttcatataaatcccccattgattaattcagtttacagattcctcctcaccccccactaaacgaatagcgttgcttattttaactgcatatatatatatatatatatatattttttttttttttgaaaaacctttaccctgtgtgatatttgaagagggaagttatagggctttttatttttgttatttgtttttcttggggctagtagttactttatagtgttgtgttaatttctgctgtacagcaaagtgaatcagttataggtatacatatagctactctttttttaaaaaaaagtatatatatatctactccttcccacttagatcactgcagatcattgagtagtgttctctgctatacagtaggtctttattagttatgtattttatacatagtagtgtatatatgtcaatcctagtctcccagttctcctccaccattgcttggtaaccataagtttgttctgtacatcttgactctgtttctgctttgcaaataagttgatttgtaacatttgtctagattccacatataagtaatatcatatggcatttgtttttctctttctgacttatttcactctgtatggcagtctctaggtctatccatgttgctgtaaatggcattatttcattctttttatgactgagtaatattccattgtatatatgtaccacatcttctttatccattcctgtgttgatagacattttattttgcttccatgttttggctactgaaaataatgctgcaatgaacatcagggtgcatgtatctttttgaattatgtttttttctccaatatatgccgaggagtgaaattgatggatcggatagtagctgtatttttggttttttaaggaacttccatactgttctccatagtggcttatcaatttatattcccaccaacagtgtaggagggttccctttttctctacaccctcttcagcggtcattgtagactttttggtgatggccattctgaccgtatgaggtgatacctcattgtagttttgctttgtgtttctctaataacttgtggtgtggagcatcttttcctgtgcttttggccatctgtatgtcttctttggtgatgtgatttctctttatttttgctcatatgtataccataccatattatatagaacagggttgccttacatcataaatcacatacatttcatcacctttgtttatgaaatagttttaattatcttgttattttcaaaggttgaatttagttggtattcctttgaagagtatggcagttgttcttttcaatggaaaaaggagatacgatctgacaggattttttctttcagtgccttgaggaatcttttgaaatgattttccaggtagtaaaacctttaatgtcctttggattcactgtagtttgtgaagctgacaaacaacagctctttgggatggttgtgaaacaaggcctgggacagactgacttgttacttagtctgcatctgttgccttgacaacaaactaaacatttaaaaatacttcggcaaatgccataaacaagtgatgcttgggggttacactattaaagcagaagcaccaagaccacatttagacaataaaggttgcaggaaaaatacccactttttaggagatttttattgtaggtttttctgtctctgataaacactagatgcattagcaaagagaaagtattctgctctaagttgagaaattactttcaattgcagtatgcagcagtttgcactgtattttggcccaaaggataatgcacacctcttttatttggctttcctcaaagcaatttagtgccatgtgaatgaaaactggattagatctgtcacagcagctgaaggttagggtgacacagggagagataaaacgccaatctttgtgcctaagtattttttgtttaacctgtgctctcacattctttgtattcacagaggtacttgttgtctgggtggtgatatctacaaatcctgtaaatgaatatttgttatagcatctactattatactaagaatcattcattaaataatttgggggagtgagtaatttataggaaaaaaaagggattcttttggccaaacaggaagagtattcaattttgctggactcagtgggagggaaaaacaatcctgttgcagatttctgtattttaagggatgcagttcatgatagttgaataattaggaattcaggaatcctcgctcacgcttttctgttttcttaaattctcatgatctaacattgttctgtttggctataagtaacatttattttcagtttgattttgaaatgctgatactttcagtgtaagtgaaagtcgcttagttgtgtctgactctttgtgactccatggactatacagtccatggaattctctaggccagaatactggagtggatagtctttcccttctccaggggatcttcccaacccagggatccgagcccaggtctcctgcattgcaggtggattctttaccagctgagccacaagggaagccctaaaatactgaagtgggtagcctatcccttctccagcggatcttcccgacccaagaatcaaaccgggatctcctgcattgcaggcagactctttactttcagtacacaaacagtgaaaaataatacaattccacatatggctttcattgtcaagatcatttcttctgcctatcttggtggaaatattcagtattttttcatctataaccaaggttatctttatgagctgtcagggctgtggtggcatatgtaatgatacaaatctgggactcccagtgctgtgggtcagagattacaataaaaatacaagtgtaaatttctgaaacaacgtgtactctagattttccagaggcctttaagcagattatagatacagcagtgactcacagttttaatcagtctctatcttgattgaaagaccctctcaaactttgctgtcttcactgcattcagatcccacttctgtggcttactgagctggaagctgttaatgggtctcctttatgcccacagctgacctgcctcagcctcagtttccccatgtgtaaagtggtgatgctgctgcccatattgacaaaattgttggaaagattcaaaacccaactgctttttaacatactagccctctttctggcttcttaataatggatatttttacattatttttatggtgaataaactgtgttgtgtttgttaatctgcctgtggaagccaggcagatttattcagttcctcttgtatcacatatcagaggcatggaatctcatcgaggtcagtgaactccctctgagtctcagtttcctcaattgtaaaataagaatactaatatttaccattcagagttgtgaagaaaaaagaccatgtttttatagtatatagcacaggtctggccatgtcataaccatttaccaaatgatagcttctgttgtcactatcattgttattatcatttttattattatttgacaatatgtatatatcgcagaatttctgccgccatttctatagcctagctactgttatctctccctgggttgctctcatagccctttaacccttctcctgatgctgggatgcagaccctccatcataatctggccttgcccttcccctcccacctcagatccccacattgctttgcaacagatctttctgtgctttggcctccacagactttatttcttttcacatattatactactttcttgcacagggcccttgcatatgctattttttccttcttgaactagtcctctcctcttttcccattcccttatacttctttacttccctcctcatccccttattaaataccttcataggtacttatactcaattctttaagtcacttgtcatgtcacatttttttgtgctcacttagtgaattccatccctcaccctcatcctcaactacaggttctgagagagtagatactgtcagactgggatcaccactggctcttggtttagttccccttcatacgcatttgttgtgggaggcagtggatgactggatgcatgactgagatgggaatagaaaataactgggcaatatttgaggaagcagaggcagtcgtagggtgtgaggttcacccctggggaattcaggttagttcatggtctggcgcgccaccgaggaagcgcagtgtgtttgtgcagggaggaaaaaccgtgcaaatgaagaagtgcagagaggaaggaagaagcttagcaggaaatagctgtggaggattggaaagaggaaataactgagaagtgacttgatagaaaattgtgcatgtatttcctctgctgtagttctcatttttctggtttatgcctttggtcttgttttctgagtctgatttgtagcgttctcttctctttcccccttaggatgccatatcagtttatttacacagacaaacgaatacaccagaaatgagcacacagacagtggcaagtgcagacttgtcgttttcccttcggacgatgaactcttcctcctctttgtcagtttctttctctatctttgtatttcttctgtcaaaagtgcacttttgtgtgtgtgtgtgtgtgtgtgtgtgtgtgggtgtgtgtgtttgtggttctctactctgaaatggatttaaatcccctcctttggctccccttacccatttctaatgtttaaagattcagcactgacttctcgtttcagctgttcatgtcactaatgacagagcgatttttcagagcagaaagctctgctgagaccgctgtcaggtattgggtggttgcagggatgaagaactaactacttatttttgagtgtttttctttcttagtctccaacctttttttctagtgttaggttaaattaacatataattcacagaagatcaaatttactattttaaagtctacacttcagtggtttttagtttgacagcttgtgcactagttaccattatctaattccagaatatttccattatctccctaagaagccctgtacctttcagcagttaattccaactttcctttcccctgacccctggcaaccattaatctactttctatggatttgcctactagatgtttcatatcaatggcgttaggcaacgttcggcctcttatatccagtttctttcactcagcatgaagttgtcaaggttcatctttaagtatgtgtcaggacttcattcctttctatggccaagtaatactccttcataggactgttccacattttttttctttttcagttgatggacatttgagtggcttccactttttagctgttatgagtaatgaggctctgagcatttgtgtataaatttttgtgttggaacttatttttcatttttctcaggtagttacttaggagtggaattgctgtgtcatattgtaagtctgtgttaaaccttttgatggactcttagactgttttccacagcagctataccattttacattcccactagcaatgtactaagtttccagttcccagtttttccatattcttgccaatgcttcttattttcatttttttaaaaaaattacagtcattttagggtgtgtgaaggggtctttggacttccctggtggctcagatagtgaagagtctgtctgctatgcaagagacctgggttcgatgcctgagttgggaagatcccctggaaaagggaatggctacacactctagtattcttgcttgaagaattccatggacagaggaacttgttgggctacagttgatggtattgcaaagagttggacacgactgagtgaatgtctgactttttaaatgatagtttctggtgggactcccctgacccccacactgtctctttcatttaaaaaaaaaaaaaaggttattgttcttgtcatttttattagaattagattttgaaatgaacctttgctagaactgagggaatcatgaatagtatttgaaatactactttataattgggaaacagcatgcttacagaaggtaactgaactggaaaatagcaattatggcctacaaattaggatttttttctactaaagtaagcctcaagtaaatattctcatgtataaattatagaaacctattattatacagaaaagtcaaaaaaagaaatttggtaataaaactgtgtgtgtcttctggtttggtttcttttctttgtataactatttttttaaattttaaattcttattcttcatatgctcttactatggtgatttttcatgtacagagtaatcttctaagatcttttaaatcctgcagaaaaagctctgctaatattagccaacccgattttttttctattgtttcaaatggaagtatcatggccaagggcccagcattgagaagcttaaacaattatagattctttttccttccattcattagatgtaatttagtatttgaaaaaataaaatcgctcaatttcagttgaagttcagctgtcttaaccctttctcatgttctctatttggcttttcattgtaaaccttgacagtgtcaaatcaatagaaatatatttttgttattctctagtataagatcaaaaccatcacccataaacatgtaatgagacttcttttatgtgtggaaaccaatctctgatctttaggaacttacagctgagtacagagcattgatgccagtaggtgctacagacacgaagtgtttgtaccatatatcaggcaggaggcactcagtaattttaaggatggaagaggcagctatgatataattgatatggaagatataacttacacaggattttaagacatcatttccagatttcgtgcagtagggaaacacaccgaactctgattattctggggaaagaaaattaggaaaacattggaagcgtacagatacttgttaatggcctactgaatgacaagctgtgtttggagcttgattccagagtatggtaggtgagagcttgggttcgggcagtcagatagcttcagtttgtttcttggatgtgacagctttcatttgtgtgattatggtgaaaatgagtgtccacagtccatatgggtgttgtgaggattgaaggggattaatttaaatgactccctctatttggtttctgacacataatgggcactctaataatatttatagtcttcttgtcagatttttttgtaattacagttattttacatttaattattacaaccgttacttaagaaaagtggtattaacacatttaaaaaatattgatttctttatttttggctctataacatctgcattgctttgcatggctttctctagttgcagtgagcagaggctactctctagttgccatgcacgggcttctcttgtttttggagcacaggcttgaggcatgcaggctttagtagttgtagcacgcaggctcaggagttgaggctcgaagactctagagtgtgggctcagtagttgtggcacatgggctttgttgctacgtggcatgtggaacttcccaaaccagggattgaacccatgtccactgcattggtaggcagattcttatccattacaccatcagggaagtccaacacacattttcaaatgagaaaaatgaggcttaaatcatcaagaatttgcctacaacagtggttcttacctggggatgatttttgacagcatctagagacgtgactttggttgtcaccactggggtacagcgtgatattgacatctggtgagtagaggctgaggacagcctctgtgacaaaagttatgcagcccaaaacgttgatagtgccaagatgaagaaaccctggccaagagtcacagagcttttaggaagagaagtaggatttgaaccaacttttctcaaccatatgtttctgttttcccccgaaacttctcttcatgagaatacagggagtgacataaagtgagttttgacaagtccctttaagatggggtagtggcttgagactcaaatacagcttcatgagaaggtgacaaaccaagtccagagaaagtgaggtgatgtgggagggaaccaccatctgtttattctttcactgttcattcattcaagtattgatttgctagtcatgttttaattcatgtgtcagtcattaattctccacacgcttactgagcaccgactctgtgggctgtattctcatgcaacttctattcctctagccagacagcttggaaatggaagagaacatttctgaaatgtagtataagaagtggaaaaaaaaaaggttcagtattagaaaatccagtttatgaacttgtctcacttgaacccttacattaatctatttgtttgttcatggactgctcaaataaatgcatgtatccatggtatcttcttgctaggaactgtgttaggtcctggtacttatgctcaagaaagtgtgtcttctgttgtgtgtgtgttagttgctcagttgtgtccgactctttgtgaccctatggactgtagcccttcagggtcttctgtccatggaattccccaggcaagaatactggaatgggttgccattcccttctccgggggatcttcctgacccaggtatcaaacttgagtctcctgcattggaggcagattctttaccatctgagccaccagggtgacctttccataaatctttatatagccttcagaaagaaactgcagttttatcattcttattaccagtaaacatctttttagaaacagaagatgtattggtctgtgtttcagaccgcttttgaattgaggtttttgctgggggaaggaagaatctttcttggatatcaaatgagccttgtggtttactcttaataattattttagtatgaaagagtttgctgggctttatgggaagtatcataaaatacctaatttccctcaaaaaaaaaaaaagcttcctgacttataaaaaagattggaataaaacaaatgtgtcttttaaaaactgcctgtattctgatggaaattcctttaatgacaaaatgaatgtacacacgtgtacacacacacactcttaaagggatacatcaaaagccttgattcttgttttttttttttaagttataaaataataatatacttacaggagacttggaaaacacagagcaaagttacacatagttctactacatattacatactatttttagtagataagaattttttggagtctcaatatcaagctctcaaaaatcaatagaaagaataggaaagtagaaggatatagtagacctgaaaagcactatgaaccaattcaacataattaagatttatacagttttttttcacaacagcagtgtacaaattctgttcacgttcccatagactataaacgaggagacattgaaacatatccagggaaataaagcaaggtgcaaaagtttcatggtcttaaaggtattgaaatcatacacagtctgttctctcattactgtggcattatgttagaaatcagtatcaaaagatatttgaaaataacccatatattttcaagtataatgtgacaaatttaccaagagaaatctttgacttagccattgaaagcctcaataaaacaaacaaacaagcaaaccttgattcttaacagtttgtacttttataccatgaaaaagcaagaattactgcttgcattattattaagaatttcattgactgaatagctcattttttttttttttaagtaaccacaaattttcccatagtgatgaagaggcggacagtttctggatactgggaagtcccttcttagaagtgtatatttatcatggatgagctaggctaatatatatacataatatatatatatatatatatatatatatatatataggtttgtttctgttctaatttatatagaagaaagagtctgtgaggcagatgtaccctgtcccatccagaaggaaggactgagtcagcaccacggagcagtttcattggtcactcctgggtagtctgagctgtttaaacagtttaaaagtacatgcactgaacggcttaattcttcactatgagatggccaactctacgatttttctggaattctaaaaatacgttaccatttgtcgtgactacggtattttattttgcttcttgatcaatttttgccagtttggtttgttcctcctgcccctcatgtcaacagttaatctctctgaactctctgcacatttttggggttaagcccccacccaccacccccctttttattttgggtcccctcagacctttccccattatttactacttacctttttttccttctgtggttcttccattgtctaacattgaaaaagttgttgttgttgtgtgtgtgttttttaatgtttaagtctcttaataaaaaaatacacattagcatttaatatttttgtgtatattttttacctggaattttgaaaagtttatatacacatgtgtagttaacagctgatcgtttcaaaacgtggtttgcacttgtagcctatgagggcaaggtttaatggtacaatgacatataatgtgtctccttgcaaattctttttcttctgcttttctggagcccctgaaagctctcacaggggctgcaggcgcagagaccatccttggggaggaagtccagagtccacggaagactctggggtgttggctgtcttgtggagggatggaatggtgttctcctaagacttcaccatgcaaatcttattccttgaatgtgaaaacttgtgaagcaactttgttctacttattagaacagggaaagcacagtggggtatacatggaggcctcagagctgtagtacatgtgtactcctgatgattctaaatctagttttcaattaaagcttgccagtttctaggtatattgtagagacagatattaccggaatcactctccgacttttcaagcttgtttcatttaagctaccaagaaactgagtctataaaatgacataattttatcttatacctttttctgacctgataattttccttttgccttcttagctcaccagttcaaactaaaaaaatcattctattgccacacatgtaacatcctctggatttcttccccatgtgggatctttttttgttcttgtttagaaactagaagtaatattttaacaaatattcatgattttacctatagtttttgaagatctgacttagtattttattttattttatttttttaaaataaatttatttatttatttttaattttttactttacaattctgtattggttttggcatagattgacatgaatccaccacaggtgtacatgcgttcccaaacatgaacccccctcccaccccctgacttagtattttaaaagtacttcaactaagaacaagaagctctctatagtccccaggaacgctgatgatttacaaatttattctccttttctggggtgaagggaaaaagaatgaggcctttccttgactccctgatgctgtactaaatcacagcttcctgatggtttctttcaaagtgattaagaatatctgcgatcatgtattttcatcatttacttattagcttgtgtattgtcatctcttccacttgacagtacatgctatgctggcaagaagaatgttaattttattcactgtacagtaagtcccttacaaatgaatgcgttcatgtaatataagttagttatgtgaaaaactaccttgcagaagcaaattttgggtatagattatctgcttgtagtactaaacatttttttcttaaactgagggatttagattttatatttttaactgagaggctttttcttttttttaatgttgaattcatttgatagtaaaatgttctttacattgagggtcaagaggcagtttataatttaaagctaaagattctatcttgagaaaatgtatttagtttgctataaatttatgcatgtaacaataagattaaatggacctttatatgtaggtccttgaactcatatgcagaaaattcaggcttttctctctgaagctttgtataaataacaaacctctgagagtttgaagatggaactcttttaaaattctgtgagcctatggacttgtaattaaaatcacaattattgttagattggttctatgtgtaattaaggcaggaagaaaatacaagccagtaaaatgagtaatgcaaggaaattctgatgtcctgcttccttttgaagagggttttacgcattcatccctgtctcattctctgttgaagattcttatcttggctacatggattgttcagaattttcagcgtaaagaaaaactattgaagtggcctgccttttcttgaggaagctcctcccaaaattatttctagccgggccagattctgtctcttaacatatatgatttcccccagtgtgttgattggtttcttatttcctgacttctcttttatataaaattcctgtggtgcactggagctctctggagctgtgttagggatgccataacacacctcagacctgaggaatgcttggatgttattttattgcctttggcagtctgtggatctcttacttctttcagtctgattagtggggaattcagagctatagtcaggagatagttcacctaaactgttactgctttgatggatttaatgatcaaatgctggctagtgcccaaagcagatatttacatgccctatgcttaattctacatttcccttgtcaaagatggttattcaacaaaggccttttatattggttaaagccaattaatacatggagatgtaatttaatttcttcctcactatggttgaatgtgaggagtcttgattgcctacaatgacatatatacagacaacaccttcgtttactaagtgtaataattaaggcagaacattttttttactgcagttctgtggtagaaaaaccactttgatacctttatttgggtcaaagtgttctttatacagtctttgaggtacggacctcatcaaagcagttgatcttccagtgacccattttggaataatatggacacaatggtgcttctctagagttgatctgaagtattgtgtgtttagtaactaagcaaaaatattctcagtgccaaaggctattaagacttggctatatctttgacagttgtctctgtttagcagtttggtatgttggaaagctacttagtagatcttttttttcttgatatatctcaagattacattagattttatactcagtagtagttcaatcagtattcattgattactttatatagctgttgtagcagtagttactgggagttcagtgatgatcataacagacaacaatatttgttttagtataacagggtttttttggaaggtaaaggtggtacacttaataattattctgcagcagcaagaactgggaatattccacgaaaattgggactaatgggttaccttagttgacacaggcatggtctctgtcctcatgtggctggtaatcaagaagatgatagttaatccaataatcagatattaagtaccaattgatagttgtgaaaaaattatagaaggccatagagtaagggaatttgacctggtcatggggttagggaaggccttcctaaagaggtaaaatttatgctgagttctggtagaagttctagtagactatttcagaaggaaaaagcatgtgcaaaaagctttagggtgggaagagagtgtggtgtgtttcaggaacagtaagacaggagggatgcaagcatggggctccatgtagagtacgtgcaggatgaagctaggaagcttggtagaagccacaccacctggggccttgactgccctggaaggatttagatctttaccccaaccaaaatggaaagctgttatagaatttaaaatgggggggtgtgtgagtggggtcaagtaggtagaaggatcatatgatcaggtttggattttgaaaagatccttcgggctgcagtgtgaagaagagattgagcagggattgccggggtaaagcaaggctaggggcaagaggaaaatctggggacagtggtgaaatagtttctgtgttagtccagctaagagataatggggactttaaagtgaatctgagaggtatctaggagcaaaactcagaaggacttggaaacagagtcttacgggcactgaagggtgtttggaattgttttgtgcccacctgtgatgatacacagttctcttgtgtccactcagcctgttttataaattaaaatcagcagcactgagcagaaaccacagaagagaaagagctagcttcaccgacttctgagaagtgactggagatagtccctgagaagtcagagactcagaaaatatcttaactatttggcatcatcagcgtactctgtagtgtgtggtggaatgagctgtgtgtgggggagagtacagttccttacattcttatgcaagagtgagctatagaatgatcccaaccagtaatgctgtgtcattgacttcttatccggatctctcttcaattagcctgtagggcagcatgactaaggtatcatttagggtactagaacaataattttctaaataataccctggtgcattgaaggggttaaagtaaggatgcctagatgcttcatctatgatcagggtgctggatcagattagaccctggacccaactggtttatcacgtggttcttttacaaggctgttgctcatcttaaagtgtgatgtaacagagcttatgaattaaaaataaaaacccacagggtcatgtgaatgtgtataaataccagggaactaagtatatctttctctgtagaacataatgtgggtagaagacttttgcttttgcatgtggcataacaccaggctcaagtcattatttatgtatttgcctgatgacgaaatagtagttgttaagtagcagtttgctcttttgtacactctggattatgtctcattcattctgcctttattgctgatatgtgggcatatttttcttagcaacagcagaaccaagccagtttctggggccatcgtgcaaaatcttagttcagatactgtactgccaaaatcagcaataatattaatataagaaacattatgaaaattttaagatggtgtcttgaatattcttccaaaaatattgtttcaattagtcaaaaagcacaggttcttgcatgggtttccctttagtttttagctctttaatctcagcaaattatgagattttgctccattttatgcaagagatcaagtttctattagaagttgttttttttttttttctgaaaagggccactatgagagataaatagcatcattcattcatttgtttgatcaaatgattagagatgaggaaatatgttaggaattttcatttcttctactgttacctcctttttggttttcttttatttttagagctgtgtatattaagcaacttcatttacctttggtccttcatcctgagcctggtgttggctagccaggagaattttatgttgtttttcaaaagcttggtccagattttgacagcttcttgcagggtttgatattgaaaacaaccagtgtttaggaataatttaggtgtctactaaattattgactactgctcaccaacttattcttttactaagctttgagtcatattttagattaaacatggttaattttttccattcagttcttaaaactttacacactgagttagatatgtggcttgagtttaaattatgtttgccataagtggagttcctggattactgtccagagtgaatttggactgtcgaaagatttatttggtggcagtatgctcagattttgaaattaaataatagagctagtattcaaaatgactttttttaatgtatcagttttttcaaaagaattattgaaatataattgatttacaatgttgtattcatttctggtatatagcaaagtgattcagttatacatatataatttttcatattctttccataatggtattttaggatattgaatatagttctctgtactgtacatcatgtccttattgtttgtcttttttatatgtagtgatttgtatctactaatccccaactcctgatttatgccccccaccgtctttcctcttgggaaccataagtttggtttctatgtctgtgagtttgtttctgccttattcataagttcatttgtatcatactttagattccacatttaagtgatatcacatggtatttgcctttctctttctgacttatttcacttagtatggtaatctctcggtccatccacgttgttgcaaatggcatcatttcattctttttatggttgagtacatttattatgtgtaggtttttaatcatggtcattcagaccattttgaactgatacctcattatagttttgtttgcattttctaatgtgcctattggccatctgtataaaataacagttttgatgtttgttcaaaagatcagtgttgattaattctctgaaaagacatgtaattttcacattttctgtatgataagtggagcacatgtgtcactctgactgtattagagtcttttcttagcttaaaaatcctcattaatgacaaggaaataataatgcccaccttcaagggccactatgagagataaataagatcattcatttatttgtatgatcaacaatcatttgttaagcatcaacagtgcaaagtgctgtatgggatatgacagagaatggcaatggagcttataatctacttcatatttgttaagaatatagatgaatactacatggtaactaattgttgatatctaacttttgtctaaaacttgtgatctaaagtgtgttgttaaattactatttgtctgattttgaatttggattagagatgttgaagaatttctgtagatatatttgcacattaattttaggattgtaaagcagtgattctgaactctgcatattagaatgacctggggagctttttagtagctacagaaccagtgtcaggaggttgccctcagagattctgatataattgatttagggcaggacatggggactggcatttcttaggaagctcctcagatgattttaatgggcagctatggttgaggtgtactgctttaaaggtaggtatatttcatgagtgtttatacattgtggttaatgatagatttgctattgacttatcaggatatttagcttgatgtgagcgagagctctgtcattaactatggattgaccagttttgatgataggtttcagagtaaaatatgtggcttcaaagaatcagatatgtggactgtaggcatgactgccacggtgcatctctgtggccttaggtgagtcactttaccatggagacctctgtattctcatctttaaaatgaggaatttggttaaatgtccgtactatcattcaacaattgttataatgtagtactttaatgccccagtctatgaactacctgttgccagaatggttccctggcctgccatattgttctttccctttcccatagctaatcaaaccagtggtggacacccaatcaaagtcggccgggccataatctgacgaaagacagctaactcactcttgagagagtctgagtaaagatatgaatgttattacagtctgtgaagcatggaaagatgaggaaggggtaggggagcttggtgattaccttgggccatgtgtagactgaggctgactgtgtaaagtgagacgaactggggtgggtgtgtgcagcgaagcacagatgtcctgagaatgcagtgagacgattcatgaaagacacagcaaagagagctttgtctttgacctcatcccagttccagtccccagggacctagctgtaaaattgctgttctcaggtatctgtgatgtggcctgctgtgtccttattctttctccttccttttactcccctcagtgggtttctgtccctggtaaccccatatgcttctgctgctgttaagtcacttcagtcgtgtccaactctgtacgaccccatagccggcagcccaccaggctcccccgttcctgggattctccaggcaagaacattggagtgggttgccatttctttctccagtgcatgaaagtgacaagtgaaagtgaagtcgctcagttgtgtccgactcttagcgaccccatggactacagcctatcaggctcctccgtccatggggttttccaggcaagagtacgggagtggggtgccattgccttctccatttggttagtagaaactttggagaaacaaatggggcaaggataaaaatagaaatggggtaaggagaataagcaaaatagtgcaatattgtagaaagaatgaggatagtaagttagagtaagttagagctctgtcccaaaatagctcggtgaccttatccaaggtacttgacactagcaggttggtctaaaatgggaatggtgcagtcccataggcatggtgtaatgaaagttagattacacttacagaaatgctttgaaaggtaaaggggcatgtcagtgaggggctagcaagttttgagatgtttgccctcagagacaagaggtaggacagaagagaggccgagttataaaatatgcctgaacgaccgagctttttggtatttgacttaactctcaatagactatttcttgggcctcccatgtggcggtagcagtaaagaacccacctgccaataaaagagacataagagatgcgggttcaatccctgagtaaggaagatcccctagaggagggcatggtaacctactccatggagatatgggtcacagaggagcctggaaggctacagtccataggattgcagagtcggacacactgaagtgaccgagcactcacacacgcaaactatttcttcccttctgtcaatttttaattttcacagcttaatttttcttttgctagttattacttcgttcttagaacttctaaatttttgttgcctaaattgtctgatagggttttttgatacacatttttaggtatagttcatttttttcccattaatttctgtagcgaatatgggtaaccattctgtgtattatgagttaatgataaagttactgtttttctttgggttcagtgaggagcaaggattgggtcatgcgtgcaaaggatttagcttgttggtttctttcttatcctcagttggcacatcctaaaatcgttttgttgtctcccactcagtgggcttgccagacagtgggaaaggtttacgattggaatcggaagggtgtccagagttcatgactgaggaaaattggccctgcagtgaacatacttagcctggcacagacaggattttcccatccttccttattactctataagataactttccattgacacagttgggtaattaagaaagagtaaaataaaaggatgattgggttggtagtaggtagaaggtgtacaaagtctttcctgtcatttatatacatatttacacttagtgtgataatttttcccatctggaagtactgttacctttcctaatatatttgggcatgaatatcattcctttcttggagccacataaattcagtttatatcagaagcaacattgggatttttgatagatttttttccctatgccattttcccttgcattccagattgttttctgttgctttagcagaaaaggaagataaccaactgctgttcctggatctgacattggaccacaagtttcttgagtcattagcagcttttatggagttttctcattgccaagtatttaaaatttctttaagaggtattaagtttattatgtccagtgaagtatgagtggactatgcacacagcttctttttaaagactttctggcaagttgattagagtttatagaatgaagtgtagtggaaaatcagttattttcagagggtgcctttttttggttagtgttatgagcaaaaagtgaaaatacttaaggatcatagataaagttctgtaatagggcactggaagaggatcgctgactcgttcttttttcagaacacattaactacagtaacttgatggagggctattaagtatttaactgctgctggaagatattagatgcttatcaacattgtgactgagtattgtttcatttaaccgtctgtccatgggttaatatagtatatgattggctcctataaacaaggaaaaaaaactactgaccatttgtcatcattgtgtaacagggcagcttcctaatttccctctcaaagaatcaattctccatagacttccaatcatcttcccagtgtgatgcttttgaaggcaatggcagcccaccccagtgttcttgcctggagaatcccagggatgggggagcctggtgggctgctgtctgtggggtcgcacagagttggacacgactgaagtgacttaacagcagcagcagccttgtggtatgtttttataaagtatcacttaagtactgattcattgatttattcagtaagtcttttcccttttctctgtagtctaaaatgttggtatctttatatccaattgtgccagctactaacttactagttcgtgtggaaacaagtgcaagggactttcagtgcaagggacacactttcaggtgtcccttcccatattgaaattcagttaattttccagcaacagtatgtaataacacatacaaagtgttgccaactgaagatatttacctgagccttggtgtactggaattttttggggggtcatgttgtgcccctgtgactggtctcagttgctctgactttaccctactcctcccaaagctccaccttccccctcccccagcaaaaacaagtattcaccctaaatcacaaaagttagggaaaaaagttgaaaaaggtaacaaaagttaggaaacctcttctagggtaaagttttctggtaaactgtatagcatagcccatggctgcaggcatacagagagagatgatcatgccaagacagtgtggcttaagacctcagacagacagttcagttcagttcagtccctcagtcgtgttcgactttttgtgaccctgtggactgcagcatgccaggccttcctgtccatcaccagctcccggagtttactcaaactcatgtccattgagtcgatgatgccatccaaccatctcatcctctgtcgtccccttctcctgccctcaatctttcccagcatcagggtcttttcaaatgagtcagttcttcgtgtcaggtggccaaagtattagagtttcagcttcaacatcagtcattccaatgaatacccaggactgatctcctttaggacagactggttgggtctccttgcagtccaaaggactctcaagagtcttctccaacaccacagttcaaaagcatcaattcttcagtgctcagctttcttcacagtccaactctcacatccatacatgactactggaaaagccatagccttgactagatggacttttgttggcaaagtaatgtctctgctttttaagatactgtctaggttagtcataactttcctcccaaggagtaagtgtcttttaatttcatggctgcaagcatgatctgcagtgattttggagcctcccaaaataaagtctgtcactgtttccctatctatttgccatgaagtgatgggactggatgccatgatcttagttttctgaatgttgagctttaagccaactttttcactctcctctttcactttcatcaagaggctctttagttcttcactttctgccataagggtggtatcatctgcattaagcacactgtgccaagggctcagaggttatctcctagaagccagtgaaaatcaatccagcagacagacctgcctttgaaatgtgcagggtttgagcaacccaggcctgctgagttaagtctctcctgcctgcaggtctagtaatattttatttgatgatcaccattgtgagtattacactattgtatctttggattttgttaccttaatttactcagggatcagattgattcttttgatgttgttttaatttttttgtgagagtagatcttgagtagtcttcctgtaggccttgtttattctccagaatgaagtctctactgaataaagcaggtgttggatgaagtttttccgctcgggcaggttggatcttgattgtttcccagtcttttgtgagctctgaaagctgttttgcttatagcttcccagtagatgttttttttccttgtagtcatactttggtagctagtctttgctcagcccgacagagtttgattctctgcatttgtgtattaactaaagactcaaggagatctataaggacattttctgggtttattattattattgcatagctccttcctttcctttactctgtcctacatattctacccacctgattatccccatattccaaactttccttctcagctcattgaggctctactctgcctaggctgcccctctctgtctcacagtctggaagatacttctaggcagaactcttaggtggttatatttctcatctcatttgatcctcttccttcaggaatcacagtcccaaattgcttattgtttattgactgaaaactgttgtttcatatattttgtctaattttctagttaattacaatgggagagataatgtagtaccagttcctctgcatgattgaaaatgaacttttttctaatgttcagttcagttcagtcacacagttgtgtccgactctttgcgaccccatgaatcgcagcacaccaggcctccctgtccatcaccaactcctggagttcactcagactcatgtccatcgagtctgtgatgccatccagccatctcatcccctgtcatccccttctcctcctgcccccaatccctcccagcatcacagtcttttccaatgaaccgactcttcacatgaggtggccaaagtactggagtttcagctttagcatcattccttccaaagaaatcccagggctgatctccttcagaatggactggttggatctccttgcagtccaagggactctcaagagtcttctccaacaccacagttcaaaagcatcaattctttggcgctcagccttcttcacagtccaactctcacatccatacatgaccacaggaaaaagcatagccttgactagatggaccttagtcggcaaagtaatgtctctgcttttgaatatactctctaggttggtcataacttttcttccaaggagtaagcgtcttttaatttcatggctgcagtcaccatctgcagtgattttggagcccaaaaaataaagtctgacactgtttccactgtttccccatctatttgccatgaagtgatgggaccggatgccatgattttcattttctgaatgttgagctttaagccaactttttccctctcctctttcactttcatcaagaggctttttaactcctcttcactttctgccataagggtggtgtcatctgcaaatctgaggttattgatatttctcccggcaatcttgataccagcttgtgtttcttccagtccagcgtttctcatgatgtactctgcatagaagttaaataagcaggctgacaatatacagccttgacgtactccttttcctatttggacccagtctgttgttccatgtccagttctaactgttgcttcctgacttgcacacagatttctcaagaggcaggtcaggtggtctggtattcccatctctttcagaattgtccacagtttattgtgatccacacagtcaaaggctttggcatagtcagtaaagcagaagtagatgtttttctggaactctcttgctttttccatgatccagcggctgttggcaatttgatctctggttcctctgccttttctaaaaccagcttgaacatcaaggagttcacggttcacgtattgctgaagcctggcttggagaattttgagcattactttttctaatgtagtgtttatgtaatagttaagatcaggagttgatgcagatgtcaagtttagtctccagcttttactatcttttgatctttggcaacttgttaacatctctctgacttggttgtcttatctgcagaatagacatggtcgtatctaagtcacagggttttatgagcattatttttgatagtgcaagtaaaatgcttagtatagctcctgacacatgttaaagctcattctatgatgatgatgatagtgatggtagtggtattcagctgtatttgcgccattaagtgagggtgttacatgggaagaaaatgctgttaggttagaaattcaagatattgagtttcttgtggcagttaattgtccctgaagtgcgataggatcaaggagaacatggacattttccatccctctgcttgcagaactgtcgagaagttacagaaaaatgcattaatgatttgtaggtatggtagtcacatgagttgatgcttgttctgaaactactcgtatagggatgcagaattcctgaagaaaattaacctgattacatctttttctaagctgattatatctttaatgttttatttcttaggctgtgtgataaggtgtgtttattatatttgtcttcatttggtacaactgatatgattcataattataaaaacttgtcctaccccttcacataatcttgacatgtttttttaaaaagctatagaattaaacacacaaagtgcagtatgatgggtaagataggtctcacttaggtcaagttttaaaatatgggcagaacattaccatgtatttataatgaatgtgggtttgtgtgtatgtgtgtgtttcactgtgtgtgtgtgtgtgtgtgtgtgtgtgtgtgcatgaaaacactgaaagaaaacagcggtttcaagaaagcactttctttctaaggagagaattgggtgtgagggagaacaggtaggggtagaaaaaagccttgaattgaatccctgatgctttgtttctgacaagaattgaatcagatattggactgacatctaaagatctgaatggtgcttacaccagaatttgttacagtctttgttcgatatttatcttaaaaacaagtataataacaacagtgttcaagttggaactaaaactctgcttcagtgtcttagtttatgttttatcaagactttggggaatgtttccaggaatatgattacaaaactagatatcgtcttactgcgggacaattgcagaatataaggttaggctttgaggccagaaatattgctccatctgtgtatatacttgcagaagttattgttaggataaaatttgttaggtaagtgtacctcagtgtgaattttcggtattggagtacagggactcagtcctgggctggtccatgcgctccatctaatctcctctcctctgagcagttagaatcttcagacttcgagttggtgtctcactcctaggatgtagtctgtacaacttaaagggacatatgaaaccccccaactccctgcgtgcttgtgtggttcggtcatgtctgactctttgcaaccgcatggactgtagcctgccaggcttatctgtccatggaattctccaggcaagaatactggagtgggttgccattcccttctccatccaattccattgcttctcctaaacatcatctactgttttttttttttttttttttttttgccatccagccacactttgcttgttttcttcttcttctttttttggttatctcttagatttcctgttcattccctggcttgacatgtgactacttcatctatttccacttaatttcccccttcatctgtaatttcttctctgtttctctcagttttcttggctgactcccttatacatgcctcaggtctttatgtatgtatgtgtgtatgtacctatgtatctatccatttgggtttccctgatggctcaatggtaaagaatgtgcctgcaattcaggagactcaggagatgcaggtttgatccctcggtcgggaagatcccctggaagagggtgtggcaacccattccagtattcttgcctggaaaatcccatggacagaggagcctggtgggttacagtctgtgaggttgcaaagagtcagacatgacttagcgattgagcatgcacacacgtctatctgctatctatctgtctaccttctttaatttcttgcctccctccctccctccttccatctctctcatctgtctgctttctataattccccaagattaatgctcaccttctgactgttattactttcttattcatcttccagcttagattttaaactccactaaggagagaccatgtttgttttccttttccagcacctctgtagtatgtatgtagcgtctggtgtaacgtagccactaaataaatatttgttgaacgaatacatcaatgaagtacagtttgagcttttggctttcatattctcactagatatttaaagttctttaatggaaagtactgcattttaataaagtatttgtgaatattttatgactattttcataaaatattaagagcatttggagtcaaaggtatattttaaagtcagagaagtaatattagaatctgtgggcattaaaataggttaattttcttttaaaaattgatttttaaattttctaacaactagcacatggtttggaaaaaaaaatcaaagaagagtgagtgtttcaaatgaaaatcagcattcatcagctttgtgttgtttctaatcctgtgatattaatagattaaaatttcagtaagattcaccttcaagaagagatagatatatatgtatgtacatcagaagactgcagtgttctcagaaatgtgactacagttgttcagttgaaggtatgatgggaataaacagttcatactgaagggactttttaagccttgatttgtttttttttttttttttaatggcatatgaagggcacagtgcctcttccagtgttagcttgtgtttcctttaaccttcttcttcaaaggcccatcctaaaaaagattcagccctggttttttttgccctcctctctttcaaagacagtatctcaaaaatggtactaatttaagccctgctaaatgtccagatgcagcacctgggaaaaatgaagttcagaagttcaggatttggaacttgcttaagctaggagaatcttcttgctgtggttgcatgtctggttctagaagctggtaacctctttctcgtgggcatcgttccattgtaacagatggccccaagtgtggacgtgtcagagagtgaagcccaggtgtgaacttgtccaagaagttgaaacactgctcagaatatctctcctgccaatgatagctttgttgttgcaattagaactttctggattggaagagtgaacttaatgaaacataagagaagcctttagagctctgttgtccaatatggtagcccaggccacacatgactcttgagcacttgacatgtgactatttcaagctgaggtgttctccgagtataaaatccacacctgtttttgtaaacaaaaacataaaaacatgtaaaatatcacagtagtaatttatatttttgattgatgttgaagtactctttggggcacactaggtgaaataagataaaattaatttcacctgcttttttttaaaatatggtgactagaaaattttaatttacatatgtggctcactttatatttctgtttggcagtactgtttgggctagactcttaaccagggatgtacatgaaacttgattccatttatactttgacatgactgtttagtttgatatatgtcagttcagatctggaatgaaaatcttggactttctacatttgtttcttcataacttgcagtttaaatggagcagtaaaagcaggagtaggatttttttttcagttgtacaagaaatttctagagactaagagctttgcagagctaaaaattcattcccattgttttatttttaagctctattttaagttcctgccaggacgaaaatgttcattcccttttgggttctgatggcctggtaaaaacttctttgtaaacccaagggatgtgatggagttggcacaggagaaaattaatttggttgggatccatgagtggaatggaggtaatgtgcacggcttgcggagtccatcgtcatcaatcactgcagagcccctgcagcaacgccgggctgcctagcacccggccccttggacagcagcagggcaagatacccgctttcccgaagagccctactcttgtgccgtagagaaaagtgttaacgtagagtatgtgcacaatgatgagccacacatatacacattcaataaagttgcttggcatctattcctgtgtgggtgcatttttctggaaaaatgttaaatggagttttccataactttttttttctctcctaaagtgtgcattgtaggatattttccaacaccacatgtttccagtaacttaagctcaaagctcatagcaatgaggcactttcttgtcaaaagtgagtcaaaaacaggaaccttttaattctgtcacatgatgccagatgttataaaacagtaagagcaaggagttcacttttcccccttctcaatcctcagagttttagctgcttgccttcttcaccattgaggaagccaggaattcagaagtgtgggtcggatattctccgtagaaaatgcatttaggagcgtacactttaactggattataaatagtatctgccctgacaatgctgggattttctcagcttctggagacattgaagtctttgtttcatgggtcactgctctctcccccaccccctaagcttgagtcataaagcttgacaaattaatgaggttgctgaaacttcaaatctagtgggtaggacgtatgggaaacaaggagagacggcagcaaccatacacttggcctcaagatggcttctctcttgctgtcctgaacttgctcgctttgccttttattgcttcaggcccttgaatttattgtttcccttcaacaggatcaacttagattgaaaaaattagaaaaaaaagtgtcaataggtagcagcaagactaatattagctcctgaattctctatttagaatagaaaagaaaaaaaaaaatctatccatgaaagaagtacaagccagattgctttgatcttgtgtgtgtgtttgtattagctatggaactaagaatggtttttacagtgagtacttgttctcaaccacttaagggaaaacaaaacaaaaaaataggcaacacgaagtctaaaattactagtgactcttggtttacaatgtgtttgctgtgtaacacttgatactgggtatataatcaatcaaattatatatatataatcaatcaaaagccaatataaaaattcctttcttgggttgtgtcagttcaccgaaaagatatttcttgagtatttgtttcattcctagcactgtcctagatactggggaaataaagtttaaaaaaagagagacattgctaccttcacagagcttaccttcctatggagaaaaaaaaagactaaacactaaccaaatctaatggaaataagaaactggacaacggagtctcaggaagagaaaacagctaagtgaggtggagagtaacagagcagcttctatgcgtctcagcctctgttcttccttccccagactgtgctgcaaaacagtgacaaagttatttcccagattttgaatttacccccgacccactgacataaaacattctttgcttgtccctgtgatttccttactagtctgttttatttcttttcaaaagtctctttttgccccagatgaaattgattattcagctcaggcgtattgagtcctaaattaggttgatgttcacaggaagtacttacgttcattctgctttttcagtcagcttttctgcaccctcctacttaagggtagttgcttgtatgctccatacagttctgttttgaaccttagtcttacatgcttttttctcccctcttctggagaggtttatgattattttatttctgttagcatcagggtctttctccagatctgatgttccctcaaaagcctgcatgttgtgatctgcaccaaagtgagttattggccagtgtttgctcatatcctttattttgaatctttcctgttgttggaatcattcataacactacctgatcattaatcctctgctctgaggatatgagtatgatttttttttctggttccaaagatgcactccagctttgcattttggttggcaaaatgaccagagcttggacaaaaggccaggagtgacacacaaacacaggcctgaaatgatcatattacagaacagttaccacgttcgtgtgaatggctaagcaaaggtcaaaaatatgagcaacattatttatggctcagagagtgatttgatattcaaagtctgtcatcatttttcagaagaatggtattagcaaaactgtgccaggctaaggactctctaaaaaatgatttgagacaagctcagtatacagtaaaaaaaaaaaaaaaagacagtttaggtgtatcccaggagacaagaactctgcacctgatgtggaagtagttctgttatcctgctgttgttgtcaggtttgtttgcctcttgacaaagaatttttccttcttccagatcagttttgtcacctttagccagggcagttcttacaggatgaagttagcacctgtggcttgcatggacagtgctgggttatgagaacttactgcagttgcttgctgtaagatgtgttctagttatcagtttattgtctctgaggtcgactttcaccctttattgcctgctgtgtgaaaatggatctggactctgcagatgtttttcttttgccagttggcatgatgttcagctttgtcaggagagggcgctggagagacgttgcaaggtgaaggagttttcctttctgcagcaggtgtgtctgctcatcacagtgtctctggtgggccacctctctgtgaatagtcttcccaggcactccagaggatggagttcaataagttctgtaagtgtaggaccacagtgaattccttcccatgctgagagctcctggatctcatccctggggaggaggaccctgagccctaagggtcgtgacggctccttatgtctgctattcctatattagagtttacttcttattagctaattctctgtgatagttaataattcctttcttcattcaaatttctctggtttgtctcctgattggatcctggctaatacagtgttctatcatcagaattaggtttcattcttgcactgcatgaagcaggtaggtaggagagtctaatgaatttgtacaaaggagcatgaaatctgaatgttataagctattgttactttctctgtgttcttctgattgaatgaccaaatcttaggaaaaactgaaagtctgcaattatctgtggtcaaagtggaggctgctggtgccaatgtgtgctctcagtcgtgtccaactctttgcgaccctgtgaactgtagggtgctgatgatcctagagttaaaaatccacacaaggctttgttggacctgttggccattccgctttgtgtgggagcttcaggatatgtgaacaaggctgctgtgggacccagtggtgagtggtttaattcagtgcctggggattgtctaccgagctgtaatatctacatggataatcagaggtctgcttccttctacccttgtatcatgtgatagggttgcaagcggttcccattttctgagtgaatgctgcatcagtgtgatatgagcaagagtacagctcaggggaaaaaaaaggactagaatgaggtgccattgaggattattgggtctgatttcttccatttttggatgaggaagctgaccacaggtgaggttaaatgccttcctgtcaagagtgcactgagacagcaggggaatacaccaagacagattttttttttaacttctagtcagttgttttcccccaactccaatgtatttactttcagatctctaatgatttttctttttttaaataattactttataattgaagtacagttaatttacaatgttgtgttcaagtgtactgcaaagtgattcagttatttatatatatatacatatgcattcaggttattttccactaatgggttagtaaaatatttaatatagttccctgtgctatatagtaggtccttgttgtttatctgtttcatatatatagtagtgtgtatatgttaatcccacattccagatttatcttctcctctccctcctctattccctttggtaaccatcagtttgtgttctgtgtctgtgagtctatttcttttttgtaaataaattcatttgtagcatttatttttagattctacatctgagtgatatgtgatatttttctttgatttatttcacttaatatgttaatcgctagcttcatccatgttgctatagatggtattatatcattcttcaaattatttattttcttatatttgaacttaagatttctaaagcatgggaaaatatagagtgcttcattaaagaatatttgagtctaaatacattaaaaggataaagcagaagatgccttaaggaggtacatcttcttttgataaaaaatattttattgaagtgtaatatatgtagagaaaagcatacttactttaagtgtatagaatgatggcttttttttggtaaattgaactcctgttatccagctctcaggtcaattaatcagatgatccacagatgctcccttcttgtaccctttagtcatcaccccaccctatagtagccaccaccctgattcataactgcacagattaattttgcagttttgtgctttatagaaatggattcagtcatatttaggcacttgcctgtgcctggcctttattcatcatgattatgtttgagaaattcatctgggctactgtgcatagttagagttggtttttttcatgattatatggtattccttcaaatacatttttttttttttttgaggtttacccattctcccgttaatgggcatttagggagttttttggtttggggcatttacaagtatgaacatttgtcttcattattatcttttaatgttttgacataagaagatagagaagtgtgaggtttagggcaaaagcttgaaattagacaaacatactaactttgatcctagtcaagttatttacatccttaagtctgtctccttatttgtaatgaccatcgtgactagtgtttcagaattttggaaaaaaattgtgtgaaatgatggatgctctacacagtgcttggtatataataagctctcaaagaatagaagttgttagtatttttcaagttaatgttttttaaattgtaacaaagcatcaagataattcactgtctgcattctgttgcttgtgcatcatgtttttcagagcttgcgcttgtttgtttgcatcttctttatcttctctcttcctttctccacgctatatgcattgcctgcctgttataatccaggtgtaggggcagggattgaagaagagtttttagcagatttaattcttgagttatcgtctcagtttttgccattgtaggctcaccattagaataacatttgcttttttttttttttgctctgcccaaagatgcaaaatccttgcaataagaggtttgtacgcctgagcctcagtgacctggaggaaatgagaaatcaacagtttccttctgtagttcaataaccatttactcttcctgccagatgatatgatagaaacgctgtggatcttgaaggcaactgtcttgaatcccacctctagaaaattcctgttaggagtaccgtcaggattgttctcgccttcatttataattggcccaaaggtagagtctacttgcctggatgcctcgtcagtgagtactgactttgggtttagcctcaaataggctttcctctggaatgtactaatccaatgtttagttggacttgggggacaatcattaactcatcctgatttaaggaagctttgtgaatgactagaaatttcaggattatgtttatatagtttcaaaggtcatatttttagacaaaggataatttaagaagattggctagtatccctcatcaatcttaagctattttaatgaaaacaggaaaggacagcctgtttacttcttaggagtgtcatacatctgttttgtttataaattatatttaatcctattttatttagattatatgtatgtatatatgataattttcaaataggtaatgttaacaaacttaaaataggttaaggaaaatatttgtggcccaatgtttttttggctaaatgttttgtttatcattttagtagcatttttaaaacctctttatactagtttggacaataaatatgtttctgtaaagctgcagatacaaatatagaagataaatatataaagacaatattttataaatggatttaatgtaaaatcaccatcttatttaaatacacgaaatacatctcattataatcattctacataatataggatctgttataaagtgaacaatctttctaatttttgtgcttaaatcttgggataattttaagtgaggtgtagtcagcgttttaatgtattcttggagttagatattatgagcaacatggacttgttaattttatttctagatagttgaaataagtatctgacagaaatgtattaagaagcagaacaattatttttctctatcagctgaaaagcaaatgcattattagcatctgaattgaatgctggaatctccaacatacatgtatgtctatctgtgtgttttgtgatctgagtcttgctactgaaagtataatccatggattagagtggttcatgaactgcatgtcagacatcagtgaactgtgaacaggtattgagtgttcaaaaacctttatagcaattggagagagtgattttaggtctcttgcttctcatacggatttgggcttgtgtatttgtgtgtgtgtgtgttttgtttttcatttgtcttagaattcaattttattgtagtttacaaaagtattggtctgtgttggatttgaaataaaaaaaaaaaaatagataaagtgatgcaaaccacaaattgcaaatggtttgagaaacattggtgagaaacctccatgagaggtttctaccaaggcagaaaggtggtataatttctaatctttaaaaaattaattaattaattttaattggaggctgattacaatattatggtggtttttgccatacattgacatgaatcagccacaggtatacctatgtcccccatctcaagccccctttccaccaccctccccatcccatccctctgggttgcccagtatactggctttcagtgccctgtttcatgcattgaacttggactggtcatctatttcacatatggtaatatacatgtttcaatgctattctctcaaatcatcccaccctcgccttctcccacagagtccaaaagtctgttctttatatctgtgtcttttttgctgtcttgcatatagcgtcatcgttaccatctttctaaattccatatgtatgtgttaatatactgtattggtgtttttctttctgacttacttcactctgtataataggctccagtttcatccaccttattagaactgattcaaatgtgttctttttaatagctgagtaatattacattgtgtatgtgccacagctttcatatccattagtcttccagtgtacatctaggttgcttccatgtcctagctattgtaagcagtgctgtgatgaacattggagtacacgtgtctctttcagttctggtttccttgttgtgtatgcccagcagtgggattactgggtcatatggcagttttatttccagttttttaaggaatctccacactgttctccatagtggctgtactagtttgtgtttccaccaacagtgtacgagggttcccttttctccacaccctctccagcatttattatttgtagactttttgatagtagccattctcactggcgtgagatggtacctcactgtagttttgatttgcatttctctgataatgagtgatgttgagcatcttttcatatgtttgttagctctctgtatgtcttctttggagaaatgtctgtttatgtcttttccccactttttgattgggtagtttatttttctggtattgagctgcgtgaattgcttgtatatttttgttattaatactttgtcagttgcttcatttgctattattttttcccattctgaaggctgtcttttcaccttgcttatagtttccttcgttgtgcaaaagctaagtttacttaggtcccatttgtttatttttgcttttatttccattactctgggaggtgggtcatagaggatcttgctgtgatttatgtcagagtgttttgcctatgttttactctaggagtattatagtttctggtcttacatttagatctttaatccattttgagtttatttttgtgtaaggagttagaaagtgttcattcttttacaggtgattgaccagtttccccagcaccacttgttaaagagactgtcttttctccattgtatattttcttacataggcatgatttaggacatggaatgctgagctcttgttgcatcaagcttttctaatccctagttaaccatatcccctaacatttccaatgtagctgttctctctgtttaattgtaatgttttgagcctctgattttttagagtgatttgcaaagaagtatttatttctttgcaaataaattcaataaatttatttgcaagtaaattctttggacttagtttgcaactaagtccgaaaaatttaatcattcattcagacactttttatttatggaacatttaactgtggaccagatactgttctaagcattgggaattcatcagtaacaaaacaaaatggaacaaaacaaaaaacaatttctgttctcttctagcttatatgaaaagaattggaatatatcaatatatgtgtacacatttgtatacacacacagacacgtatgaactgcaaggcggttgattgtgtccaagtgcacccagttccccttgggctatgactgcatgcattcctctactctatggatattaaggtcactattgatgtagttttgtgtttgaaccctgtgactaccagaaagtccccaggggacacatgtatttggcttctctcagggctcttggtgcttgagcatgacctccccaaattggtgaggataatgaagcaagcaaagcctcagagcctggaggaaccttggtgcccattgtcctgaaatgctgtccacctttgggatgtcattaaatatagagtttttccaagctgtttctttgtttcagctggaggaactacgatctcctgtaaaatgttgttcagatccttggagtctaagacagagatgtcagctttctgaaattaggacaggtgtctagggtatatgtactttttgggatgaggtcgtctagctttcttcagcttatacaagtaattcatgaccctcaaagctgaagaatcatggatatccagtggccaagagccttttgcagtttggatcctgttatttcatctggttgtgtctcttcttttctcccttagtcttttcctgcagtgactagacctgcttcctcactgtggctccagtgtggcctggccccacctgagatgcttgacctccaaccatccacagagctcatctcctctcctcctttaagcttttgccctattgttacactctgggcttaccctgactaccgttcaaaataacatccctctcctgtccctatcttggtccttagtgctttatttttatcctggcagttgctgtctttaacagatgttgctgtctttagtgtcttagatgacttggttatttactagctttattgtccctatgccctttctcacccaaatgttgcatagaagtagaaacttttgtctccttgttcacggttgtatagtgacttccctgggggctcggacggtaaaacatctgtgtacaatgcaggagacccaggttcgatacctgggtcgggaagatcccctggagaaggaaacagcaacccactctagtactcttgcctggaaaatcccatggatggaagagcctagtaggctacagttcagttcagttcagttcagtcgctcagttgtgttctgactctttgcaaccccatgaactgcagcatgccaggcctccctgtccatcaccaacttccggattttacccaaactcatgtccattgagtcggtgatgccatccaaccatctcatcctctgtcgtccccttctcttcctgccctcaaactttcccagcatcagggtcttatcaaatgagtcagctctttgcatcaggaggccaaagtattggaatttcagcttcaacagcagtccttccaatgaacacccaggactgatctcctttattatgggctggttggatctccttgcagtccaagggactctcaagagtcttctccaacactacagttcagaagcatcaattcttcagtgctcagctttctttatagtccaactcacatccatgcagttcatggggtcccaaagagtcggacacaactgagcaacttcactttctttctttcactgttgtatccctggtgcttcaaacagtatctaacacatagtgtgtgttcagtgtatatttggtatacattgaataatatgatgaataaatatggaatctgattcttcctttcaaagtatacaacatggagtttcagttcttccagtttagctgagattccttgtgttgctctatgtgtatttcagtcctgttggttgtggtttcatgaatctcagttcttacgttgccatatattaactttcagtgttttcaatattttatttttctttccatgtgtcagttattcccatgaggcagttttgtctttttcttactgattttcactgtttgttgaatcttattttatgctggaccctccaagtgttcatggttaagaccttagacaagctagagaggccagcaatctctgtctctcagtttcttcatccgtataatgggaataacaataatatctaaccttttaagattgctgtgaggatgaaataagatgatccttgtaaaatggaaaacactgtgtctggcataactattgattgcattaattctgataacagtgtaagtatattatggctcagcataatgtctgcatgtggcaggaacaaagtaaatgacagttcttaaagttattatgtttttccctcccattgttaccaccactaatccactaatgatgcagtcccagacaatcatcaaagagcagagcattaacgttctagagaaggttaaaggttgtcctcccttctctttttctctttttcttcctctttattttctatacactgtttgcctacgctttccatgtgatggaagagctttcaggtttgaaatttattcttcactatgcaaatctgatcttggttgtcaccatgataacagtactcagtctttttttggttgacattctatttgaatggatagtaataggtccttgagatgtatttccacatacgtatttcacaacagttggactttctggcaatggtttcattttttttttctcttggagggcatttcaaggagctgccttgtaaactctgaatgcctgggttatttgcgttgtgtcttttcatcctcaatgccgagttaataaaactccctagattcgattcttacaagtaatcaaccagcaaatgtttattaagtttatatatggaagacttttgtagctgcagatttgcatggtgaaaggtgagctttaggaagatcagtctgggggctgtgtatgtaagtggtggtggggatgttgcaaatccagcggagaagggaggaaggggctatattgtgggaaatggtgagaaccaaaagtgtagcagtgaccttgggagtggaagaggaggtggtgctctgggcgtgtgtatttctgctttcttaggtaccaccaacaccctcccagggcagttgccccaactttcatttctaccagcaggggctaagagttctcagtggcccctgttcttgccaacacttagttactattgctgcataacaaatcatagtaaaacacagtggttgaaaataataactatcatctcattatctgtcatggtttctgtgggtcaggcattcaagggggctgtcctgggatgtcctggctctggacctctcatcagcttgcagacagatggtggctgccagactttctgaaggaggaaaccattggtggtcagcgcatgtgtgaaagtgaaagtgttattcgctcagtggtgtctgattctttgtgaacccatggactggagcctgccaggctcctctggccatgggatttctttaagcaagaatactggcttgggttgccatttccttctccacggaatcttcctgacccagggattggacccaggtgtcccacattgcaccagattctggtggcatctgaaccaccatggaaaccccatcaatatataccttttctaacaatctcttaatctcaaggcatagggccagacaaaggtgagtcaagagatgaagttctgacactgccaaggaataaatgagcagttattgagtatcaaccgggcacagtcttatgcaaactgctctactatgatgaggttatttccttcagcatgatctttcctcagtttgcttcctagacaagcctttccttaagaactctatatttaaatacatgtccttctttatttccatcttgtagttgatctttagttgctaagtcgtgcctgagacttttatgaccccatagactgtagcccgccaggatcctctgtccaagggatttcttaggcaacaatactggcgtgggttgccatttccttctccaggaaatcttcctgacctggagatcaaacccgtgtctcttgccttggcaggcagaatctttaccactgagccatgagggaagccatttccatcttcattgctcaacttatcacctccatagcccttttttttctatttacactctgtgtgtagttatttgcctatttattacctcacttgccttcctccactcctaagtgctagactgagggttcatgatgacaaggactctgcctctttcatatacatcacatatatccagtaaaacttgagtttcagatcaaaatgagtaatattttaatataaatctttccaaatatgggacatataaaaaatgtgagtatatctcaaatacttaaaaactatatctgtaaaaatgtatttctcaaatgtggaacatgctatactgaaatatgtctgttttatttgaaactcaaatttaatttgatatctggtagttttatatgctacctttggccactgaagtacttggtatttagcacagtttgtgacatataatagaagctcaaataaatgtttgagtcaatgaatgagcaaatgaaagagttcatatcttttttcaggaaaattttttccagatagatattattatttaaaaaaaataataaaagggaacccttctacgctgttggggggaatgtaaattgataacagccactatggagaacagtatgaaggtgctttaaaaagcaaaaagtagagctaccgcatgacccagcaatcctattccgaggcatatacctagagaaaactgaaatttaaaaagatacatgcaccccagtgttcgctgcagcactgtttacagtaaccagggcatggaagcaacctaaatgtccatcagcaaaggattgcacaaagatgtggtccatatatacaatggaatattactcagcaataaaaagaacaaaatcatgccatttacagcaacttggatggacctagagattttcatattgagtgaagtaagtcagagaaagacaaatattacatgatatcgcttatatatagaatcttaaaagaaaacccaggtacaaatggaacttaaaaacaagtagaagaacgaatataggaaacagacttatggttagcaagagatgacgattgagagaataaattgggagatgggaactgacatatacatactacatatataaaaatagataacaaataagaacctactatgtactctacttaataatctgtaatggtctgtatgggaaaagaatgtaaaaaagagtgaatatatgtataactgattcactttcctgtatgcctgaaagtaacacaacattgtaaaccaactatgctccagtaaaatttttttaaaaagaaaataggatttgtgtttgccttaattttttagtgtgctattgttgttgttcaattgctaagagtattgagtctgtactctcaggaggcactcaatatttgagtgaattacagcttagttctctgtgtggtgggatttttacatgtgactttaattttattcataaacattttaaacatttcttaccatgagccatttttattaaaaaaacattttcaaaacttggtaagtaactggaagaaaacctatagtgctggaatcctttatccacagttccaaaatttagaagtttctgagtattgaatgatttttttaaatctcatttagaagaattacctgacctgaaatgacacgagggtatttatagtctttattatctcacttaattgaatattcatattttctggcagaaatattagtacatttgattatgagccattgccctaatctctctagggatatcacactctgtatatactttaatgtgttacaaaatctagaaaattctgacatccaaaactcatcagtccccaggagttattctgaagaatgtttgtgtgtgtgtgtatatatacagatgtgtactgtgtatatagaaatttctgaaacgatacattgaatattgttaattgtgattatctctaagagaagggattggatggggatgacagtgaaagatgaatttatgcttgattatcttcttctttagtatttctaattataataacaaagtgattgcctttttcaatgaaagagtagaattgggtggaggttttatttaggaaggtagtggtattattcatgttaaaggctagtttatcaaacaggctatgcctttacaaattagttcagtatttctctctgctggcagggacccagaaaacgttatgcacacaccatgcagcctattgccttttggataatgtatacatggtctagtgacagagaatttacatcagcaaaaacactaattttgcttaaaaaaataaaatcaaggcactcaaaaatgtgatgagtaaatgaatctactgttattagtgatggttttggcacgttttacgaagtctgaacgattactcatcctctgtacgtttgcagaagtggcttcaacaaaagccagatgcatacgtactagcaggggtcagtaggtggatgagaggattaaaccccgtgagtttttggagccctggtttgtagctgtttttggcttgtcgacaggctactttactgagtcagcctataggatggcttcccagggtaagtctgattttgcttttctgagtttaaaatatacgtggtcaaggagagctgactcgttgccttttgcactggattgcttttgttaacagtgcctgtgtttctttctgtgagagacatttatcttattccagcatattctggtgttcctgctactggtttttatggctttacttcacctccctgtagtttttaaagtgaaatgtcttaagtgctgaaaggatttgcaaggggaattgcaaaggtcatatgtaagttctacggctggcgtatggagagcagtgtgattgaaccagagccctcagtgaccctttcttttcaagaggatgtttctaataaattagcgtagcatgctgtatgtgcctgtttatgaccttaaaaatggtttagttcttgctgagtggctattactgatgctttatgacatgttataatggtttcgacttgcacattttttttggattaaaacaatgtcatgcatcagtcaatgtgaagttcatttttcctttttttttcttttaaagggactcaggagaacattcaacattagaataagtccctggattctgacctcagagaagggttggttcttgaggttagaagaagtaaggattcgccaagctcttacaaatgagctttgtagtagttgctggtgaaattataaaacattgcttttcccactagatattaaatgcctcttttcattagctgtagtatggggaacaaaagcatgtgatttttctttttttaaatgtttaactgtagctacttttaaaaggcagttttcattttgtggctggttattttttttgtttttttcttccggtatctagcacagttaaggactttatcttttttgtatctttttaggacactctggtgaatgatggggtctgaatagctctcttaatggaggagggtaccgacaagcctgggctggaggggctggaggagcccagttgcatctctgcccggcctgcttgtggctatattgcccatgtcccttcctctccagctctcgggctggaggaggtcactgtgatgtgaggactggggcatgtccagggctgagagcttttccgagtggcagagacatctctgtgggctcagaaggcgatgtgcctcaagatttctgtccattaatgtttagtacccatgaaggggaaaattgatctgctctacatataaccctttctcaagaaacactgatagataaaaaggagtaaaggggttggagttgattttttttttaaacatgcacattagagctttaaaaaaaatcaaagcatttatgttcttagtggaagtctgaaacctcgtgccaagggctgcatggggttggaggttaatatggctcatctttttcagagcatccatagttctcaaatatttgggatacaggcacaaaagcctcaataattcaattagtcagtaacttaagaactgtttcctgccgataaaagcaaggagatattagagagcagaatgtgagataaaatgtgaggctgcctggagacctctcccttgctgatgatggtgaactcagaccgttctcctaggccttccttccaggggcttgcaaggatctggctcaaaacgtgctttggtagaaaagttatggggttcacgtttgtccctttgtaaacgcagtctttccaagactgcttctatgggtattcaaggtgaattggtatgaggtttgaaaaaagcctgggggcgagctggaatatttaatccaccatgtcacacacacatgggtactttaaaaggaacaggaatcttgactagaggcttagctcactaccacctggaaatggctatcataataagacattggttctttttcaatgagagagacagaaaagcatgaagtgtggtaaagactggcacctgagtatgtaaccctgtgacctttgccaatgttccctccctcccctggtgtggaacctgaatagtggtttagctaagtagtcaattaaaaaaaaattataattgttttattttaaaaatgttttatagataggagtaaaatcagtgatttcagagcacattatgtgtctggattatctcacctcttttgagttttgtcccttgttgccctcatttctcagtcttttctcagcatctcatcaactgacaagatgcaaccccaaacagctttccacacctagttgcttgttagctaattcaacttaaatatatagaatgacatatatgtttcaatttgtgggaaagaaactcaagaaaatatatacatatacgtacacacacatatttgagcacagtctttgatgcacacacacagatatttaggtgtatctgtatctatctttatcttccccgtaatttactcaactcttaaatccatcatcacacacgcgcaaaataaaatcttaaaataaccttcctggaagaaataaagagggaaaattagtaggcagtcttcatgacattttaatatgtgtatttactacttagaaatattcaaatacagctttgttttgtatcattaattctggtggtacaatatttgaaaaggtgacagatacaagggcagaatgcaattcttaaagctgtaatttgcagccggctgataataacaagtccattttcttttccaaatgtgctatttatataatttatatttttaaccaatcctagaactcggtcgaaaatagtaattaatcttaagggtaagaaatgttgcaactatgccagatttggaaactttaagaaagtctctggatggctaagcccaatctattgagtattctaatttgcatgtaacacattgctcagcagatagtgcgtgctcagttaactttaaataattgagtcaacttggccacactttgttttttttttttaaagaaatgtacagagaggcctggcgtgctgcagttcatggggtcacaaagagtcgaacacgactgagtgactgaactgaactgaagcatatttagttaagaagtggcaggccagttttaaagcctagttaagataaacaggccaggcgaaacagtgcatgtggcaaggatagtggtgtttatatgtgcaaagagaaaagactgaaaggaagaacatcgaaatgtttacttttgatgatgaatgatttctattttttatacagtttttttgctttcatgtatttttccaaagtgagcacatgcatcctttgaaatgtagtcatttcatggcacatattaggccttacataataatttgttaaatgctgagttaatttataatgaaaatgatacacatcagatgtcagtgatgttgcctggagttgggcaacacgacagctttgaggaaaacttacattctagtgaaatcattttttctttctcgaataacatttagtatcccagtatgatttgctctaacaaaacatacacgtttctaaaaaagacttaaacaaacaaaaaccactagataatgggaaatcatacaatagatagtacagagtctgtaggggcccctatagtctataggtgcacaatactcaaaaacttcctcaagaacataaaggaaagataggaaccttagaaaaacagagttttacacttgctaaatggttaagcagcatgcaaatacaatacaacttctcaagctttgccttgaaaagacctagtatttttttgtgaagggagttgcgggaagggttgcagcttgtatactctagtgaagcggtataagtaggcttgtctgaaattgagtgggaagttgtagcaaagtactgggtggttgtggtctgtaatacacatggtaactgaagtagcaggcagatgtttgcagtatgtacatcttgtgtatttgtacactacttgattcagtagggtgtggttttctgtgttcacttactgttccttggtgaccaaaccaagttcatgtgggttatgctcaaattgccctctgatgtatcagtcatgtttgagcagatttgcattttcaaaatgagcatcgtaacagaactagctctatatgaaatagataaaatcaagttgcaccagttctaggcatgtcaagagcctactttggaacccaactgcccttttagcaccccagtgattccggggaccatcattgtgtggcctagagattgtgtgtccttttgttcgtgacctggaagagatataggacaatttgttgtttgttttttttttaattactttttttgtggaaacattttgttgtaccgttgtatccttccttggcttgtggctggtaggttcttcaacattcgcaaacttcagtcctattactagatagactatctggtaaagcaaatgaccttgaacttaacaggcacctcattccaggtcctcaccagggaatctaaccttgtacatgatgctactcaatgcttctcaaattgcttctgtgaaaaaccaacatttatggattaccatctgaaggatagaggttcatctgttactctgaatactctgaaacaatgaggaaggagggcagtgtctttaaaaaagccatttcacaaggtaacttttagtttgatttgtcaaataacataaaagaaaagcatgatagttttatatttctcagaaagattcattggttataaagtaggtaagggcagtctactgtaatatctgtacctgaaataatctagactagcagaatctctaaacctgagaatttgtcctgcccccatttccccgtcaacctcagcagttagttttatttcacgacacttagtatttgatactcttaaccccccggaaggtcatcatgaggtataacccatgaatcctgattgtatggggtggttgtcttgtggatggatattccagtgtcttctttatgaagattcttggaagaagtgtctctctggtttttataccacaaatgactgtacttctactcaactttgggtttttgttttatggatacagttagtcatgtaactgatcatgtcttcttcctctttatggccacaggcatgttttctttaacccatactttttttttttaaccaaaagaaaaactagtttgccagaactggaaaatgagatttctcacaagtttgtttggatttccagcatttactgaaaaatcagatctggcagtcctgggatcacgtgtctccatggcaaccatgggatccaataaagtaatgccatttcccttacaacagagcaggcactcttacctttgttttacctccttactttaactgcccggcctgtgtagaccttggactctgcccggtagctttgaaagcaatttgtgacttacctttagaaaataggcaggctcctatttgccttttgggagctaatgtattcctagggtcatgtaattttttttttgaattttctttcatcttgttttcttcatccacgcacattagttttctgttgttttatattgtggggttgtgtgcttttatgtaagctgccttgagtctttgacggggggaagaaacaaggtataaataaagaaaaatagaagagtgactttccccctcagaacatcttatttttattttttgcctggtaagaatttaaaacaatttcagctcttttctgacctattttagaatttccttgattctagtaccattcagagctctgcagttccttgttagggttttgttttgctttagtagctcttcacagagactctgagaaagcattgcttttacctgattcattgacttcccatcatggtgcattaggaactgaaaattttctgttttgaaaatagattcatttgtatcattttttaagattccaaaaattccaaaatagaaacagattcacagacccagagaacaaacttatggtttccagggagaagtgttgtgggtatagattgggagtttgggattgacatgtacacactgcaatatttaaaagaggtaagcaacaaggacctactggatagcacagagaactctgctcaatattctataatcacctaaatgggaaaaaaatttgcagaagaatagatacgggtaatgtataactgaatcactttgccgtacgcctgaaactaacacagcactgttaatcatcttaacttcagtataaaatttttttaaaaaagaactgaaaagttagctaagtcagaatatttgttcatgcagttctaagagggaagattaggccaccatgaaccttctagagtttatctgccaagtgcaaagaccctgagaaggtgccattcagcaccctgcctgtggcactgctgtgacttccggggacagggtcagagaagtcagtagtctttgctagtctggggaccttctgttctcaatctggctgttagatgttagtgtagcctgcatagtgttgaaaacaactctggaccaatcaaaatgtgtcattaatttttatactctctttagtgtttacatattcctttgaaaaatctggagacccaaacatatgggccagcattcaccctgcatggttgtacgtctagttcaccacaccctcccactacctcttgtctgggtgactctgacgatgaatgccatgtgcccagtgtctctctccatttctctgtatgggactgttgttgcttaaagccatgtcagtgcaccaccctaactcatctgctgtttagcataaaccacgctgtggcatgttttcctgctgcggtagtcaccttcccaagccactcagctctttccatggcattcatgtttcgtgaattgaattgtgatcactgtctctcttctccccagtctcagaattgcaaacttctcagcaggaatggtatgctattgctgctaagtcacctcagtcatgtccgactctgcgaccccatagacagcagcccaccaggctcccccatccctgggattctccaggcaggaacactggagtgggttgccatttccttttccaatgcatgaaagtgaaaagtgaaagtgaagtcgctcagtcgtgtctgagcctcagcaaccccatggactgcagcccaccaggctcctccgtccatgggattttccaggcaagagtgccggagtggggtgccattgccttctccggcaggaatggtaggggtgtacctaaaagtgtagttcaaaagatcactgtgtttgtgcacccaacacatttattgagcacctactgtgtgccaggtgctgttcctgtgctaggcatagagcagtgagtgaaatgggcgcagatacatacctactggagtttacatcctgttaggggtggtgataagtgctgtgaagaagaaagccaggaagagttcctgtttcatttggggctcataggctagagctcaattcttaggtcccttttaaatagagatatgaattcactcgctgaggagtgtagaccaaggggatagcagtgagagtaagatccccgaggaggagcatacttgcatttggtgttaggcatggtttttacttcagtgctgcgcttcctaatggtatgaattagggtcagttgcatttgcctctggactatatctgtgcattcatctctaaaatgcaagactctatatgaggttcacagacataaactactgtacataaaataaataagcaacaaggatttactgtatagcacaggagttatacccaataatggaatctcattttcacacacacacacacaaaatgaattgctatgctgtacacctgaaactaaatactagtattgtacatcagctacacttcaatagaaaaaatcagattaaaatgcaagtttccacatttaggaaggaacgtggcttcctcattagtctctccccaaggtcaagtctggtctttgactcttggtaaatgttgagtaaatatatatgcaattaacagatggacacataagtcattatagaaggatttgaaggatctcaaaagcatagtcttagctaagtgtctttcacaggctcacagattaatgacaatgaacatgaccagctctgaagcatatgtgctgagagtttctctttaatggtgactccacagtttttatgctcagcaagctgcatctacagagtaccactgaggaatatgtatgacggaggaaaggggcctgaactgtgtctgtgttgttgtagctgttactattcattggtatgtcctgactcctagaagagtctctgtgggcttataggaggaccttaaagaacatttgttaaagagtgaataaaatcaaagccggcatacattttcacttctttcataaagcagtgttggagtcacactgcattctgcctgttttcttcccaagaaagatacactaggtccagagaagatgagaaagaccacagcaatgtcaggatcagactgagctttaatgtcttacttgctttgcttgaactcatttatttacgttcttcatttgcagttgggaaatggaagcttagagctagtggcagatacagctagtgtgagtccagggcttgtgttcttactcatggaatgcatcgcttatagggaagaataactagcagatacagaaacagaggtatgaaaggaattcagttccactatattggcgttagtaactgatgacttttaatgctattggaagtttcatatatgacaggtttcagatggagagaggggtctgctttgtaactcacacttacctagtttgtgtatgcctcagagactgcgttcgtgcagtttctggaggattgatcaggttttctgaaagccgtgtgggaaccccttcctaacgtgaatccttgttttgttccactaacgtgtggataatttccaagtgtgacagttacatccctctttcttcatagcctatcagctttcgctatcgcattcatatttaacgatgtgctagcaacactgtcctcttgtcagcctcgactcctcccttctgtccccagttcatgaacaaactcttctactttagtattattctagggcagttaggttttttactgcttatttccattttcagtggtgtgaaatgatttattacttttgtgcttttgaaggagaacagatttaaaggtggaaggaagcttggtgaatttctagccatctgttgagtttgggaaggaccactggaacccctctgttttgttttcctgtgtacgtgtgctttcaaatgaggggaaagttgtgatttttgtagcaggtgtcagcctcgatggcaaggggaagcagatatcctggccagctttctggggaagaggagaatggttgtgtattctcatgacttgatttttccagtgctgactgtatggcaatatcattctggcaaatattggctggccgtggaacatttttaagtgcaagggtttaataaatgttctgtctattaccatggctgaggaatcaaaacaaaatactcttcacacagttcctcgagcattcatggatgggttccagggtattgcttttacgttagctcctctatgtgtgcagaatctaaaataaaatattactgaaaacacattgattaagaagagtagggtataattttttgtaccatttcccttttctatacagtaatactgtgccaggaaaggtgatacagatgaactgcatgcagaaaggctttgccagaatttatgtcttcatactcttgttatggtaatgatagtgttgacaataatatgtaatgtctgtgtgtagctgttgataatctctgttctcacctaaggaaaaaaagctaacactggtaatattaaaaaccaaaacaaccccctccccccatttatcccaacagttgtcagattttgtttcccccctactctatagtgtgcttctcacgtatttatgtgattaatgagaatgagtaattgagtataagtgtataaggagtttataaggacaatattttactagtgactttttgcactggggctgtatttgggcagagattcttctgcagtgcttcatgtgtcttaagaatgtagcagattgtcccagacatgaatcagggagttcatttctgacactattttggaggagttctctgtgggagtctatgtttgcgtcaggctggggtgaaaatggcagtgctgatactgttaataataatggctacactgtattgaatgctcacacatattcattgtatcaagtacacaaggtgcattgttccatggattgtcttacaacacctgtgaagttggggctcctcttgtctccattttacagacaaaaaaactgaggcttagagcgatttgattatcccctggctgtacagctaatgagaggggacagaccttcattttgactctgttctttccttcctctctctcctctttttccttccctctctctttctctcccttttcccctccctccttctttctttctttctcattgcaggggactttataggcaaatcttgttttcttgtactttgatttattgcactttgcaaactatatatatatatatatatatatatatatatatgtataatatttttttgaacaaactgaaggattgcagcaaaccttcttcaaacaagtctatcagcactattttcccagtatcattttctcactttgtgtctatgtcacatttggtatttcttgcaatatttgaaccttttcactatttttatattcattatggtgatctttgatgttactattgcagaaagattttggctcactgaaggttcaggtggtagctagcattttttaacaatacaaaatttaaattgaggtttgtgtatatttttttagacataatactattgcacacttaatagactagcagagtgtaaacataactttggtatgcactgggaaaccagaaaattcatgtagcttgctttattgtgatatttgcctaattgcagttatttgaaaccaaacccatagtattgttgatgtctgcctgtatttgtatatttttattagtctataacataactttcgtatatatagtgttgtatttcagcttctgtatacactgcagtttgctcaccactaaatgtttagtttctatctgtcaccatactcttggccactttacccattttgcctctccctgtaccccatttttctctggtaaacactactctgttctctgcatgtatacatttgtttgatttggtttggagagacctagaggggtaagacaggggagggaggctcatcaaacacacacacacacacacacacacacacacacacacacacacacacacacacacacagagtctctctctctctaagatgtgaacccagttctttctcacacacacacacacacacacacacacacacacgagtctctctctctctaagatgtgaacccagttctttctgaccccagagcctggtcgggtagctcattctcaccacatccttcctagaaataggaaactcttacctggaatattttagcgatctgctacttatttccctgctttcttcctctttcctttttaggtctttttcctgccaccagccttctgatgcatgcacctcttcattgaagtcccccttccatccttcctttcctagtgaactcttttctggacttccatatcctgagctttcttctctgagttctcacaatgctttgttcctttattaatcaaaacactttgcagctaatagtcagctacttaagtattccaaggattcctaggcccccagcgttcagttttgtgtctgtgactttgtgaatgttttttcttaagactgtccatagttttcatatgagtctcagaaaaatatttgatcaaaaagttaagatattatttataggattctctgtcctcctctaagtaatgaccacctagaggggaggagcatatctgatttgtatttattttcttggatggctataatgatccttttttttctttcccccgagtacctggataaatgaatgtctgtaaaagtaggaccatggaggtatggcctggaggttaagaacagaggatctagagccagacagtgccttggattgaatttctcctctgcaaacagtctagccagtgatacagtcacctcaaaaacctcactcttctcattggtaaaagggacatcataatcgtgttgctgttagagggttgttcctgaggaatacctcaaggtatgctatgtaaagtgcctagctcaagagtactttgcatactacctgtaattagctgctattactattattactgaagaactttgacatggctagagtatgagtttctcttgatttttctagttactatcatggtgatattacaaaaatatttttcatgccactttgagttttcagagcttaaaatcagcatgctttctctagtcaaagtgacaggttcagctcagagaactccctgaaatgttgctcttgggcatttcctttccccctggcctcaactctggctgtttagtgtcttaggttcatgaagtgccagctaatggaaatttgtgatgtgggcactctgccccccgaggatttggacatatgcttctttgtgttttaatcaacagaaaaaagtgcagctctagccatccttctgcataatggttgcagtagcctttttccttgcatgttcttggaacccctgagtgccagacctgtcacttactgtcccctctgtgtgtctcaggtaaaagtccagtaggtcagatgaaaggcagagaccagcagggcataatcactagtctacgtatagcactgatgagtagctggacacagatcacggcttacatgttatttatagtagtgtggccatagggtcatgttggcaagaagcagcctttagaaaagtgctttagttggcccattaatggtcactaaatatagaaaaagtagttagtgaaatctctttacagaaaatgtattgtgagctgggtgcattgacatgaggaggaaaattgttgactcttattttctctttttttttttggaatgtatactttgtctttacatctctggtaactgtatgacctttagtgagttatttgcaaatactcttaaaaaaaaaaaagtcttaaaaagtacggtaactttattcacaatcaccaaaatctggagatggcccaaatgtcctttcacctggtaaaggacacgtaagccattgttcatccatacagtggaatattaacgtgcaaatagataccaatacctgccacagcatggattgagctcagatatacttgttaagggaaaggagtcagactcaaaagtctatgttttaaatgatcccgtttatttgacattctggaaaagacaaagctgcaggaatggaacaataagtgtttttcgggggactggggttgggtgacgttctgactccagatgggcagcccaaggaatgtctgaagtgtaagtgcaatgggtcagtgtactctgtcctaatggctttaaaagctgtctggtaaacaccctgaaattttggtttatttatttgacgtttacgagttggagctcctttgtctcccgtctggcagagctgcttactttaaaatagttccttggcctcagcaatattgaacattgagggctggattgtctctactgtgggggctgtgtgggacccagtaaggtgtttaatagcatccctagtctctacgtactagatgctcataacacctgtcaccctagttttcaaaaaatctgtattgaatttgttacgatattgtttatgttttggtttttttggccgggagacatgtgggatcttaactcccaaccagggatggaacccctgccccctgtacttggaaggcgatgtcctaaccactggactgccaaggaagtccctgtgtccccatttgtgacaaccaaaagtgtctccagacattgtcagatgtcccctggggacaacagtgtctcattggagagccacaattttaaaagattaggattcagtgaaaaggcattgagttaccacgactgacaggtgagaatcatcactgtaaccttcctcttgcttccctgtggccccatccgggctccaggttagatagaggaatattctagtcggttggcaggggaccttccctggtcctggagatcggccatttcctcttacaagtgccttggccatttgacctcgtgccagtgagtgctttctctccgctcagggactgtgagagcctagaagtagtatctgtgtacttgccgctcccttgctcttacccctcctatcctagaggtcaactttttgggtctgatgagtcatgcttactgcatttataaattgcttccatttctcccaaagcaaagaaaaaaaattttttttttggaaatcagtttaaaaaattataataaatacttgttaataaacaaaaattaaaagtgccagtgaactataagatgatcatatttcagatatatttttacagctttgttaatagtttgatattaatttgggcttaagagttacgggaaataggcagagtggtaaaatgatgggatcttttgatctttaaaactttgatcttcaaaattttaaatatatttaggtggtacatggttctcccataccttcttttttttaagattttatttaattggaggataatgacttcacaatattgtgttggtttctgccatacatcaacatgtctcagccccaggtatacatatgtcccatccctcctgaacctccttgccacctccctgcccatcccacccctctaggttgtcacagaacactaggtggggctccctctatcacacagcaaatccccactcactatctattttccatatgataatatatatgtttccatgctcctgtcaattcgtcccaccctctccttcccccactgtgtctacaagtctgttctctatgtctgcatctccattgctgccctgcaagtatgttcatcaataccatctttctagattccatatgcatgggttaatattttttcatgtccagcacaaacctgtgtgtgaatcccaaagcattataaagttggctccatctagtgtatgaaagtattatacagctagagggggagaaaaaaaaaaaaaacaactccattctggagatctcctttggtacgtcattatgaaattagattaaaaagttaaacgaaaacaaagatgggctataagctatatttgtgccccaggagataatgcaggccaaagtgaccttcacagtgtgagaggagaggtcataatacattgaagcatcaacatccagcatgcctgacattttgttctaacagccttgccttttctttttctggacagaggtcttgtttacaggcactatcaacaattgtggcttgtccacttccattgtgatactctccgtcctccttggcctggcccctggctttcctgtatggaatcctatctgccagtcatgttcatttcccacagttaggaagcgattagggctaggcccatgtactgtgatttcagagccctacatgatttcctttatcagactggaattctttgtagctgtttgcttttcactgcaatagagtagccactatttgtgggttgtgtttgatctggtttccacggaagggttctggcacattcttcatttctcttagtcagggttcccaaatttgagccatactcatcctaacttcatgacttttgcccccacattccatatgatggcttaaataaattaaaaacacatattgaaaggaaacgccgtattaaatggcaatgacagatggatgcatgtgtaaaataaatataatgaaattggaagaaaacagttcgatccttattggatgtgttgtcaagaagggcctgagtctgagatctgaactgtttttgttacaaagggcaagtattgcaagattgaagacatgttagcatcaaacagacacttttcgtgggatgaaaagaaatttgaaagggcctttctctctgggtaattccatggtcatttaatgtggagtctgtgtgtctccatttgagatcatcctgtatcccgcacgttgagaaactttgctcacaatttgccatcttttccagaggagtttgtcatgctcccccaaagtccaaagctcgtctccccctcaaaagcctttttcaataattctttattttctgagcactgctatacttctcctattaacaagaagaaattgtgctgatattcatattttctcactctctttcccaactagattaagttaattgaggacaagcagtgtgtctttctcttctgtttctagtgaatgccattactttaactcatgtttggtataaatattcagggaagcctgcttcatttcctgcttgtgttttttttaaaggtagatcatagtcagaagtgatcagaaaatgcaccataatcaatttcattattcacttaacccgctgacaactagttattgggttctttccctggatctggaattgtgtctggttaaagaatgaagagggaactaaacagaatgggttattccttcttggaattcagacaccagtgtcgggtgtggggtgcagacagctaaagaggcgactccagtgcaaggctctaattttaggattagtttgcttttgtgattgttgagtggctcacagaaacttagagcagggaaccacagtgagaagcgtgtgggctctggagttttcaaacgctgaatttgcagttcatcaacatcttgcttctgagcaagttactcacctcaatccctttccctctgtttcttcatttaaataaacatgaggtacgatatgcaaagaaaaggcacagttatccgtgtgatgatatgatgaattctctaccttctctcttcccctgtctctttttttttaaaaaagaggcagagacatgatctcatgattttttcagatttttcaaattttctgcctggcccactaggaaatgaaaatgcactgatccttgatccagtattagaaagcaaatgtttttgttaatgggaatgtcattgtagatggtactttaagatggtaaattcatgcaatttccaaattacctatttaaattagtaaatgatttgagcattcagagttactccaaaacacttctgacttcataatctaagcgccatggtatatcattaatgtatctcaagcatattcagtagtgcttggaacaagtaggtactcaataaagacttgttgaatgaatgagttttaataagaattttttgatttttctagcttttattcataattttgcccatatgtatgttttttctttgttctgaaatttttaaaattttattattggagtataattgctttgcagtgttatatccttatcttttaaaaataaaccagtgttacttgatatgaggagcttattaataagcttgattgaaagtggtggtgattctctgcatctccatcaccagcctcatctgtaatacctggcaggtaataagtacttgataaatgtcaaagcaagaattagatagttctgataggcactattttttttaaggacttataacttaattttgtcaagcaaagatgtcttttttcctttgtatcactacatagcagtattacttgaaattacacaggctattaatttaaaacattggttattttaacattttactatcaacataaatatacactttgattataggcaagactccttagagtataagtcagatgcagaatgctattgtgtatcaagtttattgtgattgattagatttaatcaacatacaggaaggattcctgtgcaaatattatttttctcatttcaaatcctatttgttcagcataactgaaacaggatgtcattagtgtaagggtaagtattgagatgctttggaagtttgggaaattttgactattgacataaatttaacctatggagatctttcttttgaacacagaagtttgatttgttacattttgcttatttaggtacattatttccttcatgacttacgaatatgtttataaagttaaaatacaaattaaaaaagtatttgacacattgtcagaactgaagttttcctgggctagcagttttgtctgtagctaagacaaccattaaaaaggcatcaatagttgtacactatcagaataagtttcagatccccatcaacatcttagtttttggttttttattatgaatgaatatgttatccacaaatatctctggaccttttctgagcttacatttgttttcaatctgcacaccatcttcaaatgccatgtttcaaaaacattttcacttctgtctctttataaataatttatttacttggctgtgcagggtctttgttgctgcccggacttttctttagttgtgaagagggggggctaatctttgttgcagtgtgcaggcttctcattgcggtgacttatcttgttgtggagatcgggctctggggcacgtgggctcagtagttgcagttcccgggctctagagcaccggctcagtagttgtcgggtacaagcttagctgacttcgtggaacgtgggatcttcccagtccaggggtcgaacctgtatctcctacattggcaggcggaattttttaccactgaaccaccaggggtgccctttcactcttgtctcttaataataacttttatttgtcctacaagttgaagttctttgaggcttcaaggactcacttctcgtgccctagtgttctgaaagtggccttttcccttgcataatattgatggagtgcaattttttttgcaggcactgtgctaggtacttttcatacctcacttcatttagtcacataccctactaaacaggtgatataatagcgatctccattttacagatgtagatttcgagactcagaaatgaagtgagttgcccagggtaaagctacgaggtgaacatagtgcatggggtatgtgtgtgtctgcaagccaccgccacacaatgctgtctccagctgaaagatgatgctaagtttagatcgttaagcaagagagacttgagcaacgattcacttatttatgaaatagtggacccctcacaggctaaagaccctgtcctggattcttaccacacgttgtacagataagagttatcacacctggcacactttcataccaccgtccaccatagtgttgtgattgtccatgagaaaaatctatctctacctttagttcagtttttataatacaaataggaaacctccgtgaatggcacagaaaggctaattggcaaagtgcctgtgtcttctctgtcttcttcgcttttccagttccccttgagccataaagggtcaggtggttctttcagttgctggtgccctgagtgagaatctggggaagggtagactcatctgcctcagtagccaggacctcagcccagagggtgtgtagaggccacttgtcagagctgaatttgtcttgttttaacatatttgaatatcttgactctagggaagaagaatgaaactgatgtctatcatgatgaccacagggtcgcaccctcctgtttccatcctcaacaccattaggataagcagagactctatgggcttctttgctattcagtttaattacttaaaaaaaaaaaaaaagagttactacagtgaaagagaaatctgtatttttctttttaaataagttaggagttcaccactgaattgagaggaaaacactcaaagtgactttaaagtcctgaagtggaagatttgacttattataaaatcctagtgtgaataactttgcacccctgcctccatggcaacagccttatctttttctatttatttaccttgataaggaaagtaattgcatttttactaaatttcttttttgagaaaatgccatcaaagcggcataatctccatccgtgtttccttcctcaagtttgtgttgcctcacgaacttggcttttttttgtggattatgttctgcttattgcaaataccccactgccattgatagatagcaaagaaacagcctccgaattgcctttaatggagagcaagtatttcttttgaagtgaactctaacagataatatcagagagctcaaggtaaggaactaatctcttgtattgattatttatgaaagaccaactattatttcaaatattgctcccttcattaattgcttaaaaatttacttcagccagcatttgaagtgcctcttttttgtagattatatttgtattctcaggacagagttttctaaatagtttggaaaagcattattttttttcctctaaatctagagagttctttgataatggcaacaggagcctagattaaatttacctgaggtcatcttggtcttgtgtgcattttccttttcacccttaaagggcttctttgtgagctcggtacaatgagcagtctttcagaagatgctgtcccatcattgttatagggagattctgttcttggtaggattaaaaaaaaaaaaagggaaagaaacaaaatgaaagagataaacttgattgagtggtactgaacacttatttctgcagatacatagtcattaaaaatttccctcagtcctgctgtgagtgttttcaaattagaactactgggctgccagttcctgtagctttgtatcctcgtactttatccatgaaaataagttgtgttcagcaactgaaagcttccaaatgaaaagtatacaatcatgagccccactactgcctgttgacttcctaattaattaagtgctgtcatcaaattatatttcataactccgtccttacctgatctttttttattttgtcactcttcttctgttcatctttccttccactcatccatcattcactgaacaaaagttttttcagcacttatcatatgccagacactgagaatgtaatacatacgaaggaccctgccctccaggatgaacgacaaacaaacaaaacaaatgattaggagtgggattaagtgctacaaaaaaagaagcatttactgagagagtaagaagcagaagtggatgttgcttctttaggtaggatggggttggggaggaagccctccctggggaagaggcacaaaacctgtgagacctcatctgaaaggtggagaggaacccctgaaactgccattctgtcccccactcctaactcttaaccatgggcctgtgtatgtgagtttggagtttccctggggtgagccccagagaagcaaaagctctcatatcttcttctttatcttccccacagcactgagaaacatctctcaaatgctggccacatcagtgaatgtttgaatagaagggccttttggtgacatctgactttccaaaatgtgagcatgatggcatgtggggaaaagagccagatgtgtttgttcctctggacagaagtttttgagtttttcagccactttcacgatacttgttaattacctcataatactttcacttaacattcaaagcatatccattgtataataattccaagcggacactttacaacatcagactatacaagtaaagacttcttatttcaacagataaagggaacttgagaatcttgggtattttcctgtcactcttgcagagataattttcatataacatattatatataattatgtatgttgaaatacggtatatagcagtggttccgaggcctgacttcatattagtcttttatgagaatctttttaaaagattggaatttgaaacaatgttttggaaagtctcattcagtcatttatttgggggaagatctttgacatttgtatttttaaatgctcctgagttgattttaaagggatgatgggggcagaagggtccctaggtctttctgatagaaatgcaggtttggtgaaccattggctgggatcataatgaaacattatgggtagatgcttcctaaattgtatgtagcaggtagttcatgagtcagtatagtgtttggcatgtattaaatgtcttcagctgttaattattgttagggtgatgagaagtagtttactgaaaaaagcaatagctatcagaaggaaagatgtaagacaatgatgtgctttggggaaaacaaaacatttgatacccaaataaaataagaaggattctaactgtgttaaaagagtggttctacttttcttcagctgagttttggacaggataacaagtaaaacctcttatctcttctctaactcattcaacatagtgattgagtttttccttccaaaaagattgaggcccaaagttagttaaaaaaaaaaaaaaaattggctgtcacttggatgtttgatagttttaagttccatttttgttacagttgtctttggagaaggtcagtaagaattctgatgagtctagttgatttgctggaatttggggcaaggagtagcagttaagatttgaattatatgggagtacaggtaatatttttattctacactcagtgtttcatgttaaaagtattatttttcctttgtctctgttaccagttcttattttgtattaaacttttagggtttgtgtgtatatatgcctttatgtgtctgtgtgtatgcatacatatacatttatatgtgtatatgcacttaggatatatatctgaatagtacatatatgaacaagagagttgcttacacattatagattaattcattgtcagtgtatttattgaacatcaattgtggattgtttattctactagcttctagggatacaatggtaaactgaacagatatggttcctgccactcagaagacatttgttaaatgattgtgtgactacttgagggacaggattgtggaaatgtatgtaatgtttcatgaattttatagcttttgtcagaggtgtatgtcaagctttattccatttgctgataggtatttcattgctatgttcagggagattccccaagaacatttgtgtgatataggtatttctgaaggtaccatgaataagttgaacacatgccctgtgaaagtaattttacttaaaaatttatgtaaacagtcaatggatagcctccttgggttggtagattgtccaggacaaaatatcaggcgatgtcattggcagaagctgccaggggagaatttggcaccatgtggtgtccctgttggaatggccggaattgatgccattggtttcacgatgaacatctgagagcctacggagggcacagattttccctgtgtgtaagcatgtaataaatcagggtttcatttcaaaaacttactgggaaccgtgtaacttaattcagcttcaaatagtgtccaaggtgggagagagtccagcttggtcttttttaaaaaaaatcatcacttaaaggttctgatatggtaatttcctaacctctctgttttctttgatcttcaaatttctcaatttcctcgccgcccccccccactctgttgaatttccattggttctgtaggttagtcggtgtgcatccagatagacagtttcaatcataatcataagagctactttttaaaatgagagcttaatatgtgtcaaagaaggaagttccactgtggctggagggcagagagcaagggtacagcttgcttccttagactgtaccatacatgttacatatgttcatatattatttccttcagttttaacaataacctaggggatagccatttatcatttcccctttcttgggtgaagaaaccggggcatgggaagtttagtaaatttgcacaaggtcacagaattagtaagtggtaggatttgaatctgaataagttgacaccaaaacttgtgttcttgatttatctgctctactgtgctagagggagaaaaagcaaggtgtggagcaggttagtaaggggaatggtgtcgcatcttagtcacctgttaacgctagaactcagtacaatatccagtctgtggaaagtcctcagtaacttgttaataatgagcacgattattttcatcagggatctgatttccccaccccacccacattccttctacatattggtctttagcattaccagcagtctacctgctttcatccacttgtctccactcttgtccattttcccttatcgcctcccctcacctccatgaagtatcgtcacctctgcctaggactatggcagtagctaatcttgttgctcctctgggtggttctcaatacagcagccagagggacctttctagaaacacacatctgagcctgcttacaacctctcaatggtttcctcttcatcttggaagaaaatcagtgactcttcccttgtctcccaggtcccgacggtctgacggtagccactgcttcagtctcatggatacccatgaatacccttgctatctgacctccagccacagtggagcttccttctaactccccacttcagggttcttgcacatgttttaccactgtttagaagactcttcagagaaggcagtggcagcagcagaagactcttctcccgttccccgcttcacacccagaatccataactgctacccccgactcacatcgaagccccaaggtccctgcttaagggaagcctttcctgacccttacatattaagctttcccagttccttgttgtatttatcacaagttacattaaatacttgggtgattatttaagatgtgtcccgttagacttgaagctccaagactttgcacagtgcctgggatgtagaaggtgttctataaatatttattcaacgaaagaaaaaatgaaaaatgaacaaagaatacaaggggccaggaatagcttgtctgagacttctggctggatatttcccattattaaagggaaactaaagaaagatcacttcatcacatgaaattcaagtttgagtatggcttattgagattgcactgttttccacctgtttactttgaagacagtctcaggcacagagaagtgaagtaacttgtccaggatacacagctagtccatatcagatgtctttgttctgacctttgaattgtgtgtagggaggaacagacattttcataaatctccaggacatttttaatgtgctgagtctgtaggagctgcatcaatatttgatattattgacgctgtcatgtcagaattttaaagtgtcttttgagggtatctgttattattgcagtgagttcagagtttaattggatgacaatttaagaatatgcagaggtatgagctaaagatgtcctaaaagatactgcccgcagtaagaagcagcttgtgtctgatttccaccaagactgagcaagggatagcactccttatattcttggggtctgagggtaaggaatgctgcccagatctcgaccctgtcagcaggaaagcatgttcagtgagcaacctccagttccaaaaatgcttttgcacggatgcaaagcagctcgagctgtgtgatgagctgctgccagaggtgtccccagttgagacgggaacaagctgtcccacagccctcctggattctgtggttcttttcggtgttagaaattcacctggatgtaaaattacctctgccttcatgttctctaataacacgcagtcactgcaagcccccaccggtacctgtactggtgctcgagagggctaagtgagcatcccaggtatcgcctggctgctggcttgggtttccagtggtgccttggtccttgtgaagcccctgttgcagggtgaggcagcagttttttgtcctgcaggtacagtaggtactggattaaacaggtctgctgttgcagacagacaccgggcaccgttgtagcacaagctgtgtttggattggagtttccagggccttatcaggagccacccctagtgacacagccagtgccagaactaactttgactttcactcttcgccaagggcttgcagaacaccttaaaggaaaaaagatggaggcgcttagagttcagatgttcatgccttgttcctttgaaagcttttatctgtaagtggagttttattctggaaataatactgggaccacttggcaggagttttgttttttttattttttgtttttaaggggagaacagagaaagggaaggttttatcgggagttaaaaattctgggactgttactctgtgatgtggctttaatcggcttcagctgtaacctctggtaggtgactgtgacaaggataacaactaatctgtggggtggggggattgaaatgctagtccattagctctgctttctcatttgaaatggaatgttggtcttaaattaatcatgcccccaaaatgactgctcgaaaaatcacagctctgagtgagaacagagcttgatttatgattactaaggtagtctgaagctgggctttgcgatgactaaaaaaggattttcttcaggaaaacgggtgtgcttagtgacattggtcagaattgtccccttgcagacactggattttttgctttctcctctcccctttaccccacactgtggagtagtacacttgcattaataaacatttcatttgcatttctttatattgatttttttttcctctttgagaggaaaagaaaacatccaaacatcagaatcatctatctggcatagaaatgtagaacgagtttgaaattggcactttcaaagaaatactaagatggagaaatgctaaatggatcacagctttctcctatcccgcccccgccaccatttcctttaatatttactttcaatgttaggtgataagatttgaaaacaatactaaaagccatgtccctaagtgaataggcattcaagcaaatcaacttaagcaaaagccacctctggagcttaataattatttactgaacgttcctgggtcatgagagagattctgattaagtcagaaaagcattatgttcagcagcttgtgaaggtgtgtttaaagacggcaagaataatggaaaaatactaaaagtagcagaactatttttagaatttgattcttaaaaaataaaattcctgtaaatgtaattgtggtaaaattcctaatgttcagtggatacatctttaaaagactttataattatttaaattgttttctaatgtcttgttctatttttgctgtatggtttgcttttatagatttttaaaattgtatatgtcattaaaacagtttaattactcatctctctaaagtgatagaacattttatgaacagagtatatacattattatgtatttaaaatgtcatcaggttagaaatgttacaattttatcctttgtaaatcagatactagttagttctctgtggttcatatcacacaagaatgtcctccataacttagtaatttttgaaatattatttttaagcaaattaatggatgttataaatggataaagcgtgccatttagctttaggatagtagtgatgtcatccttgaatttatatccaaaataatgcttaatttcaactgcttttgcttaattgatttcttttttttttctggttgactaaaatactggccataggaccatgcttccctttacaaagtctcagaatgaaattcttagctcatatctttgacaaaacttgttcactgagctgttgctcatttacttcttcttgcctcttctttcagggagggtatactctgtgaattaattgtttcttttgtattttccactaggaaagcaaagaaacattatagtagaaggcaaccttataagaatttgggttcctagagaataactttccagttttcaatagttccaagttattagaaagctcagagagtaccaatttgggaattcaagcccagcacagaagaatccatggcctaacatttacttactgtctgcagggtgtgctgactgctgtcctaaaaatcttacttgcattaccatattcagttctcatacttgctctttgacaaaagtacttttctcctacctccattttgtagatgacaaaattcaggtttgggcaggtgaaagatcctggccacgtcttatcgctgagaaacggtagagctggaatttcaacagaggtattctgggtacgtggtttctgctttcctcttttccactcaatggattttcatttcagatactgactgaattgatgtttcttcctgtggccttttaattgtgtttctccaatgctcagatttctgaattatccaaactgtacctcctttgtgcttttgagtggctatgactaatccagtgtcacagtatttgtctatcacatgggtttccttgtatctgatttactattgattataagatgactgcttaggggagaagacaggtctactaataagaaaaaaaaaatatgtgtatatatatatgtgatctattctgacttgagaaaccttaaaatatggaggaaaagtttgtcttataattaaactaatgcagttggtctctagaactgagatttttgggaaaagactgttctctatcactggatgactcaggcagtggtttttattaaaggtcttccagcattaaggttctagtgttacctgattttaggaggtgggttatttgttaggacagcgataccaaattaactctttggatagatatttatttcatcccactatgtgctaaatattcttttaggtgctgaggaatttaggtgctgctgaatgaagcatagaaatctctgccttcatagggctagctctatctggtcatgagggggtaggagcgttccagctctatccttaagtctgggtctcatcttcatggtccaaagtggctgctagacctgcagccattacagctagattctaggagacatgatggcaaaatgggtatctctttaggaagaatctttgaacaaaccacatgatctttctgctgaagtctcactagcaaaacttaggcatgaagcctaacactagaaccttaaaaccctgaaaaggtgggaaatgtgagtggcagtgtaccagccaaaagaagggcaaaatagaatgggtagctagattgtttgagttgtagctcttaggccaaaacattgatttttttatttttaacaaataactgatattttctaaaatgacatgaaaattgtaccatggtttaacagagcatatccaactggattaaacagaaatggagattgagagtcccttgtacatcagtgtatcgggtgtccagggttataaggcttcagggatggtttgatccagatgctgtttgtcatccacatgctggcttcttctaccctcctccttctttctaggccccggttccttcttgccgttcacatcactgtttcctctagtttgcctttctttccacataggtccaggaagttccaaatttatatcctaccgtcttttcaaaccttagtataaacagaggtcttttaccccagtagtcgtagtcagaggcattgggctgcctcttattggatcattttagagtacaagcccattcgatgggtatgttgattgatcaaacccacattgtgtttctaggtctggagttagtagcaccaccataacctgcctcatgaatggaaagtgaaggggctggtttttcagggtggaattagggtactttctaaaggaaatgagacagtatggtgagccagcataagtaacatgtgaccgtcataaatcattaccactgtttgtaaggctggcttttagaccatgacaagtgcatatactcactgctcctgagatcataattggtacttttgtcttgatttttacagttttgcaaactttgcatcttggttgatatgtcctagacatgtagtaattgttaagtgatggcaatctaaggcttttgaatcttctctcacctgttgtgatgctatcttgacacatggacagagcatacctgtgactggggtgattgttcgagtagagatagaaggctttgagtctttaaaaagatccttccagttacttcacactcatgtctgaattctttcattagattgtcatggtggtttgatggtttagtcactaagttctgtctgactcttgtgactccatggaccatagccttccaggctcttctctgtccatgtaattttccaggcaagagtactggagtgggttgcatttccttccccagggaatcttgccaacctagggatagaaaatgggtctcctgcattgcaggcagattctttaccaactatagttttggataaaagtttgttccttttaaattgctctaagtgggctatattgttatgccatatcaattacttataccttgtaaggaatggatttttcagagtcttttaaaatatggcatctagatgtgaatgaggttccacggttggacagtgtaaacaggaattctagagtgtgatctaatgaaatgcagcttgataggaaagataggattgagtgtggggctgtctgctttatctgcattatgaccttttgataggctgacagaaataatttcttagaaacgaattgagagtgaggagtgtggaaagccgtggtggcatctgtgggaaatggaggacagttgtggccttaaaaggaggaaatggcaccctcatatccgtgtttaaaaatagctttcagtaacagatactccttggttggagtgtatagaagtaagaaaatcaatttgggaggggtgcatataatcaactttaaaaaaatctgatggtgaatactgcctggaagaacactgggttaatattatagaggtctcaaacattttgggccatatctcctaaagtaagttttttcaagctggctctctcaacatattttaatttacttataaatttcatacatgtgtcactatactgatgctatattataatatgtgtgtgttcattgcttagttgtatctgactctttgcaaccccacggactatagcctgccaggctcctctgtccatgggattctccaggcaagaatactggagtgagtagcctttcccttctctgggggatcttctgaccagggatcaaacctgggcagattctttattgtctaagccaccagggaagcccaatattataatatacaacatgtataaaaatagaaaataaaaatgatgggtaaattttatataaatttcaatctttttcttcctgtactccagggaatctttttgtaccctcttttgaagaatgttgatatattaggtgtcttattatgtttctttgaaaaatactgatataagtcttataatgcttctttttgatttttatctcatcagttattgaagttactcttactggtgcctctggaaggtccagcttaaagagtattaatcctaaatagattcagagagactacgattctttcaaactaattggattctaggtgttgaaaagtgacgattttggatttttaacttgcatatttttaacttggcaattcttgcttttttagaacactttcctccttgtgcacaacaaagagtaaagaactccagaggatgggcatgcagtcctctctggataccaagccggcctcatgtctagcagaacaggcccttggaagaccttcagatatttgttgaaggaaagaagaggagaaagacaagccgcacttcgcaagcctttttatttcctctgtgccagaaacctgtagcatttattgtctgagctgatagtgttaccaggaaaagctggacatttggcatgttttcttttttttttcttgaccgctgcaaccaaggttggtgatggctgaagtccacaagatttccacttttgaagccaaagtatgaaatctggtactttcacatttacatgagttatactctcagttattttaagtgagatatatgtttatcatatatatcatttatcagatacaccatatatttcttatatttatatatatatatcatatagacaagtatcaatatatattcttattggtacttgcttctaccatacatgatgaaaaagtcatctctacacttatacagcaatgactttggaaagaagggaaaggttaagataatggaaataactgatcctttgaaaacgttaaatactaggactttcctgcttcgtctagtggctagtactctgtacttctggtgcaggggcccaggtttgatccctggtcagggaagtagatctcatgtgccacaactaaagagccagtacagccaaataaatgaaataaatattaaaatgttagatacccatactgccatttaaaaagatatatctgtttactgactctcacattggtaatttatgcacttggacttactttctaaagactcttaacaatctctttttgctgacagaacagcacttttgtaggttcggcctgtaggttcttatgtaatcctccttatgatagaatagttatgttgtaaccataatgattcattggcagtatctggacagattttttgtcttgttggttttatagcccatttggcaggagtaggtggtccttcccatttccttccattcacatgttgggttcagcatcagaaggactcttcagagctcttgtcggagttatcagaggctggggatggaatgtgcatttcctcagacatggaagaaagtgttctggtctaagaatcaaagatgtgagttcatgtcccaacactcctaccaaacaaatggacgatcctgggtgtccaagtttccaaacctggcatcaaaatcagtggcatagtttttgtagacatactgattcctgggctttacctaacctgaagtcagaatctcttggaatggagcctgggcattttgacttcaggcagggtcctcagctgatgctgtggcagtcagccttctgcatttggaaaccctagtagcttaacctatctctgacatagctttcttacctgtgcatgaggttaattatcatgccttcctgtgtcttcactgtctatgtgaacatcagccactgtgctttcttggatataattacattgtatccagtgcaggcagatgctaggctttgagctctatcaactgaatgattataatgaagattcctttttcctggaaaaaaatactagaagttttactttatatcttgtgagtgaattgcaggatagattatcttctcttcaccccttcaaactttgtcaaattctctgaatcaaaaagggattgcctaaatcttaaaaaacagatatgctgtggtccaagcttgcatacaggcttataaaaattcactttcttgcataaaaaagaagtagcttgttcatggtttcatgttttctgactactacttttttttaactctgttccagtttatcaaaattgtgttttggttattgtgctaagctttttacctctattacaaattttaatcctccttctgatgccaagaggcaaatgtattaaacaatctataaataaagaaaaccaaagctcaaagagattgactgacttggctatcgtcacaggttagtaaaggccagaactgtattctgcctgaggaactgacgagaggtaaggcaagggaaagttcatcagctccttgagcctagaagctaagttgcagcttacagccagattcatgtcttggatgattgtgatatggagaccaaagactgattcctaaggtctggtgaaggggtattggcatccccgtgaaaggtgaggattggtcaggcaagtgttgtttggatggcgagatactgaattttatgagatttctgatatatttaaggcgctggtgaagtcagaggaattaactctttgaatttaggaatataccagtgattcacagagcacatgtccaaatgtctcttatcatcacagagaagggtcaggctttgaaggttaaaaatgtaaatttagccatcaagttaggaactcaggtcatgtttatggctacttagctaagtgtccatattctgtctggtgtgttatcactgtaacttagctggcattcgctccctcagtcattgtacgtttaggaggtgggttttggagaggttccgagaagttgagtggctcattaaatatcagattgctcagcagtgactcaactagaagttgtgtcccattgatgtctgtactccttgagtcaccactgagcaattcccagttttcagggaagttgcctggtcttagtgatgtgggtaagtgccaattaaggcatttgcctccccttcagttgcctttcaaagggtgacttcttgtggtgagatatataccttcccacatggaactagataagagtccaataatcgagataactgacttaattttaaggcgtcttaaaaaaaattacacaaccctgccttttaaactcattgagattagaaaccaggtattcccagcacctggcacaggggaaaccctcaatagccatttgttgaataaatgacctttaaataatctgattaaaaggaatcagactgatgaaattaggattacctaatgcacattgaggttcatgggccctggatgagttcggtcagcttttaaaactaaatacattgagacaactcttcttattattagtagttgaagcatcagatcctcatttttaaaataagctcttggctacctgtaacgttctcacataaaacccgactttgagtttaaaacttgctcatgtgacctgctaacattttgatgtgtaggcatttttgtttttgtcgatagagtgataattgcagattcaattatttctaagaggaagtaatgtttaaaagatcgaggaaagctgacaatctgagagtcatctttaacatggagatatccagtagggtacgtgtgcagtgaagtgactatttttcctttttgttctttgagaagacttattcaaatgtcaattagctgaaccttgctagatttttttgtgtggggggttttaatttaaatatatgggtctaccatataaatatgtaatttttttcctaataggatatttcagtaaatgttttaaatgatactgttgttgacttgaaagtctgcagccttagagtttgatgactagtaagtaattttaacttaagatgtctcaagaatgctttactgttaattgaaaggatttttttccccccagtatcacagccaatggcttgtcttgagcagctaattagtgcgatttttccacagctgcatttgccaaggcacaaaggtttgctcctgtttttatcaaaaggatcagtctctttgggaatgttttaacctgacaggctttgaatagcaagaccatctatttatttatttatttttaaatagccttcttttctgggtttaggaaagtacgtttgaactctgaacacatactcaaaagtgggaaaatgcattttcttttggtgctcttttagcagaacctgagcaggtgaatggagtgtttttgagaaatgatggggtatttttatggtgtagataaatgcatgatatgaaagtaataaaccgggtattagcattttcagtctttgtatatctgtaggaaactataaaggaaagagggtctaagtcttctgggatgctgaagacttccaaaagagccagtgtgctggatacaagtcagcacttccctatcctattatcaaaatgctgtctaggatgaatctagtctcttccagccaaacggtgactttgatcactcaagtcacttcttcatgcttataagttaattcctgttcctcatgttttcaaattagtggcatatatcctgccactgaaaaaatatggtgacattatggtttataggggaagagtaaagagtaagaaatttacctataatcccactcccactttggcaactctcatcctttcgctagtcatgtgtgtatttgtgtacatacgtatactctacttattttagattagaatggacatccacttttgattctactttttaatttgtcttaggacatggattttgcactttgctgtgtgctgagcaattgtttttaaaaaggtatattatcaaatctatatgtatcataatttactttttttgttgtttggctgcactatgtggtatgggagatcttagttccccaaccaggggtcaaactcgtgtaccctgcattgggaatgcagaatcttaaccactggaccaccaaggaagtccataatttactttttttcctaaacctgttttatgcttacatcttttgaatggttttgtttatttcctcaactttattgaggtgtaattaacaaaattatttaagatgtacaatatgatgatttttttcatgtatatattgtgaaacacattaatcacctcacatggttacttacatatttttgtgtgtgatgagaacacttaagatctgctctctcagaaatttcaagtgtacgaggcagtaatgttaattatagttaccatgctgtgctttagatcctcagaacttactcatcgtgtaactaaaagtttgtattatttaagtcacatctcccctcataatttacataatcacgcccatgttaggggacagaatactgtgcaatttgtcaatagctttgtaatgtcaggttttccacattttgaatattttcctaggaaagttatccatcggtgaaatttctgaatcagttgatagtattgtcaacttgataattgataatattaggtaatattgatattgataatattagaggattgtggtattatattccaacaatagctcagggtagcattatctttgtactttttcttgtagtaaacatttttttaagtttaatcatacctttctaatagcaggatttcctgtttaatatattgtatagttttaattcacaaccataaatatatctctataccattttttagtggctctatattaacagcattattttatatgaacttatcacagtctattgaaccaggtttctgtgctgagtaatgagtcaaatgctagtataatttttattatatagtcttctggaactctgtgaaggtgaaatgcaaacatttctttattctttagtacttttttttttgcctgaagaatttgaaggtttttatctttaagtttataaggctggtcaataatttaaaggctttattttgcctttgttagaagataaggatgatattgggatttatattcaaggaaagaagcttaaagtttcagatacttctctggaagaataactttgatttgaatataaatacttcctaaatattactctttttttctgtttccaggtactaattaaggttttatattctttgccctaaactgtttttcttttttaagaaaatgatattaccagatgcaaaatttctagataatagtaattgcagcaacaaacatttattgaggcagtactgcatagcgctcattgtattaagggatttgtgtgcactatttcattcattattttgtttaatcctcacaaaattcctaagaggtagggctttagagtgtaaatgatgcaaaagatatttaaaaagcatctcccattttgataaatgggtaagtaagttacaatattgttattcctttttttcagacatggtaactaaggcagagagaggtttatttacttcttgatgtcgtagagctagcaagataaacaatagaaatctatatttaggaaaatcaaaaagttctttcttgacttgtgacaagtatttaagctttttaaatgattttgggtagagtaagcgccagcaccattagaggcaggcctcatggggaactcatagaatgcgtgttggataggacttgccaagaagaatcagaagaaaagactgcacaaagaaacccaggcaatgaagaatggagttgccaaactaactgtcttctgccctctttcttgaagactgaggttgagttcagtgttaagattctggtccaaaggcttctttaatgactttcacttgtatcgtagaaaaatttccccatgatggagttcaccttttttttgaactattgtgtgttagcaaacagtttagatatattcaaggaatttagatagtgtacaggagtagttatttggctagattcgactataaaaggaaatcaagcaaattatttttaagtgtgaaactctgggtaccattaagatcccttgcttcttggcacttcatatggcagcactatatttggtggtgatgagtagtaggcgatataaaatgtcaaaaaaaaaaataagctgtatgataaaaatgcctagatgcaatcaagccaacttattttaattcaactactgatgacctaaatcctgtcagctcttgattttcaattaggtggaatactactctgtgatctgattatattttgcacaggctcatttcatagtttggtgcaatttaggataccccaaaactcaaatgaaaggtctcattaggaactcagtgtgtgtttttctgtttccccacagcagttccgaggagcatcctggggcctccaagcctccgataagctcctccagtatgacatcgcgcatcttgctacgccagcaactcatgcgtgagcagatgcaggagcaggaacgcagggagcagcagcagaagctgcaggcggcccagttcatgcaacagagagtgcctgtgagtcagactccagccataaacgtcagcgtgcccaccaccctcccctctgccacccaggtgccgatggaagtcctgaaggtatgtgagtgccactcttggtggctgggccaagcctccttcttcttcaacattttctgttttctcggtgttttgtttgtctcgtcatgtttatttggttatattgacctatctgaaacatatttgtaaatgtcagctccattgattcctacatggctttgtatttccaaaaaaagattccaactaactgtaaatttaatagtaaccctcactaaatgggggaagagtgttgatgccccgtgagaaattaccaggaggttatagatggtttttataatgatatcttcccatctttctttggcaaagtttaaaaatgtacaagttacctgaaatgaacctcttctaataacttgtgtgtatatatatatatatatatatatttttttttttttttccccctaaatacattctatggccattcttgagttttcttttttcttgagtaaatcatcttggctgtagaatctgactcttaggaagtctctttagatagaaaatggtagaagagcttagctttaataactagactgcataatcttttaactgaagtgagttgtctgttttgggtccctttgatttcttgctagagtagaaactgcaggagcttgttagcatcattctatccaggacatatagcttcctaattactagggaaaattgtaacaagtctaagaatagaattccatctcacacatgggtcctgcaatcacattgggaggtactccttctttaaacattccaactcttaaatgtgactgatgcaagtgaagttaaaagaaaagtaagaggacttccttacttcttaatttttaaaatcccattacctaattgatccatcctgaagagtccagagtattactgttcattaaacaaagtgaactttacccgctggtgattcattgttggtctttgcaatcattcctatgctcagaaaagacatctttcactatttaaagtttactatgaaagcaaatgggatgctgtgtgataattgggaaacaatctatgatctctaccaggaagaaggaaagagattctttaaaaacaaaatttaagccagttgttttcttatttgcaaagactcttgaaatgtagtgatggagtactgaaactgtgtcagagagaaactaatattaaaattctgttaggatgagaaagattgcaatgctttagcagaaaactttactctaatatgactgaagttctgaatatttccacagctagtgtatattttatgtaccccaccttccaaataaaggcaagtttttctcttgcgagtagattgtacgttaaactttctgttctgcttgggtgaaaattggcaaccagtgggtttttgcagacctaaggtttatttaagatttgtctgctgttcacaagaatcataatttttttagctgtatcttagattatttaaagttatatgaattaagtaataataaattatagagaaattttatttactttagtagtctatttttttaagctgaagaacagattttagaagagatgacacagatttgtgttagtagtggtttatgtctaaatcaaaggtaatgttattaaagtataatagttgaaatctatattcctattaaggcaattatatctgatgaaagagaaattacctgagtatattgaaacattatttccatttcatttgaaaaatggacatcattttttaaagttattacttaaaatatgtaattgtgatatgattaaaattaaaatccatactaattggttttaataatataaccatttttccttaaatgttactgtgtcctggtaacactagcccttaactctatcactcaaatcagttatgctagaaatatgtccaaagttaaaacacaaatatattgttagaacccgaggacttaatctaaataaaaatgaacaaatggtaaatgtatatttcatacagaattagtttatctctaacttgtgcatttttatacttcagttatataaagtagcaaagtatgtgaagaggtgtagggcatagcaatgtgggtaggtttggtagctgtttagacagattttgtatagtgtccttatgtggaggaccaagcagaaacatgattccatataaggtggcattctaagagcttcaaattacattttaaaggagagtgtcatatacatgattactccaagtacttaaatacttagtactttataaaaatagtttgcctatttttgaaagttttgtggatggaaatatgaatcatttattacagaaaggtaagtgagagaaagatggtcatttttttcttttctcttttatagtttttaaatcataagcttatattatgaagtaaatggttaatagaaaagcagttaatttgcttaatcttgacccacatttctatgaatatacattttcaaggagtaacactgagtgtactgatttatgcataacgatacagatgatattgaataggtatttttttctaatagtatagtctcagtaaattcatcatttaatttttaaagatttaagttgctagaacagaacatacctgcttctcagtggaggtagatgtgtgcagtcagacgtctagcgtgtgccagggaatcctgggtaaatcgctcccgtctctcactggtttaaaagaacttgatagaaaaatcacacacacaaacccatgttacgaacatttttgctgttggtgcgttgaatgattttgaaaagctcaattagtattgtctggttaatcccctttcttttgcagaattatgcttaaaatatgaagcatgctttaaattgtcgacgtcttctagtaaatttaggactagtgtttggaaatcatagggattggaagtttgcattactcatttcccatatggttgtcattcagtccataaattcatgaaactttgcaggattagcctctggtttctacattgatttaattaatttatgattttttttattcctattattggtttttattttaggtgacatggagtggttaattttattgttgtatgtattcacatagtggatatatcctctaggtttcttaagaacagccctattcaattcggtattgtaatttaaggatgcttctttgtcattaattaaccagtatctggagtgcataatatatattttgcaatagtgaaaatacacactctgtatttctcactgtgaattaacaaagtatatcattaagaaccattaatggaagtagtttctgccacaagtagttttattgacaagcagacctgagatctgaaatctgacctggttccttttagacacaaagagaggaaacggagataggccttgtggacatggtctcatggctgaagaagcatcacattatcaaccattgcgtcttcatccgcacatccatcaagcatgcattttccctgtctcatctctctaattctgactgattatgaaaatacctgattgctctgatcttgaactggcaggttcatcagaattgcaccccctgcatggactctgacagtgtatagttgaaaacaagagtttatagtttgaaaacatttatctatttagaaaagtatagggaattttcaaggatttccctctctgcctcccttcctttttttttgtttttgtttttgtttttctctctttggacttaaaagaaatttaaagccaaggtattctcttgggaataaattgtatattaaatctttctgttcaccttaggagaaagattatatgaatttgaaggaaaaaatatatatttttggtaactttaggatatcttcttttgaataatttcaagaaatttatttttagatttttttctttttttccaaatcatctcagataacccaaggaattagattactgcagaatgagaagtgatgcttgctgttcatcaggtattaaaacacatttttgccagggcccttgatcttgtgaactgaattcacattggtattttttcggtgattgacttacggtgtggcatctcatttaaatagtgattctagcaacccaggatggaggggtgttctgctttcttgtcaccctgtctgacaacctatattccatgaaattccactaatggaggacagggtggctgactgaattgctggcctttctctgtaatttatgaaatctacctgatgttgaattgtcaaggtatggcttattctttaggtataatacagaaacttgaagaaggtgtgtggaggtatgagtgagttggtaggttatgttagaagaaggaacggctcccaggccccattatgcatttgattttcttctggatttatttaggcaggaacacagaaccttattagcatcatattgactaaaagaagtgggaagagatacagtgtgtctcagttcagcttgcctttatccccatagttagggaatcttgctagaggtgctgaccgcataagaaaggaaacctgagaattcttctaatcccatagtccatgggccagcatatatttttgttaccagtcagtgtgacttacatgaacattctgtgagcatcagtttcaggactgtttatgaactttggtgtccttttgtttttggatcaaacactgtgtctgcaaggccacatcttctcttggggacaaagggattcaatttccaggttccacaaacatgtttttcatcctcctacagacctcctttccctacagagcctttgaatctctggattgttatcactttttgttcggtgtcacacataaggtaattttctttccctgtaaaactcatttttgttggaactgtactcagtattctgtaatgacctatatggaaaaagaatctaaaaaacagtggacatatgtgtgtgtgtgtgtgtgtgctcagttacgtccgactctttgcagccctgtggactgtacccaccaaactgctttgtccatgggattttccaggcaacaacactggagtgggatatatgtatatgtataagtgattcactttgctgtacaccagaaactaatacaacattgtaaaccatctatactccaataaaataaaacaaaaataatagacagtacttgttaactgagaactgatttaagcagtgtagagggagatccagcaggacaccagggcgcagctttcctgacttctgctgctttcccttttgcgggagcaagttctgaagaaatgtattaggcagttttgatcaggcagatgtaaaccctgtctttatttgttcaccttttcaggtgaagtgagacacatagttacttttctttctgaaagagaaatatcttgtctgtactttggagaatattgctttaaactccctcttccttaggcagaatagggacttcttaccctgtgtgctggaaacacttaggtcattctggcggtacgtgtgctccagtttgccttggcagtgactggcgacccatttgcttcccatgcaaatccgatgcgtaccataccaccgtaggtaaggagttagtaatctacgggctggcacaagaaagttctccataaagttgccttacgtcggggaaatctaaatctaacttaacccaggctaaggagggcacccacctcagtgaatgtgcattgattaacctcggatatcttttctgcccctgctgcttttagtaactaggaatgagcagtgaatcctggctgaaagaaaatcatctttgcttagatttttaggcctggcccacttgaaagagcagccctgtggggagcaactatgtaaaacaaaacagtcagccttgatatagctaagcctatgaattaattccactttcctggaaacactgaaataccagctggaatcccatattcatttggtaatgtacatgcaggggtacgtgctaagttgcttcggtcgtgtccaactctttgtgaccctatggactgcagcccaccaagctgctctgtcaatgggattctccagggaagaggactgcggtgggttgccacgccctcctccagggaatcttcccaacccagggattgaacccgtgtctcttatgtcttctgcattggcaggtagattcttcaccacgagcatcacctgaaaagcccctcatttggtaatattggcacaacagatggaagtgatttcttccagtgtgagcacacagtcatttttatgtggctgagggatatcatagaatctgggtggtgcgatctcctcagggtgtgggttgggtcagccgtgttcagtggacatctgagccgtgcaggtttggggggagggtcaccttctttctagggtcagggatttttcttctcagtgggctactttgccatcactaaagtcaccttgtgggtttacacgaagggcagctgcgcagcccctctttttctgctggtaaaagaagccatatgataggtgcaatctcttctaatttacacagttctcataatcctaaaactggatgtccaggtagcacttaaggagagttctaaggtctagggccttggagtaagaactgaaaattggagtgggtcttttctttttttttttttaaaatctacctttgaatgggaatttcttttcaatatgatatgacatgtagcacatgcattcttaactgggctgatattgtctcccaggggagcaaaaattggctcttggaaggcaaaaaatataagatattataatagtttgtgaccctctaaagcaggagtccccaacttctgggatctaatgactgatgatctgaggtggagttggcataataataatggaaataaagtgcacaataaatataatatgcatgaatcatcctgaaaccttaccttcccctttaccttcccactcttggcaaaattatctttcacaaaactggtccctggtgccaaaaaggttggggaccgctgctctaaaagggcatagtacataagcagatatccagtatatgtacctgttacagttttcttggttggggattaggggagaggtaattagggggaacaagaaggtctaaaacatctgcttaagtgggtggtgatgaaaaaaaaaagatttgagaaacattcctggttctgtgctgaattcctgtttggcatctttcttaactcccctctttgtgttctgtttagaaaacacttaggctcttatggatgtaccgcctgccttccagctagtctgtttctcccagagaactgttagactcacagtcatggttggcatgtccagcatcaggcggtcattattagtgtccccatttcacagatgtggaaactgaggcgaaggggtcaaatagctcatcggaattgggtgaaacaagtggtacagtcaggatttgaattcagttggatttcatggcattaattgcttaatcattagtggttgttcctctcctagagtgaatgacctgaaaaagtttaggaggcagaagtagcagtgtttagtttcttaagtggcatggtaacctggtacctgcagcaaatataggagctactggtgtaactgatactacctaaagcagcttcaaggaggacaagcattgactgcacaggcattaattattggctgtattagatggtaagctgaatcctttatgtcaattatatgacgtatctctctagcagccctgtgggataagtaggataagcccaatcttccccatggggaaactgatgcaaaaagagattgtcactgaagtcacacagttagactcctcagcctacgttgcatgggtgtgtgcccagttgtgcctgactctttgctaccccatgaacggtagcccgccaggctcctctgttcatgggattctccaagcaagaatactggagtgggttgccatgccctcctccaggggatcttctgacccagggatcaaacctctgtctcttacgtctcctgcattggcaggcatattctttaccactgtgccaccagggaaacccaccttatctacttatcagcttaccttatctgcttataaccacataccttgcttcttctctctttcctacagagttcaagaacagcctctacacatttcaaaaaatcaccagtaacagactatgttagagccaagggggaggtcgaagagaagtctcacaggcttaatggaaggacacatgatcttaagcatttgaaattactaaggggacatccatatggaataattaaagtgtatccctgaattgccactgtatgccagatggcagacctggactatagaaaaatactgcctagccagatcgaccactgtggtaatttatggtttcattatagtcatcattattggtcagaatattgagatattctataacaacatccagaaatcataactcaagatttgcattcgaaaaaatcccgtcggccaggctaatcttatttacctaattcatatctttcatagttctgtatcgataatacatttatattgttgtaaaggattttcgaaatacccaatttggtagagtcagtacatgtgttttaatattaattttctgctgggattatggttgcatttagaatatttcttccccgacctcactgcagtattattacctctgttgtattttagcacttaaaactggaacttcagttctggttgtttttctctttgcttttaagtgaataatgttagctgtcataaattttatatcactgtgtgttaaggtcatgaatcttcttcacaaatgttacctatgtaatcccaacaattaaaaaaggaacttagatttgaaagaccatcttctataggtatgctcttgaataatagagatggtgaacacgtgtaagcaaaatctaattttaacattgtcctactaaaataagggggtgggatctgtgttgaaaaatatgtaaattagtatgtggttttgcacaaggttagagctgcagtcagtactcgtatcttggctcttgccctgaatatgtctcttgttattgacttctttgagcatcagcctcaactttaagaaaaatttaacttgcaacaatacactagtagtctttcagaccttgtttataaagttagatgttttttcctgttaatttacagttttgcaaaaatgagatgaattaaaattggagcatatgaagcagataaaataggaagttattaaagtagagaatgatcctagaaaaagagttgtagtcactgttttaaaaactagagaatattctagaagaggacctagattgttttataccaaattgttcttacttgttacgtctggaatgagtttttggattggagatgttggtggtcaaaggctttatttacttagtttttaaccaagggggttaaaaatgtgtatgtatgcatatacattcttaatataattaagtgggcttctcttaatgcattttattaggagtcttagggaagtttttttcgcctataagtctttcgagcaacctaattcttctgttaggtgagtttactagagatgtgcacattgcataactccctgttacgtggtgttccctaaaggaaaaatagcaaggtgtgaggatcctgaaaattaaaagttaaaaagatttgaatcaccaatttgtgaataaggggttcaggattgggaactcatgtacacctgtggtggattcatgttaatgtatggcaaaaccaatacagtattgttaagtaaaataaaaaaataataaaataaaataaaaataaataaaagttaagaggcccaacatgaaaagcaaacttcagatttctactaccttaccaccaggcataactttgtcataatctcccctgttggcccagcgttttgtataattaaaatttaggagctagaaattttgttgagacttaattagaagcgacaaaccagagacattcctgctggttaggaaaggcttaagaaattcttattggctaaattacaaatatgtaacatttttttcagaacactgcatggtagttcagactgcctaaaggtgacaagattaggtctgtttttctagtgaagtagtaaaaattagattaataagtaccaggcaaagaaccttttcttttttttttttttttccccgaaaggaatcctaccttgagtacttctggctgtggcgatcggtgctttaattagccacatgttctttttacctcctgggaaataagtatgggataaagttggggatcaagacatagacgcacattgacttagcacacgccgctaagtaattcatcaaggaatgttggtaattagtcctgcctctttcaactcttggcttatttcataaaaccagttgatttaaaataatgcctgctgatttattaccaacacatttcaagactgagacttggctcttaacaaaagcaatattgtgcagcgatggaaatgtgccctcttgtttttgtgtttttacaaattctgaagtcccctattaactttgttgcattttcttttaccccattcagcattttcttgggctttcttttgtctcttggtgaagaaaaggggggagcaaattagaaaaaaaaattccaggctcttagaggttttggatgtgaggtgcttgtcagtgtatattgactcagtgtgatttgatggaatttaatttgaatccttcgtctggtaagacaggctgtcgtgatggcctttggtcctcctgcattgttaagtgtttggtgatatttatgacagccaggttaatcttaaaagattgaatttatgagaagtacagaaccttatgacttcagccttgtaaccttggtatccaaacactgcactaaattattctctggatgccagattccctttaatgccagctgatgtacttcattatgctttgagatgtgactataatcagcatccttgttgaaaaatctgggattagattaaatgactcaaaattggagcatatgaagcagataaaatagtctccaatacttaactgggtgaccttagacacatttcctgttcattctgggtctcagtgtccttatctgtgaaacagaagtaatagtgtctgacctgcagaatttttgtgagggttaaatgagataattcacctaaagcagcactatccaataggatgtgagctgcatgtgtaaatttaaattttctagttgttgttgtttagttgctaagtcgtgtctgactctgcgatccagtgagctgtagcccacagtaaaaaagaaagtgatgatatcagttttaatcctgtgtattatttaattcagtatatccaaaatgttatcatttcaacatacaatcaatataagaattaccaaggtttttgcattcacacttttttttcctatattaagtcttcacactaagtcttcaaaatcaagtgtgtattttacacctatagagacattgccattcagatgctacattttcattaaattactccatctgttttgattttaggagatttacagttgaaaagctagattcctatccactcactgacttccaataactaagttgaatataaatctttaaattaaaatgaaattcttaaagaatttaaaaaattttgaaattctttaaattttgaagaatttttaaaatcctcgtcaccctggccacatttccagtgctcagtagcccatgtggctgtggcctctgtcttagtacatatctaaagcatttagtgccatgctaggtagatggaaaatgctcaatcaaggattctgctgtgtcgttgtataataatgaataatattgatacagtaattattactgccaactccaagttgccatctttatttgctgccattatacctatgcaacacggttgctttcccattgccttcctccccaccaaagaagatcaaaccatttttagtcattattttcattctcacaaccctttggagcccagggtagctgatgtatctcagatgtggctgatattttctgtcaaaacaccctttcccaggagggcacagcagagtcaccctcggaaataccgcatttggacccatctctgccaaccaccttccattcaggcctgggccgtgacagctcttaacttgttagtcacacatcttactcagactctcaaaatccagtttcttctcaaacctacacacatcacacttaaatagcacctgtgtggtgtgttaaagctgactaaagcctcaggaaggtataagcatctcatcagtgttcgtggtacagaaagagacattgaaggaaaagggtatcaattaatcttagttcttctttaaatatatattacgtagtagctgaatgaacaagtaagatgttgaaacctactttttttttttaaaggagttttattcatgatttttacttttgttaatgttgctaaggatgtttcttttctcagttaacttgcagtatatttttaggaattttctgcatagctgataattccatgaaatggttttttctccttatttaccaggcacccaggatttctgttttgatactagtttctgaccatttattaaaccagaaaaaaaacacgctgaagtgataatttatatatttttagatactttgttattcttaatgcaaataatgagttgattatattggaattagtaaactctgttggaaagatttaatgtgttcttcatataaaaactaagagcctgtaaagttgcatttttgttcagttgcataagtgagaaaatcaaaggagtaaaaatgttaaccatgcaatgagttccagaaagaaaaatctttctgttgtcaaaagttatgatttcctgagtttggagttacatattatctcaatgtttattatttatttatttattacttattattattatcttaattttaaaataatatgttaacaaacatgcatggcactgtaatgctgatttcaattttctaagtagctttccaaatttatattaatatcatatacccaaagaatttttccagctcattaattacaaaacactgatggaattcataatacaatgttaagagtatgggatgtcgtgctgatttttactgacacttaggacccctaatgtctcatagacaggggagttaggacattctgggacgatatttcattttgatgtaaaattttcattcagcttgacatgaagctaaggtgtatagaacttaactttaaaaggtgtttttgggaaagttttctatagctctgctgctgctgctgctgctaagtcgcttcagtcatgtccgattctgtgcgaccccatagacggcagcccaccaggctcccccatccctgggattctccaggcaagaacactggagtgggttgccatttccttctccaatgcaggaaagtgaaaagtgaaagtgaagttgctcggttgtgttagactcttagcgatccatggactgcagcctaccaggctcctccgcccatgggatttccaggcaagagtactggagtgtggtgccattgccttctccgtagctcagtgggtctcaaaatatagtctggggtctggatcccctacattatgtgggagcactttagaaacacagattccctgagttcactccacatccattagccagaaaccctgaggatagagcccattaacttgtcgtagccagccctctggaaaattctaatgcagactcatgtttgagaatcactgctatagaaacctggaagttaatatgtaagaaacataagaaaaattgagaaatgctaatgcaaataaagtcagcctcttagacctaaagtaaacatataaagagttatggaaaatctccaacagtggtaaaattggtaggcactttatttgaggagagaggggaagaggaagacaagcaaaggaaatgtttctctccggtaaagttgatcagcggaagttgcaaaacatccagtagctctctgtagagtctttcgtacatggggtgtatcccattatttgcagatattttcacagagttgataaaactaaattaatcatccaaaatcttagggagatgagttgtggataaaacaataataagaaactaaaattatacagtggttcccattttaagctatagaagccattgtaactttgtaggaactctgaggcatgaatgaatccatttgtccaccaacatttataaataaagtatccaccttacttacctagacatctcttcttcaaataaacattgattccactgcagtgaacaaagtacaaattgataccgaggctatatatttcattttattttttatttttacacattttcttgatcagcaaaaactgaaagcacaactctaatcaaacagggcctggaaatatttgacttaaaaaaaaaatgttaagagctacttctttttaggaaactttcttgaactatcaagtgtcacttcagctctactttggaatctactttcctctttttcaaattgaatgtagttaatggcaacacagactgcccttttcagagtcccagggaccctacatctatcatttcacaagcagcaggcccttggtggtcagtctctgacatcagaggtctttactgacgtgaccatagtcttcacttggccttttacactgggccattgacatcaacagaaagtgttttctcttctttttcttttttcagtattagttttccactggaaggcggtatatccagtacatgaagccaacttgccccctgggtttgaataaaacaaaccttcatttttggaaggaaagaccaactctttctaatactggagtccttaattagcacacccagcacatggaccgaagtccagccttagaagcagcatggatcacataaaagccatgcagtgcccttgtcttccaccaaaagacgtggattatcttcttagctcccttctcttaagaggaggaaatcagaaataacctaaagatacctcttgcaaacttctgatcatgaaccttctttccccatacctactttacttttctgttagggtttccatttttcagttaaaattcattcaaagaactcttgcctcaaggtgttgtttgtaggccacacctctggttgctgtgtacatgtttaaaggcttcagccctggagtaaaatgggcaacgcccaaattgtttctgaaccacagtggaaaaggataataaaagtccctacttcatagggttactgtgagaagtaagtgacaggatgcttgcaaagcacttagcactgtgtctagcacagtacttattaattttggttactgccatcatcatttccacgagagtcacacactaagtcctcggtgattgaaccactaatgggttcttgagaaatgctcaaaactttaatgttttagtaaaaaatgagggaagttgatctggaattaatttctctagacgtagatggggtatataaagtttcttttgaccaatgattattgagttacattttagcagcaaggaatttttgttcttaaaaatcacctgattatgcaggttcccttaacagtgatttttttttttcctagggaaggcagtgtgattcttgaccacagtttttaacttctccccagattttacccattacttaaaattcttagaatttgatttgatgattgacagccaagttaggcaacagttaaatccctacctatagaaaattctgggaaaagtggttaaaagtggggctaaattttgaagaaatattaataggtgtcaaaggctgtgagaatgttctgattctgaaattaaacttcaccttataggttgagaaatcatcagtttgggatcaggaactctgattaaaaataagtgatcatataaattttattagctgttcacttttgtaagcattattatttttaggcaattagagattcaaaatacattcaattacagcctctcatctccgagccccagggcccgctttgtagagccagtcaactgatgcgaatcattatctgtgttcagaaagttttcatcactacgcagactgcagaagtatttttatatagtctgtaagtgttttgattcatctgctctgggattatctggctgcttctttacatgatctgcctttttcccccctagtctaaaatcttcctctcccaatacctattgcttataacatatataattttaatcttttttgtttcttacctttcagaagcatgtcaccttgagtattctgtacttactaccaactgcttgttgacctttacttttgttattaaactacttatcttatttctatgacataagattcttgacttaagaagaaaggccattcccttcaacctatcttagaacatcaactgcttaacagtcgacactacaggcctgaaatcaaacatccatgaatagtatccatgcccaggtgtggccctgtagtatgaccttggagaagttgcctttctgggccccagtctccccatcagactggctggtctcagagcctaactgacatccagtgaactgtctctactttttccttgagagatgaccacctatagatgactgaaatttcattcacattaagatgaagatcacaaaggatgattttaaaaagtccttaaaaaggaagaaatattaggattgttttaaataatagatacacaagacagttgtcataataaagacactccagtgtatatattgcttagagtttcacagtagttctacctgagggtggcaaaaagtcacttgacaaacctcttttgtggttatttagttgttttattatttttgtctttgtgtatttttaatatgatggtgatgataatcctggatatcacttcttgcatctttgagactttcctgaaggccttttaagcagagactctcagcatagacttattggaaatagatgatgaggaagttgaacaaactgccactagttttttatacagacatctgaaaatccatgttaaatatttaattcttaggtttccaaaatctgtaacacaaaaagccatttctgacataatttgtgttacagaatgtcctatagcttttagttctattttaagcagaaatgaattgaggctgaaggtgtccatattgatgagtgagtaccagggcaggatcacctgattcacttcagttcagttcactttagttcagtcgctcagtcgtgtctgactctttgtgaccccatgaaccgcagcacgccaggcctccctgtccatcaccaactcctggagtttacccaagcccatgtccttgagtcggtgatgccatcaaaccatctcatcctctttcgtccccttctcttcctgccctcaatctttctcaggatcagggtcttttcaaatgagtcagctcttcacatgaggtggccaaagtattggagtctcagcttcaacatcagtccttccaatgaacacccagaactgatctcctttaggatggactggttggatctccttgcagtccaagggattctcaagagtcttgtccaacaccacagttcaaaagtatcaattctttggtgctcagctttctttatagttcaactcttatatccatacatgactactggaaaaaccatagccgtgactagatggacctttgtggacaaagtaatgtctctactttgtaatatgctgtctaggttggtcataacttttcttccaaggagcgagcatcttttaatttcatggctgcaatcaccatctgcagtgattttggagcccccagaaataaagtctgccactgtttccactgtttccccatctatttgtcatgaactgatgggatgccatgatcttagttttctgaatgttgagctttaagccaactttttcactctcctctttcactttcatcaagagactctacggattcatgttgatgtatggcaaaaccaatacaataatgtaaagtaatgagcctccaattaaaataaataaatttatattaaagaaaagaggctctttagttcttcttcactttctgccgtaatggtggtgtcatctgcatatctgaggttattaatattcctcccagcaatcttgattctggcttgtgcttcctccagcccagcatttctcatgatgtactctgcatataagttaaataagcaggctgacaatatacagccttgacgtaccccttttctatttggaaccagtctgttgttccatgtccagttctaactgttgcttcctgacctgcatacagatttctcaagaggcaggtcagatggtctggtattcttgtctctttcagaattttccacagattattgtgatccacacagtcaaaggctttggcatagtcaataaagcagaaatagatgtttttctggaactctcttgcttttttccatgatccagcggatattggcaatttgatctctggttcctctgccttttctaaaaccagcttgaacatctggaagttcacagttcacgtattgctgaagcctggcttggagaattttaaggattactttactagcatgtgagatgagtgcaattgtgtggtaatttgagcattctttggcattgcctttctttgggattggaatgaaaactgaccttttccagtcctgtggccactgctgagtttttcaaatttgctctcacattgagtgcagcactttcacagcatcatcttttaggatttgaaatagctcaactggaatttcatcacttccactagctttgttcgtagtgatgctttctaaggcccacttgacttcacattccaggatgcctggctctacgtgagtgtgagtgatcacaccattgtgtttatctgggtcgttaagatcttttttgtacagttcttctgtgtattcttgccacctcttcttaataacttctgcttctgttagctccataccatttctgtcctttattgagcccatctttgcatgaaatgttcccttggtatctcttaattttcttgaagagatctctagtctctcccattctgttgttttcctctatttctttgcactgttctctgaggaacgctttcttatctctccttgctattctttggaactctgcattcaaatgggtatatctttccttttctcctttgcttttcactctctttttttcacagctatttgtaaggcctcctcagacagccattttggtttttggcatttctttttcttgggaatggttttgatccctgtctcctgtacagtgtcacaaacctcattccatagttcatcagggactctgtctatcagatctagtcccttaaatctatttctcacttccactgtatagtcataagggatttgatttaggtcatacctgaatggtctagtggttttcctcactttcttcaatttgagactgaatttggcaataaggagttcatgatctgagccacagtcagctcctggtcttgtttttgctgactgtatagagcttctccatctttggctgcaaagaatataatcagtctgatttcagtgttgaacatctggtgatgtctatgtgtagagtcttctgtatatatatttggttattttttcttttattttacatactaatactcattttaattctcttgagagaaagagagaattgactatttttctctcagtagctttgctttttttcagtctttcctttcactgcccttggaggatacctctgtagatgttaatctccctccctgtctcctgctctgctttgctgtcttcttcccttcctccctccctcctactgtcccttccttctctctttccttaaatgcccaaatctggaattacttggcttgcctttgaatccccagctttgtcattagttaatttgaggcagattatttagtctctagtctaaaccttagtttcctcacctagaatatgggtatagtgtcagtatattctggtggctcagaggttaaagcatctccctgcaatgtgggagacctgggttcgatccctggattggcaagatcccctggagaaggaaatggcaacccactccagtattcttgtctggagaatcccatggacggaggagcctggtgggctacaatccacagggtcacaaagaatcggacacgactgagcaacttcacttcacttcactttattctattttgttgtagtatgtttttttttaatgtgaatagcttcaatctttttggcagataaagaactcatgctgctgtaacacgtaattccttttgttccttttccacagcatgtaaatgtttgaagcagtccagcggcagggtaagctttctgatatttaaagagaaagccttagctgtcgatgaagactttacaataagccaagtatctgttcagtacaaagcatccgccattactgcagttttagtagcatttgctgctaagtcacttcagtcacgtctgactctgtgtgaccccatagacggcagcccaccaggctcccccatccccgggattctctaggcaagaacactggagtgggtttccatttccttctccaatgcatgaaagtgaaaagtgaaagcgaagtcactgagtcgtgtctgactcttcgcgaccccatggactgcagcccaccaggtctccatccatgggattttccaggcaagagtactggagtggggtgccatagtagcatttaggcttcaaaaactgcttgcttttccatggttccccattctctgaagaagatttgagtgtaggctgtagagacatctctctctgtattatcacaatgcactcacaacaaaggctgtagccaggatcagattttcatttttaaagaaatgatctacgttagaaatacttaccatctaacatctacctttttgaagggagggaagctggtggctcaggttgaaaactgtctgtgaagctggctgcaaacaccagtagaaatttaacccgctagtgtggaattacagttaactgattgtcgttatgcatgctctggttacaaaggtcctgaggtttcgaggagttgcccctcaccttctctcctcctatatgtcatgttattcatagcttatgattctgcagaacgtgacatttttccaggatttatagatggatttagagcaggaacacctgaatcagcttcagagttgtgatcatgtaatgaattaatgtatgtgaagtacacagcacagctcctgaggtggttgcctttgcacggagtcttgaaggataagtaggaaagaagtctgcacaaatatgagctggtgccctcaaagcctttgaacaccacagtgtttccttctctagcaatgaagcccgtcaggctgccctgtggggaggtgctctgggcacacagagggcctgcagtcctgcctcagaaggtgaggaacgaatccttggagaggtttgtgttgagggcaaccttggcaaacaagtagggtcattccagaagggcatgaggagaggaatgaactcacagttcgtgttctagattctggggcgatgcagtgacatgaaggatagcgaaagatgagactgagagagctttgggaagcgaagctgctttgggtgagcaggggccacgtgataaaaggcctgaggtggttggatccagcatagcaggtcttgggtaggcactgaagacatgcgtttgtgtttgttttcatgtgtttcttcacttattttcattttagagaaagagagggatggatatcaggtggatgtctctgggcactggtggaggtgggagattgatccgttttagaggagtatgaggctctaggggtggggggaggctattaaaataattggaggaatcaattatgaaagcattgactctaaaagtcttaggagacataggaagaaagcattagtttttttttataaaaattaaagataaagggaatggaaacttattggataaaaaggagaaggaagaaaacatagcgctatatccatttacatataaggaaactgagcagagattaagaaattggtctaaatcgggggattgctttacaggaagtccacaggacaggttctgcctactgcctgctctgtaaagtcttactcgaatgcagccatgactgctttcacactacaggggaaggttgagtagtgcaacagagaattcaagacccactaagctgggtcatactgtctgggtctttggagaaaaagtttgctgactgctattctctgtacatggtgtaatggtagacctaggattcaaataacctagagttgggatcttctctattttgttcacctctgagcattggaaaagaccccaatgctgggaaagattgaaggcaggaggagaaggggaggacaaaggatgagatggttggatggcatcacagacctgatggacatgagtttgagcaagctctgggagctggtgatggacagggaagcctgacgtgctgcagtccacgggctcacaaagagtcggacacgactcagcagctgaactaaactgagcattttacattatattcagtgtgtagtaaaacctcataaaacaactcttattgaatgagtgaataactgaatgaaaaaactagcaaaggtaaatcacatcacagaaatgatgcgttgttgaccaggtaccagacaagagaaggccacggtactatgggagctgggaagatgggtgtaaagagtcagagaaggctttcctgtcttcacctggtctgtggtctgaagagtgaatagatttcagtttgacagaaggaactgcctgtgcaaaggccctgtggcagcagagagcaggatagctgtacaggggtgagagtgaagagatgggcaaagttctcatgatctggatgccggtatccatctacttctagagccaagtctgaacttgagacttttgatactcagtagtgtgtgtgtgtgtgtgtgtgtgtgtgtgtgtgtgtacacacacacatatatatgtagtggtctatagtctagtacttctatcctgagagagttatgagctcactggagagagtggtgtgagaagagatgtgcaccttgaaaagaactctggaacacacaactagagaaggacaaagtgtggagaacctatgaagagatgcaaaaacttggaacaaaacttggagaacctaatgtcacaaaaaagttttgaggtggaagaacagctgatcagttgtagcacttgggcaagtcttcaagtgtccacaaagtgaaggattgaaacgtccactggattgtttcactggaagatcaactgtgacctttgaaagaatagactgagaggagtggaggaggaaagatggagctgtcaatttgttgatgaacagagaagaaggggaaatgagtatatattcattcaatgactgaacaaatagttactgagcatctgtgtagtagggatccagtgttgatcaaaaccagacatagtgcttgttctcctccctgtcttgttcaaaccctttgctctttgcttccatggttggctgacccctttcccaagacacccactccttggctattaaaacatttaggcatgtaacttggttggccgggagccattgtgaatctctggggcaacttaagaagacttactgtaaagttgtggaaatagacttagtcacacagttctcccagcaccactcccaaaaagcaaatggacaatttagaactcaagtgtgaaggaaagaaagaaggttctgtgcgaatatacagcaaaacagcggggaagagtttgtgcagggaagaattccctgaaagtgatcctggagctgaaggaagcgtaggtgtcaactccaggaggtcttgtggggagatcacatttcaggacgtaaagggaagcttatggccagacgtcccagagcttatggctctgtggttccagagggcttggcagctccaggaaataagaaactaaatctgggtggttgtgggcagagagtgaggctgagaattatatagtccaaggctaaaaggtaggcagagccgccagggccttgcaggccatctttaagatttatgtctttatcccaggagcagtgagaagccatggaaggatgttggccagtgtcagcggacttaagttttagaaagtgttgtctcctgtttgtagagagaacgtgatcctattattcctttctgagccatcacgggcaggtaatgtttagagggagctcatcctggggtgagggtcagtccatcctatgagagtgtgtgcaccgaagctcttcaggcaaacaccagctcctctacaacccctgctgccttggcagaacagcatcaaagtttctcttggaatcacttggagaaaattcatctgaagagaagaatgcctttgttgactgtgtaaattcaggaggcctggatttctggatcagccaattgcaggcaaaaagaaagtaaaaatgcaggtgacttctgacagaaatgattttaagggccactggctttatttaggcttgagcctctctgggtggtgtccctctttggggtctaactggggacatgaccttaaagcagacacgtgttttcagagatttgcccacttctgtacttctgtttttagatctgatgaatcaagaaaggcttgttgagagtaacttaacataatttcctccaagaagtctgtgtgttaacaggactcgacttttgctggcatggggggaggggaggaatgatggattttcagagaagatcctggcgggtagtggtgggggctttctctgccacctttcagatcacagtcagtgggcaacccctccctctgctctgttaaggctcactttgcccagccctgttgcacctgtgttattttttttgcattaatgatagtctttctccacaaaagttaaaaatgtgatgcttcctgtcctgcttgtcctatcttctcctgtttctaaaccctctttctctctctctttttttttgtccaagagttcctccttaattagttttgcataatacatgtggtgccttctttatctgaatttcttttcatcctttctggtgctgtttatccaaacacctcccacagctttgttctctgtgcttctcctggttgactcctgaggcgacactggctgacacttggtaaaccagtgaccttgtttgggggctaaaattgacaaaaaactgatagaagaggataaaaaagggtagatggaagcattctgccagctctttcttgattaaggaagaagcagcttaggtgaatataataataggaagttatgttctgaatagttgggaaatatttgataagatactttaagaacaaaagtaacataattaaggcatataaaggatgaaggacaatgctccctaagggaaaaatgtgatagatggacagagtaaaaagtgattatacactgtctactttagagatagtcctttctgggagtcctgcatttgttactattgaaattagaagaatttgcctgggaaagtaatacatacataggaaaagtggatttaaaatatgttaggcactagaagttccattttgcacatctcttcagaaaagttgtctcaattaaaaggggaaaaaaaaaaacaaaaaaacaaacttgtgaggatggaatgagatatgtgtgaagtacattgagacctttgggtgaagttgttacagtgtaactttatgacttgggttttgattgtaatttcaagcattatattcttagatcagctggataaaggaaatagctctttaaccaaattagcagtaataggaaccaaagtaattttttttaaaaaaacttgtgatcagtctttttttgttgttctttttaatacagttttaaagtttacactctgtttacagttattacaaagtattggctacatcccccgtgttgtacaatacatgcttgagcctatattcacccaatatcttatacctcccactcctctgccctgctgttgcctcccgccctctgactggtaactaactagtttctctgtgagtctgcatcttttttgttatattcactaacttgttgtattttttttttttattccacatgtaagtgatatcacacagtatttacctttctctgtccgccttatttcactgagcataaagccctccaagtccatccatgttgctgcactttgcaagctttcattcttttttatggctgagtagtattcgagtgtctgtgtgtgtgcccacaccctctttattgattcagcttttgatggacacttgagttacttacatatcttggcagttgtaaataatgctgctatgagaatcaaagtgattttttaaaaatccattatatcttcgggaagattttgcctctgtgttaaaaccagtaatatttaactttaatttcagcatttttctttagatatgaatagtgttattaatcatgcaagtatcctggctcttttttaaagtcatgttttgtataacagtttttataatttccattttgccaaagttgagattaatttcatgggtttgagcacagttttctgtttacaaacccatttttttagccattatgccattgactctactctttcgttcatcctccatccttctcccaacctgcgtggttcagatatctttatgaatggctttgtcagagtgcactttgagtgaacagtgcatgagcccatggaggttagctatcacttaattatttttccgccggtcgctcatggtctaatcagctgtttgttaggacacttggtcctgttgtgtgagttgctccatacttctttacaagttgtaatgaggtgaagaaactaactaaattgtgaaaacaagcatttacttgtcaccacccatctcatttggagagttacagaaaagccactcaaagtggcactttgagtttttgaaacatcgtgtattttgaacatggctttctagcctataaaatagatagccacctgctgtatagcacaaggaactcagtattctcagtattctgtaatggcctatgagggaaaagaatctaaaaaagaatggatatgtgtgtatgtataacagattcactttgctgtacaccttctgaaactaatggaatattataaatcaactatattccaataaaaattaaattaaaaaaaaagaactcatatgctgtaggcagttagctatttatcccagtgtgagtccttggaaatgtaagcattaccgatttggagttggcctctctgtgcctacatgtgcccacatgaagtatgaaagggttaatcactcagtcatgtccgactctttgtgaccccatggactgtagcctctgtccatagaaatctccaggcaagaatactggagtgggttgccattcccttctctggggaatattcccaacccagggattgaacctgggtcctcctgcatttcaggcagattcttgaccgttggggccaccagggcagaccctagtagaaggaaatggagctctggcccagtctgccaaggtaggggcaagtggtgggaatgctgtttgctttgaaaccgtttgtattggaaattgagatgtgtgtccccagtccagttggcggtggagaaaggccttgactggtagtttgttgcccatgcttggggaaaagaaaagtgaatatgtggccattggtgacactgaaaccttctacagcagagtcataatctctgtgaggaagaagtacatcatgttgtgtggttgttcctttttcttgttttttcttctgtttctccagtgatgggttctttcttaggcaccctcatctttccatttatataagttcatggtctttgcatactgaatatgtttattcttaaagttcagttttgcatgaggacatggatcttggcttattgttgggacttcagcatataaaatagtactgggtcataccatggactcagtaaatatttactgaaagaaatttcagtttaatccatgactcaatctttacttcttgatttttgtgtttgagtgatctagctgtccatgggcttgtgaggatgatttatattttcctctaaaggaagggtgaaacagatagctcataggttattctggtataaaacagacccctttgaaaaccagcctgaggctttttttttttttaaatatagtagacactggtttgatcttctaacaaaaatactactcttaattactgtgcagtctttgttacacttataacctctggaacaccaaaatggcaacacattcaagtctttgcctttaaagatcttgcctttgtagttgtttattggtggttcatcatatttagctggaattgtgtctgtaacattttaatatgtactttatgttttcaggtaaaaaacaaaacaaaaaaacctcaatctaaatggatttggttttgaattttaaaattactttttcattttacaaaagtacagaataattaaaataatgcaataatggtattttctatgaagtttcatcatttctaattttgtttgtggagattataagttatgatctcttgagtcttcaaagaatttagaaatttgatttcccttttaagtcgaccacattttctgggttttagtttcaattattttgaagccatagagatgaaaattcaatgtgtatcagaacagttttccctaggaagtggatctagtttgtggttgacagtagtgatttccaaactagctaatcatggagataacttggtgagcttttaaaaataaatatagctatatttagacctagactttgaaagtaccctttcaatctttattttttaaaaaattccctcatagtttctgatgacaagcaaagtctggtttggaacactgggtccaagaattcaaagtcatgagtgtgattggtctgttagcctactgattgtagtcactccctctgcctggagacttgcttctgaccgtgaaccgctcatggatgacgaggcagatcaggtcctcttctctgaagacagcttattccttaactactttaagcagcagccttatctctgagagcttctttcttcttattcttattttttttaatcaatggttaatggagtggtgttgttgaactgccattgattgagacacagtggtcctttccattgactagagttggaattcagaaactcagtttccttctaaaagtcataactcctaactctgccttgttgtaggagatgtttcaggaatatgtgcgcgaaaagcactggtatcagattgcatgaaattctgcctctcccatgtcctagatgtgttttcccattggcaaaatggaaaatatgtgatgggaatctttagagaggtaaaactgaatttgctttaccactgtagttaataatgccataaaacaataataataatgagatatgagatatatgatataagatgaaataatgcctatgcatgcaaataaagtgtttagtaaatattaatggtgggttgtttgtctttattgttttaagatttttaatgagcttgttttatcattgtttcatgagcaacatagtagtgttatcggtgtttgagtgaaatttctgtccgaatataagaagtgtgttgctttcttgttttatgccattgtttttcttgaggagataaattcttcttcgagagctctaatttgccctgcatttgcaatgtaaggtttttctatggttccaaagaaagagccgaggtaatggagcagtgacatggttgattctgcatgaaggtgactcagttttcagcccttgaggtacttgagcatcaggtgtggtgatgaactgcgtctcgtttacgataatgcagccaactctttttggatataaacaatagcacagctcattggacaggagggtagagccggcagtcccgcgagtgtcactggcatgtaaactaagctggtgattttatatcatcctaacaaacgtgctaaatagcgtgaagaaatacaggcccttgaattgtcttggtgctgctgcctattcagcctttctgtacccaggatgacaagaaggctgtaaccagctttcatgaatgcgatatagatttgatattgtactttttattgactatgacacaatggatttgggcactttaaacgacagaattcttcctccttttgaaatgtgagttaacaaaatacttattcttggggagaaattgtcatcacgaccttctccatttgttttcactgtggttaccctccctcctgctcctttatcagacaggcggacacacacccaaacacagtccatactcatcaatacttgctaccagaattgaaccattttgttttcaaaataagattttgcatttcagaagaagatacataaactgggccacacattgaacaccctccagtagatgaccttgaccctcttttctgtctttgttgtctgtgtagaaatgatcaattaggggtgctttgtccaattgtgaggtggcagtagtgacgcttactggccccacgggagcattgagttactgccatctctgtgcagtgtctgatgagtaaataaatgagcaagggtgactgctaaaggctggatgtttttgcatgggtggactatgatagttgaccggttgtttcagtaagagactaagaggaaccccaaggttgtcttcctctagggggcttaaggcatccctggcggctcagtggtagagaatctccctgccaagtgggagacaaagtttcaatccctgggttgggcagatcccctggagaaggaaatggtgacccactccagtattcttgcctggacaaatccatgaatagaggagcctgatgagctacacagtctatggcatcacaaagagttggacgtgactaagcaactgaacaacaacagaggccttaacctgtaaaaattatgaacagttcaggatagttcattatccattcagtttttgcagtttcattggatacctgctatgagcactgtattgtaccaggcacaggaggtgtaaagcctactttagtagattctgatggaacagaaacatcgtaaaataagtgtctttccttatatactaaatcatgcttgtattccatgggtcaaatgctgtgcaacacagatacaaacatggctgctgaacatcgtcagttgctctttttttttttttttcctctctatgaagttaaatagagatacttactacctgcttccacaggttacatttaattgcagtatgcagcccagggagaaatgttagcagctcatttcacttggttccatagggaagaaattatttgggaatgccttcaattgtgatttttccatacggtagaattcttttctaaaccacagcttatattcctttgaacacaagaagtgtacatcaccaccaggcataataaaaatgaatcataccatatagttcttgtttgtatggaaagttcctagtgaatgttcccctttatatatatgtaaataaatatatctgtatacctatgtacctatttctgtattcattatatgtatttataacatatctatacatatgtatttataaaaggagtcaaactgtaactctgtattagagtttttaatagctagtgacattaagcagcattggttaattttaaaagaaatgtgttgacagcacattgggagtcctgcagagttgttaggtagataagagaaccagacttggagccatgaagctgaagcagtacttcaaaccacagcatggaactgctctgcctaacaaccactgagggagaggcaatggcaccccactccagtactcttgcctggaaaatcccatggacagaggagcctggtgggctgcagtccgtggggtcgcgaagagtggaacacgactgagcgacttcactttgacttttcactttcatgcactggagaaggaaatggcaccccactccagtgttcttgcctggagaatcccagggacaggggagcctggtgggctgccatctatggggtcacacagagttggacacgactgaagtgacttagcagcaacaaccacggaagcctaccctgttgcccctggtacaccaggaacccagtcttctcccaccacgaccatccccactaatgcctactacttatgtctagcacctgcgtcctctgcaagtacatctgattggtggatcctaagtcatgtgttcactcctgagctgcaggagaggccagaaaagaattatgactccccacttctctagtagaaggctggctctgcagccaaaagaacttggctaactgtttaataatcataccagaaagtttgaaaggtagagaagatgaaaatatcatgttccattattcatatataaaagtattgtaaaatgtaattttcttagtttaaaaaaaaatcgaggtttttttgtcagtacaattataggttttatacttttacatatacattttgtttccaatattgtgtgtttttgtattgctgtttacatcccttatgtgtccttttaaatagttgcataataataaaaatgaatgtactttgtgattcttctcatgctggagatcactgataacattttcattattatgaaaaataatatggtgaatatgttcatgtctaaagcttttacatctggatattggatttaggggttaagagcccagggagaaatctttagggaagatggagccttggtcttttttgacaaagattacatttgttccagtcctactgacattgatggtgaccacattaaaattctagtttgatcagtacgaagatagatgttataatgctgtcaggatttatctctcagtatggaattacttctgtggtttttctttcccttcccttttctcatctttatgttttaaattttctctaaccatacatgttacatttttaaataataaaagtgataaaatatttgtttcctccctagtcttgagggcagtaataaattcaatacaatcccctcagtggtttttctctggtacattccttcttgtggtgacaattttggaagtctttaagcaagcgtattttccatatcacttgtagcagggcattggcgactcctgagaagtgaaccgtcgatgtatcctgcttattttggttggtttggaacacagcaaacttggttttagatctctgactgtgtgagagcaggtgagtgatattagactagttatttaacctttctcagttctcttatctgcaaaccagacgagtgaaagcacttaccattgctatgagcatcaagtaaggtcctcatctgtgaattcctgagcctgttccttatacagaagagatgctccacagaagtaacttttcttctgtaattttctttaagcagagagggtaaaaattgtgtgaaaactcagtctcctaacctctcccattttaaatgtggaacattgcatggcttgttgttaagtaaataatcgtcttgtaaaggcttccaaagtggctcagtggtagagaatcctcgggtcattgcatgagctgcaggagacgctggttcgatccctgggtcaggaggatgccctaggggaggaaatggcgacccactccagtgctttcctgggaagtcccatagacagaggagcctggcgggctccagtctgtggcatcacaaaagagtcgtacatgactgagcaactaagtatgcacgcacacacacacacacacacacagacacacacacacagacacacacagacacacacacagagacacacagacacacacacacacagacatatacacagacacacacacagacacacagacacacacagacacacacacacagacacatacagacacatacacacacacacacacacacagacacacacccctaaaggaaaaccaataaaaaatattgcactatctggcctttcgtgacatgcttttccttaatcatttctattttttcaggaaaacatgttcctcttccctccatctgtcctctcctccctcctttctctctctcatcattgtatatcaaatgataactttgcaaacatattcagtggtaaagttattaatatgagtgcattattacatatttcagtgctaaagggaaaggagacaacactcaaagtcaggcatcacaatgcaagaattttctagagtgctaattagataaaacagacgatgtaaggcatcttcagtttggcaggtgagatcacttattttgctaaaactaagagtccatttatggtcatttagagccacatttatgcgttgcaagcatcatttgagacaaaagattttggagatgatagtttaatgagtgcagtttcttccactttagctttttgtttgtttatccttctaagtattttacagaactttttttttctttaaatatggaggatgaagaggcagatagcaaaataaaactagagctgaaatctttaagaccgaaattgaaaatcattagaattactttttctaataaacacccaggacagcatttgtgtgtgtgttttcagttcagttcagttatcagtcgctcagtcatgtccgactctttgcgaccccatgaatcgcagcacgccaggcctccctgtccatcaccatctcccggagttcactcagactcacgtccatcaagtccatgatgccatccagccatctcatcctgggtcgtccccttctcctcctgcccccaatccctcccagcatcagagtcttttccaatgagctttcaactcttcgcatgaggtgcccaaagtactggagcttcagctttagcatcatttcttccaaagaaatcccagggatgatctccttcagaatggactggttggatctccttgcagtccaagggactctcaagagtcttctccaacaccacagttcaaacgcatcaattcttcggcgctcagccttcttcacagtccaactctcacatccatacatgaccacaggaaaaaccatagccttgacgagacggacctttgtcggcaaagtaatgtctctgcttttgaatatgctatctaggttggtcataacttttcttccaaggagtaagcgtcttttaatttcatggctgcagtcaccatctgcagtgattttggagcccccaaaaaataaagtctgccactgtttctactgtttccccatctatttcccatgaagtgatggaaccagatgccatgatcttcattttctgaatgttgagctttaagccaactttttccctgtcctctttcactttcatcaagaggctttttagctcctcttcactttctgccataagggtggtgtcatctgcatatctgaggttattgatatttctcccggcaatcttgattccagcttgtgtttcttccagtccaacgtttctcatgatgtactctgcatagaaattaaataagcagggtgacaatatacagtcttgacgtactccttttcctacatggaaccagtctgttgttccatgtccggttctaactgttgcttcctgacctgcatacagatttctcaagaggcaggttaggtggtctggtattcccatctctttcagaattttccacagtttattgtgatccacacagtcaaaggctttggcatagtcaataaagcagaaatagatgtttttctggaattctcttgctttttccatgatccagcggatgttggcagtttgatccctggttcccctgccttttctaaaaccagcttgaacatcagggagttcacggttcacgtattgctgaagtctggcttggagaattttgagcattactatactagcgtgtgagatgagtgcaattgtgcggtagtttgagcattctttggcattgcctttctttggaattggaatgaaaatacgtctaaaaattatttaaactttttttaatgattttttgaaggaaaacttctaagatacatcaaaataggaatagcatattcagcctcattctcccctactatttagctttaaaagataccagtgtttgcgtcacttctattttgaccttttaaaagcatttagaaaataaaaatctgtgtgtcatataaaaattataaattaatatattttaaagttgttttatttatatacacacatattgttttctggctacaccatgcaacttgtgggatcttagtctccagaccagagatcaaacctgggccctcggcagtaaaaacatggcatcctaactactggactgccagggaatgcccagtaagttgttaaaatacattgaaaaataattcctttttaagtatacaggaaataaataaacgaaaactatttttcttgttattgttgtttaggagggtaaggaggatttgtgtgaaacattgtaaaaactaacagctgatgaactctggctttgtttgcaagtgcagtaatgttcgtttaatatttatcagatagaaaagacttttaagtgatattgccaaggtactcacagttgccagtgcactcagatgcctaagcaagtttccggtgtgctttttgaatcattacaagtgtttatttttattctgtgtagttttcgggcatagttgatcattattatgtgatattggtagttctcattttacctttccctccccaccccaccctgttactgtctagagctcaagtctcagattttgaattaagttcttcacagagatgatagtatttcttcctccttccatttaattgaaaagtgtccttcacatgttcagttcagtcactcagtcgtgtccggctctttgcgaccccatgaatcatagcacgccaggcctccctgtccatcaccaactcccggagttcactcagactcatctccatcgagtcggtgatgccactcagccatctcatcctctgtcgtccccttctcctcctgcccccaacacccccccccccgaccccgagcatcagggtcttttccaatgagtcaactctttgttaagaccagacataaaataactgttgactttgaaactcagatggacttcccagaaggcactagtagtaaagaacccgcctgccagtgcgggagacataggaaacatgggtgtgatccctgggtcgggaagatccctggagaagggcatgacaacccactccagtattcttgcctggagaatcccatggaccgaggagcctagcggggtatagtctctaggatcgcagagttggacacaattaaagcgacttagtacccacgcatgcttgaagctcagaaacacaaaggaagcacatcaattgtttatgacatatctacactattcctttggcttgactggtttgttgccctttttttatgaagtctaccctcaggtttggggtggtgaatggacacagcatctgttagtgtagggcttctccagtattgggattggggccgggtcattctctgttgtgaagggctgtcttgcgcgctgcagcatgttagcctcatctctggtctctacctgttagatgccagtagcagccaccgctcgtccagctgtgacaactaagcatgtctccagacattcccaaatgttcctcaaaaggaaaaatcacctctggttggttgaaaaccactcttataaagggttggaccatctaaaattgtgtacatttgtgtgtgggttccctttcctctgtccccaccctaatcctccgtttgtaagctgaggagagaaatgagggagttactttcacattaggctagatccctctttctctctactacatgtaagatacagactttggggaacttactaacccattgccttttttttttttttccaaaccagatagtgcattgggccatttaatcaaagagtaatctgcacacttctcttccctaacttttttttttctcctgatactggtttataattaggtatatggcaactggcatttcagtgataacagtggttcattttctttcttataaaagacatcagtcactatactgtacactgttttaacctttcctttaaaaatcccatgatacagatgcttttgattaacaaaaattccttttgagtctgaaagattctttttgcctgccaacccctcctcccccgttcctgcatacatccccccacctcccaccatcaaaggaagaaagaaaggaagcagcatcaacccttaaattattccaagtactgaggcagctttcccttaagaaattttccctttgactctatgctgtaaaattcagttttccttctattcacttaggaatcaggttgaacattggcctagtgtccatgcaggcaatcatcatatgttaaagagaagcttatttataatgaaagtgtgaaatcaggttttcaagagaaaagcatcctacaaagctacagtttcacatcctacagtttcacaatcagtgctactatgctgaaatgtaaattctgcagataactcagcacatagtagtatttagtgtagtggttgggagtcagcctcagacttctcatccctaagtgaagtgaaaggtgctcagttgtgtctgactctttgtgaccccgtggactatacagtccatggaatgctccaggccagaatacgggagtgggtagccgttatccctaaaacagaaataataacagccgttatctcatagggttgtagtgaagattaaataaggaaatctgttgaaaaattttaggtaaatcacctgatatatgaatgctccctggtatatacgtggtatatagatagggcatggatatataggccttccttggtggctcaattggtaaagaatccacctgcaatgtagcagacataggtttgatccttgggtcggaaagatcccctgaagatggaaatggcaatccactccagtattcttgcctgggaagtcccatgaacaaagtccttggggccacaagattcagatacaacttagtgaccagactaccacgtgtgagtgctcaataattactttattttcactttttaatagtttttctttgttatgagaaaccccagtatattctcatattctttcctcttttcaaaattcccatttctgttcttgaaagaagtattttgtccctttcctccttatccattttatccattattttgtcactcaaagaaattcacgttgggctatctcagttacagtattggttttgtataggtatgtcctatctttatacatttttatggttttgcagcaaatttaaatccccctgagagtttgcattgtagagtgtgataaatctttttttttggcaaatgaacttttttttaatgaggaaaatacagttcctcctaaatatctttatagttcaagtttcagttgcctgtttttttttttttttttcttctatgacacaatgtagactattggccgtttggtttgaaagaggtagtcctaagtttgactaaaaagggtatggtttgagttttgttccctctgcacaagttaagagaagatcccctggaggaggaaatggcaacccattacagtattcttgcctggaaaatcccatggacagaggaacccggcagactacagtccatggggtcacaaagagtcagacacaaagagtgagcacacacacaagttaattttaaaacatttcatttttggctaaaatatatatcagtgagaatactacacaggcagatccagcttactctgttaacaaaatgtttcagaggtgctcaggatgacggcacgatagaggagtgactggttcacgttgaatccatgatctattcattgaatgtcgagttagctccattagaagaaagcttcaggcaaagatccggaatggcaagcaaaaaagcagacatttaagcttgtggtatatcagattgatcaatagattgaccaagtgcttgcttagtaagtatgctaccataggacttttctttttatagaaaatgagtacaagtgatatatcaggtatgtacatttctttgtgctgtgtgagtgcagatacattgattcaaacttaaataaaagcagagaataatacaatgagccccttatatactcaccacttagcttcagcagttttcaactaatgggtcatcttgttttctgtatatatctccttcttacctgcaaattatatacgtaatttcatctttatatgttttcttgttagacctcttctagaaaaatcatagccaaaagttttcatataatgtttaggggtttccactttccctgaggccccaattaagaaagagtacttgagctaactcctttggaagtgggagagaaaaaaagatttcacagagccttctgtatgatactccagtcagcaaatgtccagtgctcccagattcttgtttctcctcttttaatcttatctttggcatccatcagtgatatttgaatcagaaaagataaaaggatacctgagaaaggctgaactgccccctccttttggccctctccacctggagaagggaatggcagtcctctccagtattcttgcctggagaatcccacagatagaggagcctggtgggctacagtccatgggatcacagaaagttggacatacctgagtgactaacacttcacttctccttcaaggtggctttttctttctttctgtctttttttttttgagccagatgagttaaatgatctaacactgatctacttggatgtgaaaacaaaaaaatccaggactaataataatggagggcattattaatttattgatcatttactacatgccaagcacttctcatgcattttatcacttaaactaatcgacaaaatgatcaactactaggggggtagtatttgtgaacccattttatagatagaaaaactgaagttcacagcatttaagcaacttgcttagtctttgaggttgaatctctctgagattttagccagatataagacaaagctgcctttctccattgcactgacagttggccatacattaggttgtgtgttccaagcaggtgtacatggggtattctgccactatgtacagcatgtataattactttccgtgttgatatgagacctttcatagtattgtgtaagaaagttctttatgcttagatttgatggaagccaagaagcagctggagacaagaggtagcagctcatgtatctcatatccaacggtatcctaatgagtccaaggcatcatcaactatagggagctactgttgtagtaaattcgctaagtcacgtccaactcttttgcgatcccatggactgtagcccaccagactcctccatgtgtgggatttcccagacaagaatactggagtgggttgccatttccttctccaggggatcttcctgacccaggaattgaacctatgtctgtggcattggcaggcagattctttaccactgaggcacctgggaagtttgacatgtagctatttgttgttgtagttattcagttcagttgctcagtcatgtctgactttttgtgaccccatggactgcagcatgccaggcttccctgtctatcaccaactcctggagcttactcaaactcatgaccattgagtcggtgatgccatccaaccatctcatcctccgtcatgccctattcctcccaccttcaatctttcccagcatcagggtcttttcaaatgagtccattcttcgcatcaggtggccaaaatattggagtttcagcttcagcatcagtccttccaatgaatattcaggactgatttcctttaggatggactggttggaacttctcgcagtccaaggggattctcaagagtcttctccaacagcacagttcaaaagcatcagttctttggcactcagctttcttcatagtccaactctcacatccgtacctgacgactggaaaaaccatagctttgactagacatacctttgttggcaaagtaatgtctctgccttttaatgtgctgtctaggttggtcgtaacttttcttccaaggagcaagcgtcttttaatttcatggctgtagtcaccatctgcagtgattttggagccccccaaaataaaatctgtcactgtttccactgtttccccatctatttgccatgaaatgatgggaccagatgccatgatcttagttttctgaatgttgagctttaagccaactttttcactctcctctttcactttcatcaagaggctctgtaggtataggagcctcctgattattcctcctgtgtccactgttcccttacacccttgtaactgcatgaatgatattttacaaatgttcatcaagtcttgtcacttctgtgcctaaaatctccccaaaccttctcataagtagcagagaagaaaagtcaaattcctttctgaggcctagtgttagtgttagtcgctcagtcgtacccgactcttttcgaccccatggactgcagccctctgtccatgagattttccaggcaaggatactggagtgggttgccactttcttctccaggggatcttcccaacccaggaatcgaacccaggtctcctgcactgcaggcagattctttacgaactgaactacaagggaagcccagctctataatatctggccccgaccacctctctcagtttatgtgctgagctggtcactgctccagcccctcggccttggatattgatgttattctcattcttccaagatgccaagctacttccggctcagggtttaagcacctctgactctcgacatacctggttccttcccatcatttgagtttcagctggaatgtccccactgcagagtagccttcttttctcccagtggcttactttatcttttctgctttgtacttgtatcactgtgtgaagttcttctttctttgttgacatgttgccatcgtgtttgtctctgcttccccagcttcagtatggcttttgtggggtcaggagttctgctttagtggctgctttaatcctctgagcctccataaatgctagttgaacaaatggctaggttgtttggtggggtagttataacgcacctgcacataaaactctcggtcagaaagtacttgtgagctgctgctatcaattgttggagttgttcattccagactggaattcgcttatcacataatgtgtacaagaggtcttaggattgcccaacacagtgcatttcctcaaaaaccaggaagacctccttggtctcatgatccaggccctgaagtccgtgttattatgaggcggctgctttttgccagctttcagctcgttgtggacttgaccttcaaaccggcagcattcagatctcctttctggctgaccttttgcttaggcctagggcaatgttttcatctctgtcaaacttgaccactgccagtttcttaaagagtgtctgtccttctgagaaagagttttgccgcttgtgccgtaatgatctctaatacccaataaactgcaaacaataggggcatttggggggagaaatgctgaaacaaaaaggcgtctgcaatttggaggcagtgctaaactgggtcatagaaaaaaagttataacacgtggaatgcggcactcacaactcccattggggtgggggcagctggacagtccttacaatgagctcttattataagaacaccacgcaatcacgtaattgcagccctttagaaaaccgtaaaaatgtgtcagacattgtacaaactggaatagtctgggcttgattgttagaccaaaaatttcaaaagtagcagggtcttcttaatctaacctagtatttaaagaaaaacaattgaaatgaggcagattttatcattacattatgccttcatgagtttatttctggttttcaaaatttttagcagggaaattctgccggaatatatttttatttgtccagatccacaaactttaatttttgtggaatttatagattttttttcttaattacaaaattagcatcatatacaatattgttgttgttgttcagttgcaaagtcgtgtctgactctgtgtgacataatagaaaatattttaaaaaaccaataagataacagtcatctatactttaatcagcctgagatagtcatgatgaagatttttgttgaatgatttgtaactggtttgtgtgtatgtgtgtgtgtgtgcatatgtaatgaaagcatttttaattcagtttagggtcacagagtaggtagtgattctaacttgttttgtgttcctacttatatgataaacttctcctctcattaaatagttttataaacacatttcactgtctatattgtgtccatctatttgagggcaattgccctcctcaccctaaggacatttagaatgtctggagacatttttgaatgttacaaccagtgttaaggaaatggttccattggaatacattgcacagaggccaaggatgttgctaaataccctgtaatacacatacaaccccataacaaagaagtacttggcagtagggtcaatagtggtgaggttgagtaaccttgaactcatatagctccctcataattacttgaatgcattgctttgtattgatattaatttccaatattttgttatttgagattagtggttggcacactttctttaaagggctgggtagtaaataccatatgttttgaaggatgtaaggtctattacccaactctagtctagtattgtaatagcttgaaaacagttgtagactacatgtaaattaatgagtatggcaatgtcccactaaaactttatttacaaaaataggcagtgggtcttaaggcagtaatttgccgtcttcttttttaggtaatgctctgctggacctctctgttcttaaatctttgcccttatatctgatgattaccttagaaaagttgtgtaaaatgtgaattgctagatgatcgtgtgcttttaaaaacttagtatcaattcattttctcacctgtatcatatgagattgttcatttagtgtattctagtcccacttatgctaccatcatttcatcggatttggaactacctcctggaatatgggatgtgaaaggctaaggcagtttgccaatttaaataccttcaggagtcaagcaaattaacgagtaaatcagggccgttttaaatatcagaataaggagtgataaccagagatcaaattgccagcatatgttggactatagaaaaagcaatggaattccagaaagacatttacttgtgcttcactgaatacctgaaagcctttgactatgtggatcacaacaaactgtggaaaattcttaaagatatgggaataccagaccgccttacctgcctcctgagaaacctgtatgcaggtcaagaagcaacagttacagctggacatagaacaacagactggttccaaattgggaaaggagtacgtcaagactgtatattgtcaccctgcttatttaacttatatgcagagcacatcatgagaaatgctgggctggatgaatcacaaactggaatcaagattgccaggagaaatatctgcaatctcagatatgcagatgatactgctgtaatggcagaaagtgagaaggaactaaagagcctcttgatgaaaatgaaagagtagagtgaaaaatctggcttaaaactcaacattcaaaaaatgaagatcatggcacctggtcccatcacttcacagaaaatagatgagaagaaagtggaagcagtggcagattttattttcttggactccaaaatcactgcagatggtgactgcaaccacagaattaaaagacgcttgctccttggaaaaaagctattacaaacctagatagcatattaaaaagcagagacagcactatgctgacaaatgtctgtataggcaaacctgtggtgtttctagtagtcatgtacgggatgtgagagttggaccataaaaaaggctgagtgctgaagaattgatgcttttgaactatggtgctggagaagactcttgagagtcccctagacagcagggtgatcaaaccagtcaatcctaaaggaaatcaaccctgaatgttcactggaaggactcatgctgaagctgaagctccaatactttgtccacctgatgcgaagagctgactcattagaaaagaccctgatgctgggaataggattgcagtcaggagaagggggcgacagagaatgagatagttggatggcattgtcaactcagtggacatgtgtttgaacaagctctgggagatggtgaaggacagggaagcctggtgtgctgcagtccacgaggtcacaaagaggtggatgcaacttagtgactgaacagcaacaagaatgtggcaaaatgaaaagcaagagtcacatcaaaggaaggcagctgcttctcaactctgccccctactggcccactgtgtggttgttcattgtcgctgctgctgctgctgctaagtcgcttcagtcgtgtccgactctgtgcgaccccatagatggcagcccaccaggctcccccgtccctgggattctccaggcaagaacactggagtgggttgccattcccttctccaatgcatgaaagtgaaaagtgaaagtgcagttgttcagtcgtgtcccactcttcgagaccccatggactgcagccttccaggctcctctgtccatgggattttccaggcaagagtactggagtggggtgccatgaggtctttgtattcagaggaaccagacatccaaattttagtatgaaaactcccaatttttaattaaatagtctgtagaccattaagccatacctgtggactgtgcctatgggccaccatcttgaggacttctgacttatcacgaggtctacagtgtagtgaaagttgctcagtcgtgtctgactctttccaaccccatggactataccatccatggaactctccaggccagaatactgcagtaaagtgttagtcactcagttgtgtctgactttttgcgacccccacggactgttgcccgccaggctactctctttgggattcctcaggcaagaatactggagtggattgtcattcccttctgcaagggatcttctcaatccagggattgaacccaggtctcccgcattgcagacagattctttaccagctgagccacaagggaagcccaagaatagtggagtgggtaacctatccctaccccaatgactcttcctgacccaggaatcgaactggggtctcctgcattgcagacggattctttactgactgagctatgagggaagctagagatagagacaaatgtccaggctcttggccatgtgtgttagacactcagggccctaagcatcatgaataagagctataagagttggcagtctttgggtctgccctcacagaaaaggaagttttgtaactcagattagggaggtgcactgtgaatcatctgcctggcttggagacatttcctccagggttttctgaattagtcaagaagaaaatcagtctgccacttctccgttctctcaggacatttccagaatctatgaagacgttaacctccaacctgtctgaggccctaaacagtctgatgccctttgtccttagtgttctagtctctttcctcgttcatgcatttcagccccactgcctccactcaatcgattctctacatgtttgctgagctcctactatgtgccaggccatgttctggacacagagaacaggataggggtgggtgggggccactggtggggaggggattggggtttctaagttcttaagatggttatgggagataagatcagagagaagtgaccccgggatggagggggagatgggcgcagtgggctggagtcttcaaactttgttgtggataagaatctacctggagagcttgttaaaacatcaatttctgatcctcactcagaaatactgatgcatcacttccggtgtggagcccaagaatgagcatgtctaacaagcccatggacagctctggtttagggacttgtagaccaatggcaccccactccagtactcttgcctggaaaatcccatggatggtggagcctggaaggctgcagtccatagggtcgctgagggtcggacacgactgagcgacttcactttcacttttcactttcatgcattggagaagggaatggcaacccactccagtgttcttgcctggagaatcccagggacaggggagcctggtgggctgccatctatggggttgcacagagtcggacacgactgaagcgacttagcagcagcagtaggccattgtaaggagctttattttcctcagagataaatagggagccattggagaggggttctttgtgcataggagtggtatgatctgacatttttacaaggatcacacagtatattgaacacaggctgcaagagagcacattgtaggtggaagagtcaagaggcttttcagtcacccaaatgtgaaatgatgatggcccagatcaagtggtaacagtagagataatgaaaattagttacatttgagatatatcctaaaaagaaaaccagtgcctcttgatggattggatgtagggtgtgaaggaaagaaatgaattgaagataatgaagttgaccacagttttggaaatgagcaagtaggctgaaccagatgaaggttatttatttattttaatttcttatgtttcaacataatggaagaatgggattggcatctactaagatggagaagagcatggcaggagctgattgggaggggaagatgtctgcagtcctctcaatggagtaggctggtggaggtgactgtggagttcaggacatctgaaccaggtgtttaaatccaggagcctggctcgtcaccagggctgtgcttgcagagagaggaagtcaagctgtgaaccctagggtgctcttacatttaagaaggagagaagaggagaaaactagcaaaggccactaggaagaaatgatgaaagaggcagggcaggagaaaacccaggcaagtgtcaaaccctgtcaagaagcagccaaggaaagtgtgtgtgaagagcctccttactcttccctgaacgcgagaggcttgttcacacctgaggacttttgtattttgatgggttgctctttccacccatctcctagctcattctctttccccaactatagacctgtacttacatgtcaccttctgggtgagggtgttgcccctgaacagcctgtgtctaatgaagacagttgcctagcatctggctggtatacagtatttggtgagtgaatggtgcagatataactcttttgatgggagcagaagttgaggtgaaaatgtgttaaagccttgcactcagggtgtggtgtggtttatggaccagcagggtagacttcccctgggagcttattagaaatgcaggatcctgggccctaccctagacctacagaatcacacagcacttaataagatcctaaatgatttatttagacatgaagacttgcacccaaccctatatttagttctttttgtgtttggcaagaggacaattgggtatactctgaatagtagcaattcagtataagaggttaaacctatgaaaatctgaagagtctgtagttccttctgtatttaatcagttgtcatctatgattgtaaaaaattgtgagaagaagctttcaagaatactttataagctatccaagtgatttctgagctttattttaaattgacctgagctaggagtgaatataaaatgcacagcatcaggtacatggtacacagttttgattgaatgaatgctaattctgttttctgtgttttatgatataatcgtgcataatgatttatatggtcctcagaatgcaggacctgtaaatgcatggttttctcttaaagtcttctcttgggtcttgctgcttctcctataggaatttgattctgtaagtggtgtttttaacctgggattattcatcctctgcaggcagatggctgccaccctttaatctctcatatttctatttggctgagataaacacttgatgttcttttaatactcagaccttgggtttattttagtctgagagagaacaaataatatatatactatgagttttcttacagtaatacttcctttttatttttattttttgactgctgaatattgtttttcctgaataccaagcatgcccactttgcagtttagagtaagtcctgtattttataggtcattggtttaggataagaagcttgctaggaactttaggtaggtcagtccactttattctattacaacatcacagttttagaaaaatcgatttgctcgccattcctcatgtgcacatttactacgcatccgtctgaattcagagagcctgcagagtagttagccaggaagtggtgttaaactgtgcagatcaaaaacaatgcaatataaactcatgcatatttttgcacgcacaggatatgggagtacacttctggatgtagttttatctctgtctctttactcagttcaagtccttgttggaaattgatcagcagtgaaggggttccatcatttgttattggacacaggaggcaaggccctgaggttgttttctaaccctggcgagccttttcacttttccttttagagtttgtgttttatagcctttaaaatggggataattaagcatatcctctgttcttttgtccagttatttggaaaagcaactataaaattatttatacatattgaatttctcttttgataaaaatcacctcattcttcaaatcttgctgaagcttcaacatagtaggaaaactgaattctagattggtaaaactttcttacagagcaaggattgacattttctccaaaaacccagatagtagatattttaggctaggagccacgtgggctccgctgctatagtgtgggagcagccgtggacaacatgtcaacgaatggaaggggctgtgtgccaagcaaactttatttatggacattgaaatttggatttcataaaattctcatgtatcatgaaatatcattattcttttcatgattttcagccagttaaaactgtaaaactctattcttagtgtttaggccatgcagaagcagagagcaggcctaatcgggctggtgggcagatctctgtgatagggaagaagacctggctatatcaactgtagtcacttatttaagtactgatttttttttttttgcatatgatttttaaaaattgaagcgtatttgatttacggtgctttattagtttcagctgtacaagaaagaaaaatctgaaaaagaatatatgtatatattctttttcaaattctgttccattataggttattacaagatattgaatatagctccctgtgctatacagtaggactttgtggtttatctgtttcatgtatagttgtgtgtttctgttaatcccaaactcctcatttatgcctcccaacccttgcttttctttttggaagaccataagtttgtttcccatgtctgagaatctgttttctgtcttttaaatatactcatttgtatcttttttttttagattccttatataggtgataacagcttcccaggtggtgctagtggtaatgcaagaaatgtaagagacatgggttcaatccctggtgtgggaagatcccctggagaaggaagtggcaacctactccagtgttcttgcctggagaatcctgtggacagaggagcctagcaggctatagtccatggggtcacacagagtcaggcatgactgaagtgacttagcacatataactgatactatgtggtgtttgtgtttctcaacttacttagtatgataaactgtaggtccatccatattgctggttgtggcatcatattattctttgtaatgcctgagtggctcagtgatcagtgcaaggaaatagagggaaaaatagaatgggaaagactagagatctcttccagaaaattagagaatctaagggaacatttcatgcaaagatggccttgataaaggacagaaatggtatggacctaacagaagcagaaggtattaagaagaggtggcaagaatacacagaagaactgtataaaaaagatcttcacaacccagataatcatgatggtgtgatcactcacctagagctaaacatcctggaatgtgaagtcaagtgggccttaggaagcatcactatgaacaaagctagtggaggtgatggaattccagttgagctatttcaaatcctgaaagatgatgctgtgaaaaggctgtactcagtatgtcagcaaatttgaaaaactcagcagtggccacaggagtggaaaaggtcagttttcattccaatcccaaagaaaggcaataccaaagaatgctcaaactactacacaattgcactcatctcacacgctagtaaagtaatgctcaaaattctctaagccaggctttagcaatatgtgaactgtgaactttcagatattcaagctgggtttagaaaaggcagaggaaccagagatcaaactgccaacatccgctggatcatcaaaaaagcaagaaagttccagaaaaacatctatttctgctttattgactatgccaaaatctttgactttgtggatcacaacaaactgtggaaaattctgaaagagatgggaataccagaccacccgacctgcctcttgagaaaccaatatgcaggtcaggaagcaacagttagaactggacatgggacaacagactggtttcaaataggaaaaggagtacatcaaggctgtatattgtcaccctgcttatttagcttatatgtagagtacatcatgaaaaacgttaggctggatgaagcagaagccagaatcaagattgctgggagaaatatcaataacctcagatatgcagatgacaccacccttatggcagaaattgaagaagaactaaagagcctcttgatgaaagtgaaagaggagagtgaaaaagttggcttaaaattcagcattcaaaaactaagatcatggcatctggtcccatcacttcctgggaaatagatggggaaacagtggaaacagtgtcatactttgttttggggggctccaaaaccactgtggatggtgactgcaaccatgaaattaaaagatgattactccttggtaggaaagttatgaccaacctagacagcatattgaaaagcagagacattactttgccaacaaaggtccatctagtcaaggctgtggtttttccagtagtcacgtatggatgtgagagttggactataaggacagctgagtgccgaagaattgatgcttttgaactgtggtgttcgagaagactcttgagagccccttggactgaaaggggatcgaaccagtccatcctaaaggaaatcagtcctgggtgttcattggaaggactgatattgaagctgaaactccaatactttggccacctgatgcaaagaacagactcatttgaaaagaccctgatgcaggcattgaaggcaggaggagaaggggatgacagaggatgagatggttggatggcatcatcaagtcaatggacatgagtttgggtaaactccgggagttgttgatggacagggaggcctgaagtgctgcaattcatggggtcacaaagagttggacatgactgaacgactgaactgaactgaactgaatgcccgagtaatattccattgtgtatatatatacaacatcttaaactcttcatctgttgatggacatttaggttgcttccatgtcttgactattgtaaatagtgctaccatgaaccttggggtgcatgtatcttttaaaactagagttttcatttttcctggatatatgcccaggagtaattttgctggatcttctgaccactctgttgttagggttttgttgttgttggagaaacctccatgctgttctctgtggtgtgtataccaatctacatttccagcaacagtgtaggagagttccttttctccatgccctcttctgggatttgcatttgtctgcatatggttttgatttttctctcttaggtcaggatttgtgtccttgttgtctttcttttttattaaggagaacgttgtccaggttgcagtgaaaacattgctgaatgagaacttgcattctgggctgttgttttcattcatggtaatattgtaattgtgggactgaaaagaatcttgtcacctctcatacgtgaccctgggcaagactttgggtgagtcatttcagaatgctagctgtttcagaatgttctgtttcatcatgttctaacggatgatgattacattagtgaccatctctgtacattgtcctgtaaaaatggtatgaagagaagagtggcctgggggatgctgtggtgtctgtgcttagtcactcagtcgtatccaactcttcgcgcctccatcgagtgtagcctgccaggttcctctgtccacgggaattctcagggcaggaatactagagtgggttgccatgccctccaccaggggatcttcccaatcccggcatataacccaggtctctctcattgcagacggattctttactgtctgagccaccagggaagcccaagaatactggagtgggtagcctatcccttcttcaggggatcttcccaacctaggaatggaactggggtttcctgcattgcaggcagattcttaaccagctgagctaacaaagaagcccttgggggtggtagtggatagcatctgattgaattataatccattttaatatttcttttacttactgaacagaagaacacattctctctcgaaacacaaagtgagaaatctgaaagttttgttgacttgttcaaaaagtaaagtccattataaagtaaaagaattatgggactattcactcaattttatttttattctgatctacaaatagtagaggtaatcgaagtgcagtggatatcaatcagatggggttttttctttcctccggtgaattcttttgtcagccaatttgatggtatctgcaggcactctcttacactgatgtgctccagggtctctttagaatgaaactgatgggaaatagcctgtcagtgtcacctgggaagtggtgagactaaacggtgacagctagaaagtgattcattcccagtcttttgctatcagttcaggatctgaatgaaggaaggaaaaagggaaaaagacagtagtaataagaggaaagaaaagttttaaagccattggatttttgcccttgacccagatagctaccatacttacttatgtgaaatataagttatgtcaataaaatacggtgtttttgatagagtgagaagtattccagctttattttgtggtctgcacctcaactgctcaacaatacccaatttttggcatctgaattccgtaatacagttggcttgaaggacaaaaacatacaaaaaattagcaggaaatcatactgatgtttaatggcacatgtgttttcatttgcatccctgtttggctgtttaaaaatgaatgagagggaaatcactaactaaaaatctatggtttaggacagttgaagacagaacgttacatttatatggcttttactatagcgaaaggagagacttccctgatggtccagtggttaggactctgtgcttctagtagggggtgagggtttgatccctgggcagggaactaagatcccacaggctgtacagcatggccaaataaagcagtcaaaagactatagttatagagcctcataataatgttgtggaagttgaaactccaatactttggccgtctggtgcaaacagccagctcattggaaaagaccctgatgctgggaaagatggaaggcaaaaggagaagagggtggcagaggatgagatggttggatatcatcaccaattcaatggacatgaacttgggaaaactatgagagagtgtcagggacagggaggcctggtgtgctgcagtcgttggggtcgcaaagagttggacatgacttagcaactgaacaacaacaaaagcaatgctatgagaaattaggcttattagtgttttgaatgtgagtgactttgttatacaccaccaacacagtgggcaatagcatggctaggatgagctagatacagcgctacaggtagatcagagcttctcaaagtgtcatccaggaaccctgggggtctccaggattcctgccattcccccaggtcaaacatacttttataataataacagactgttattttccttttttaaaatgctcatctctcaaagagaatactatgccattttatgttagggacttgagcatccttggattttgccatctgcagaggtcctaaaacccatccttgtggattccaaggataactctatacagaagagtttcgcagaggctacataatgtgttacaatgtcattgttctcatgtccagcggactatatgctagtgagttatcttgtgttgtaaaattttctgttttaattcctaagaagataaatacagatagatataacccacacaaacacaagacatttaagagtttaaaagggtcctaaggaaagaaatggcagtccactccagcactcttgcctggaaaatcccatagacggaggagcctgatagtctacccatagggtcacaaagagtcggacacgactgagtgacttcacttacttacttacttaaggcaaaagagaaaatttgagaactgttgtttgagatggattgctaagcctagtagaagtgtggtttcgcttaatgccaaaaacagctctagcaggcagtttctgttatcaccctcattgagcatatgaagtgacaaaggcctggaaaggttaatatcgtgcagaaggtcacataagtagtaagttgcgaggtctgaatgtgatcccaggtttctaatacttaattcttctgctgactgtgccagcaggcatgatgtgcctctcagagaagcaccaggaatggaatggcctatatttgacactaatgtttcagaagaagaactaacttctaagcaccttggtgttcctgccaggccccagaatatagaaagaaagattctccttctggacagtgtagagcagagaccacatttctgttgagtctaaccaacaagtatgtttgatttgtcttgtacagtatgaaaaatcaaacaattaggtgtcattttcataatctgggagttttcattgaaaaaacaagttcaggttgcaggctaaactgaaaaattgaaaaaaaacctaactcagctggaatggtgttcccacagggccacagtcagttacagattatgtcagctgttttttttttttttttttttttttttacatgaagcacgtggactctatagtttgccacagacctcaccactcctgtgaggtctgtgcataaccctacagatcatgacctcctttatgttacctgtttcaggtattggattggtgatgtctgaggatgttctgtcttctccataatgtttatagccagtctgttcttaacttacttcaaaagacactgacagtaaaagggaaacaatatatcccactctgaccacctcaacctggttgtagtaaagacctcactctcaatgctgaacagacaagttgcttttttccttactaaagcctgaaattctgattcatttaaagaataaagatctgccagtgaattaacatttatttttaaatgtgcagccctttcctttttaagtgtaatagtgaaataagcacattacacccattgccctcatttgatgtttattttagtaatgtctattgtcctcatcattatcatgtctggaccctttatgaaacttaaaatgtttctgtgcacgttagatcagtcatttgaaacaatttgagattgtcaactaaaggacttcattagcctgggcatttggacaaaattattgaattttaaattcttgtactttaaaatatctcaccatttcagcagtgcctatcagccattatcataattttaaatatatatctgtttgtgttttccttcctttgcttcaccctagactctcagtgtcataaagctgacaattgtatctactttcccacaatgtgcattctttgcctggaacagcgtttagcacataataacattaaataatggaatgaataaatgagcaaatatacaaatacaccagttgtgtatatgataaatgtattcttctctaccaccaagaattacattaaaagattttcagtgaaaattgttatgcttcctaatttgaggactaaattggggagatgtgtatttcttattttccacgtaaatatgtatccgaaagtgcctctgtggatatatgtatttttccttttctatttagaaaagctcccgcttttcctaatgcaagatcaggaggaaatttacttatctatccagctaagaataagatgcagcttgagacctggatgcaaaatgagactgctgaactcgaaagttcatcagggattcccgcatactaaaggacactctttctgcgtttggaagtggctgagttactcagccattagaaaagtctcatgtgtagcttttaggcagtgttctccaaagagggcatctagctcttaacctattgctgaaagagaaatagcattgtctattaatactactggaactaaagatgaatagtgaattggccttgatctgacagcgagtttgactttgatagctcatcccttaaaaaaggttcttttatatttatgaaaaaaaagcatgacgtcaagctgggtgggatgggggggttgatatcaatatttaagagcaaactcgtagggcttccaaaaaaaaaaaaagccctttgtgtgaactcttttttttttttacatgcataactaattagcttaggttattataagcagggctgctgtgatgaagtttccggtggtatctcgggacaccttgtttatagtgctttctctatgccagtctacgaatcggaattacagaaagtagagggaacggatagtctactgtttcttgttggattggggccacctaaaacgtggttatgctggaaatgctagaatataatcactatcaggtgagctttattcttctattcagtctctgaaatgtaattcataaatcgagtgtttcagctttgcgtgttattgtaatagacacacagttttcagttggtacgtgtcttcccatttaatgttgtttattgtttgatgccataagcatccaatatagttttgaacagagtaaatattagtaggatttttcccccctgtgcatggctgtattctccctgtgactcctagtcatagctcgtaagattaaattgtgtttctcaagtaaaaagtgactatattgagtatcgttgattttgtttaaaagctgcgtattctctattaatgtcttataagaaacaaggtgaaaatattctggtggcttaatatacatgcctttaaaaacacatccaaaaaagaaaaaaacaaataaacacatctatggaagtgtttttgtgtttgaaagaaactgcttcatgtggaactgctttttatgtcaagatcttaattaaaatattgaatactcatgtcccaatgaaagcgggaagaattaatctgctactggtggatttaatcatcagaatgtttctgtttatgttctacaaccaaccgttttatagttgtttctaaaggaggttttgtttttgtgtttttaaacaaaacagaacgctattatatttgccaatgaagactgcaataagttatacaccttcttctggattattgttttgatcttaataaactttcaggtgtgtttgagaaaatttttaccctacagatagttgcagatttttagctattatgcatgagaagaagggcacaaggttttaaagagatggactgttaattagcagggaaatgaaaccaggcagagtattaacccaaatccgaagagttagcctttaaacttcagtaatagcaaaatccatcagcacagtgcctggtacctaacagaggcttaataatctattctgttgacggactggcctgtctcatgtttgcgcctgaaaagaagagctgtccaaaactcaccaataacagcactttcttctcttccctccatggctctgttcaggtgcagacccacctcgaaaaccccaccaagtaccacatacagcaagcccaaaggcagcaggtaaagcagtacctttctaccactttagcaaataaacatgccaaccaagtcctgagcttgccatgtccaaaccagcctggcgaccatgtcatgccaccagtgccggggagcagcgcacccaacagccccatggctatgcttacacttaactccaactgtgaaaaagaggtaattcatgtctcctcccctctcctttctcttacactgaatgactgtctgtcggatctccctcctgcacttgattgtggactctagtctgtccgcgtggccaccttcaccggcctttgtcccagacaccccatgctagctgtcatcctccagcctctggtccccgtcactgtccctgggttattgggttatggctccaggcaggggacttggctgcctcggagcagaacccggaggcgagggaccctttttctcctatcccatttctgcttgttagctgaatgttctcttccattgcctttccatttacaaagcattgaaaatgcagggagagaagggaaggtggaaaagggatagcaaaaatagaaaaggtgtcggacaggcagtttagaagttccgcttgctgtgaatgtctggaatattatttttatttctccctgagctggaaaggaaaaacaaaaaaagcacagagggtgcatggctggattagaagaatatagtacgtgagaatctaacagagaagcaaagatttcctcgctaggtgtattcggtttccttaataaattgctgctgctggtgaaagctgctttttataaaggctgggttggagacaagactcaaatatacctcaaagctaactgtggcaccaaaatttgaagcctacctaaaaggcaagttgtgatttaatgcctgttatttccaaattatgagatgctgagcatcattttcatggagtttgactgtcctctgaaatgttcacgtgatttcagagataacccttctgaagtttggttgattttaatttctagagggactaagtcttctcccttttgcccaaaccaaccatcttatttttctctgtccatgcttgtcatctgtcaaactgatttgatggaagttcttcctttattatttcacttcttggtcacattccactttactggagagctagttcatcttgttgctacaccatcaacctcgtgtgaaaatgtcactgaacagtcacttgcaaatccaagtcatgggctgattttgcttgtgtttttgcagggattttataagttcgaagagcaaaacagggcggagagcgaatgcccaagtatgaacacacattcacgagcatcgtgcatgcaggtactgaatgactcggcagcccaaggatataacactttgtaatgaggatctatatttgtggctaatcacatcttcttaatgactttggatttttgcccccacccccattgatttttttttttccagttgagaaagctatgaacagtgctgttttcttcattatgtctcatgatttaaaaactactagggaaatgatactaaaatgcattttcccctgagttgctgtaaggtgttaaacagtgcttaaaatacataaattttaataaataagatgtaaactgctgtacttcatttagataccatcatcaaagtatgttatacaaatttatgggctagcaacttggacagaatatctgtaaaaccaagatgtgtgtatgtgtaagatctatatagttttataaaatgaaatctcatgaaaaatatatttggaaactttattcatttaagataattcatgaatattttcccaagcaatgaaaagttcttctgtggcatcctgtttaatggatatataaattatgttacatccatttattcattatatttgtatattttaaatgtgtgcatggatatataagaggaagaaaaaattttttttgctttttatcaacatgtatgactcttttcataaaagaacaaattatttaaaaaattctctcacaccaaagccactaatgtcctttacctgaaaaaaaaaaagattaaacatttacaaagaaaggttgctcataagtcttctggcccattttccagtttaccaattcacttggaatgtcatctcttaaacaggacataaattggtatacctggaaaggaaacagtattggcagttactcaaaactgacctccatttatccttctctggagccactcagtgacgctcgttttttgagtgtatgctgtattcttggcactgtgagcacttcatatggtttgtcctgaaatctcacaagaatccaataagggcatgagtattattaaccccattttacagattggcacactgtgactcttaaagattaggggcaatgatccaaaccagaaagggggagagccaagattctgacaagccccatggtgttgaagcctgtcttctttaactgtggcaaaaaggtacacaggggcatccctctgagttctgagctttcactgtgtacttgtgaagcactgttaagacccaagcaggtgtttgcatgctcgcacgtacgcgcgcgcgcgcgcacacacacacacacacacacacacacacacacagacataccaattagatcaaatacataagatgtttacgaagaaatgttttcacagacttgtctttgcaactgctgcaatgcacatgtaatcactgttgtttactatcgtgactgatgttttggtacttcagaaataaaattgatctagagggaatgtcagctccacgactgtaatgataacctcgtcctggtgctctcctccgggagtgcaagcgcactggcaggcatacaaggagagacttagtgtacaagttattgtaagattactgcagagttaaccagtggcctgggagacacagtgccccccacacctctatgggaacaaagggttgaacagccatctgtggtttttttttttactccagggacggtgtgggaaatgtactggatgtaaatttagatgagaaaaggaaaaggcagctacattcaagatgaagtttcctggttcctctttcctgtttagggcaggcagttttatacaacaattgaaagtttagttcaaactgtggctctaactcttctttgatttgtgactttgggcaagctgtttcccatgtatctcacctgaaaaattgctgtaataatagcacctattctggtagggttattgtcagggtaaatcagttagtccataaaaagccccgagcccagtgactggcacctagtaatcactcactatgtgctggttgtgtatatcatcctcctcatcacccattagcattaatggtcttcaataatgtactcctttggagaggaagagaacagttatctcttagactctactaaaaagtgttacctctttagaccaggaaagaccatggatctctctttggattgctttgcacagtttttgcttatatctgtctctcttccattgcctttttccctcagatggatgatgtaattgatgacatcattagcctagaatcaagttataatgaagagatcctgggcttgatggatcccgccttgcaaatggcaaatacggtattggtgatctttttatttttctaaaagaaaagcttgagatattatttcccatgtttttttcctgttcctgaattttcagtttctctttgcaagtgattcttttagaagttaattcatgaggcagagaaatatctcaagatcacagataaatgactcagacattagaaattaagaatttctcgtgagtttatcagtaaccccatgataaagctctgcagtccctggagtctgagttcactttcagtaacatgctaggttttctaactcccctcgacatctgatgcccaacttagtatactgctgccaagggaaatactgcatgctctgttatttacagtggttttctagtcagcttgaaaacataatgcactttttaaaggagatcctttaccattgacaggtgattaagtgacgttcagtttgccccttttcaatggcaaatttattccagttttagttcattaagcaggggtcatatttgctcttctctgttaagtatgcctctctgcagttggagccttgcctgtagagtttattttctttcactccttccgtttgcatcttacttggttcttgcaggaattccttgagtcatgttgggatgctatcattgccctccgttttagggttagtaaacgttagcttgtgttgccctaggttatacagctcagatgtgtcagagctgggacacggtacatctttgaacgcctgctgctgctgctgctgctgctgctgctaagtcatgtctgactctgtgcgaccagagcaaatatgcgactctgtgtgtcccatagacggcagcccaccaggctcccccgtccctgggattctccaggcaagaacactggagtgggttgccatttccttctccagtgcatgaaagtgaaaagtgaaagtgaagttgctcagccgtgtcttgactcttagccatcccatggactgcagcctaccaggctccgctgcccatgggattttccaggcaagagtactggagtggggtgccgttgccttctctgctttgaatgcctagtcccacccttttctgttttctatacaagtaatgccatgagactatcatattctttagtaattagtatggttttgggggtatactatttttattaacatttaaatttcaccaagagttcaagaatatgctagccttctgttcagatttttgaaatgaaaataaaatggacaaagagctttaaggatgcaatatatttaacactgcataatatattcaccagctggacaatctagggggtggtgtaactatacagttaggagacaagccctggaattggaggaagaacctaccattcagcactaaacagaggactctggttgctgacagaatctccccttgacttcagacttgacacaaactgagcaaatctatcagcatacacaaaccagtgagttcaggacagttatacaggatagattggccagagctggttcggattgtgggagccagtctcaagcaagcgagattggttgcaggatggagtcatcttttaaaaactgctaatttatggggtcgcaaagagtcggacacgactgagcgactgaactgaactgaatttctacgcaagttcctaagatgcttttcctaaacagggtagtaattggtttctaaaagattaacttccatggtggtaaagagggtgaaagggagttgttgctagtggttatagaaattaagatttgcaagatgaacaagttctggagatgtgctgcccgacaatgtgaatatacttaatgcaattgaactatacacttaaaaacaattaaaaacggtgaattttagatgatactttttttaaccacagaattttttttaaagactaaattccaatgataaatttccttggcaagggaatgtggtagcttttacttatttataccaaaatccctagaaaaccagtttttttatagttacattttcttttctgtcttgatccagtcctttaagtcaccttctaagtcttgaggagtaaggactcccctcaaaacctctgagttttttctagagtatttagttttatcaatttactacccgtttaaactcaccccgcattttgaaagcactaaatattatttctaacaaatgttcccatgccaaacttgtcccactctctttgagccctgggtcagctgctgtggaaccctcttgctttcagctttatgcatccgtgaggcagactgtgcctgtcagtagtcagaatcccaggacagacaggagcaaaacccttggaggagcttacgctcaggaatttatatttttacatatatccatggggttgctaggggtcagacacgactgagcgacttcactttcacttttcactttcatgcattggagaagggaatggcagcccactccagtgttcttgcctggagaatcccagggacgggggagcctggtgggctgccgtctatggggtcgcacagagtcggacacgactgaagcgacttagcagcaatagcagcagcagcagtccccttgcagcactaattagcaatggccgagtcatttcagaagaactttgctgaaaagggtggtaattttccagtggcatcaaatggatacctgcgcatactcaggagaactgtaggattgacatgattcttttaaattattcttttaaaaaaagttttccccagtgatgaggacctcagatgtcatctgatctaacctagtactcactgccttaatttcctcttgcatatcctttgtattcccctccaaaatatcaggctttcagcttcttgaaagcttccaaatccacactcacaagtgaagcagtgtaacacagtggttgggagttgacgatttaccatcagacctggattcaaatcctaagtctgccatttacagcctgaccttgcacattatttagtgtcttgaagtcctccatttccttatttgtaaaatagaactgatcattgtttctccttgacatggtcatctcctaaattatgaattgttgttgtttagtcactgagtcctttccaactcttttgtgaccctacggactgtaccccaccaggctcctctgtcatgggatttcccaggcaagagtagtggattgggttgccgtttccttctccaggggatcttcccgacccagggatgaaacccctgtctcctgcattggcaggcagaccctttaccaccagccccctgggaaaccctaaagtagtacagcatttagcattggaaacatagcttgtactcaacaatgtctaaattattatatataatttattatagtttaaataattttgatagtattttatccgggtgatattcactcagcaactgtaatatgccaactctatgttagaataatatcatactcaataatggaaatatttatcatagtgagtctctctgtggatgtggatcccagtttgccccgtggagaacttgtccttgtgacaaccctctgaagacatgacctttagactgaatacccgtgtctcctcggtcagtctacggtggagtagatatcctagtccgattgctcctgaactcactttaagattgatttggcctttattagatgtctcatatgtgaccagtgccgggtgaggtgctttggatgcagctgagtcaggtctccttcctggtctcactgggctgacaagcttagaaaaggagaccacttcagacttgaatggagaaggatgattcagaagcagagagaccatctcaggggagtccccagataagaaagaatccccagggcagactttgattaattcccagtcaagagaagggtaacctgcaacaccctcaggggtcactgactttgtcctggtccccatttctcttctgtgttctccacatcagagctttcccacaagaaactatttcggcattttacaactggcagaaagacacagtaacacagcagttaggaacacagactctcagccagacatctgaattcaatacacactctggagtgagttgtttgtctttgcctcactttcctttgctggaaaatggggataataatagcatctaaaacaagagaacctatgctgttacttactagctcttattcttgataaaattgggttttagttgttagaattaaacaatagaaccactacaacttactaacatgttaatcttttctccacagtggagtttaaaattaatattctttatgttggacattttttccttttagttgattctttgaaatggtctatttcaagttaactgttttaaaaaataaagtggaaagaacacttagagaggaaactatcttagagaggaaactatcctaagggaattggagtctagaaataactattctgagagcacaagggccctcttgtaccatcgcaaacaaagaataaaagtcccagtttacttgtgcttacagtacttaattgatattcagagaaggggaccatccagggagaaaaaaataataacattttgcaattatcattaacttggaacaatattcattttggtggagcagaacattgaagaacttgattcagacaaagtttagggaacatacacacacatgtctaccttctctttatttgtcctaatttgactgtgtcttttactgtccactgtacagctcgtgcactggaagtgaaatcttgtccatcaggttaatgtgctggataaaaaccctgcaaagacactatgtttatgttaacagaaggggtgcttcctcttccttagctttttttttttaatgtaaatttatttattttaattggagattaattgctttacaatattgtattggttttgccatacatcaacatgaatccgccatgggtgtacacgtgttccccatcctgaacccccctcccacctccctccccgcaccatccctctgggtcaccccagtgcaccagccccaagcatcctgtatcctgcatcgaacctggactggcgattcatttcatatatgatattatacatgtttcaatgccattctcccaaatcatcccaccctctccctctcccacagagtccaaaagactgttctatacatctgtgtctcttttgctgtctcgcatacagggttatcgttaccatctttctaaattccatatatatgcgttagtatactgtattggtgtttttctttctgtcttacttcattctgtataataggctcccgtttcatccacctcattagaactgattcaaatgtcgtccttagctttaaaagtgttattttgacctagtaaagaaggtaactgggggaacttttcaaaatgagacaggaaaccactgaatcttttcctaaatttgcatggctaggagactgatttttaattagaaatccatattattttaatcagcctccctttgagtagctttatttatataacagctgttaatataaagcgtctaagccatcatttagagcagtctttcaaccttggtactgttgacatttgggatgggtaatcctttgttgtggagactgtcttgtctgttgtaggatgtttagcaggatccctggcttttacccactagaggccattcacaccttgccatcccacagtgacaactcagaaggtctcgagacagtgacaaatgtcccctggggaaaaggggccaaatcacccccattggaaaaagatttggaatatggagtagtcactttagccacacacatcccctcatttctcatttccgttgcaatccacgggatgcttggcagttcatatggcggatagttttgttaatcaaagtgaaaattagtttgcccccaaaactgtgacttccttggtggctcagacagtaaagaggctgccagcaaggcaggagacccaggtttgacccctgggtcgggaagttcccctggagaaaggaatggcaatccactccagtattcttgcctggagaatccccatggacagaggagcctggctagctgcagtccatggtgtcacaaagagtggacatcactgagcgaaaaaactgtagacaaagaatatactttcaggaaaacctcactggacatgaatttgagccactttgggaaatagtgaaggacagggaagcctgatgttctgcagtccatggggtcgcaaagaggcggatacagctgagtgactgaacagtgaaacatagtttatcagtcactttaaaagcaggtactctgtttcattcctgcatgcgtcttcagtcatgttcgactctttgtgacccccatggactgtagcctgctaggctcccctgtccatggaattttcccggcaagagtactggattgggttgcctttcccttcgtcaggggctcttccccacccagagatcgaactcgtatcttgtgtgtctcctgcactggcaggcagattctttatcactgcaccacctgtttcacccgctttattttgtttactttttacaaaaccctgtgagatgggtgatatgactgctacttttcagagagggacatctcacctcacagagttgaatatcatttggcacgtcagagacaggcagcttctaacctgaatcactggctccttagccccggatgtaaatgactgcaccgttcgtttgtaaatttgagtacccacagttagtgagcaactgggattttatttgttcaggttcatttggagattaattgaaaattacagtttctaactgattattatcagcaggttgatccttccctcctcccatttatacaattaacatgcgatgtgaacctcctatcaaaaacatgcactcagagcagtacctcgatgttcctttttatgaagtcagcatgataagttacacagagtgccttttaatctctgtgcctggctcagagtaggcacccacaaaattaagtttttctcagcaaaatatcccagcaggctctatgatgcccactcctaaccagcaagaatggaaaagctgccgaagcaagaaatcttttcaagaactctccagagggttataagctgccttttcaactggaagtaatgatgtttgacctcagtggagtgcccgataaggcatcttgttccgaagattttaattcctctctctttttggtcagccctgctgccagtccacacagtcttctctgggagttcttaacccctactcaatccatttctttctgagttctccccgcttccacccgacttgcccatccatctctctctcccccactcttgcgtttgtgtctctctcttcctgtttccacctgcccccttgtgtctttctttgtctcatccccagttttcaattctttcaccctctctttctctttttgtgagtctgcatttattaagtatatgtacacataccatcttcctttagattgtggttagaagatatattcttaccctggagaagtttataatagaacatatctgttcagtatcgatccagtgataatttagaggtttttttttaaagttagttgtatttatcacttgcctattatttattcctaacaaattatcataataacccagttgtatgttttgcacaccatttgcacatgtgatctttatttctcaagccatggaaataattgtttttagcttgtggcattgaatctcaagtcacattattggtttattaatacccgatagttctttccaagtctgaaattctagatggataggaagataacttgagcaaactccaggagacagtggaagacagggaaacccgaagtgctgcagtccatggtgtctcaaagagtcagacatgactgagcggctaagcaacaacaaaggaggagggtaaagctttggaatctcgaagtcttaccagatgtcataccagctttataacttttgactctctgactctacagtgctgtgttgagacatttgagcctctttcactttgctgtattaagttggacaagaataaaactaaacacagggcaaggctgacctgagaagatgacctgtttcatataaaaccactaagacagctagtaatcatagtcacttcttttatcatttccttaactagaggcccttgaatatggttcaagggcattttacatgatcacattttcatatgtatacgtatagtgagatatgtgtaatccatttcatatgcataatttagatgctgtcctcacaaaggaacaaaaggctgagtgcagaagagagatgtgctctgctgatctgtctgttcgaacagtgcccaaccccagtcataccagagcaagtgtcatattaacctgttggaaacttcccccatctctctacctaagggtttagcttatagactgtttatttagaagtcgtgacacgaatatgatacctggtggctcccaatgagaggaaacacatttaagtcgatctttatttcatggtatcttttaatctgtatgttagtggttatttgaaagaatgacacgtgctatattgtgatgtagcctctaccaggtacatctgcattactgagtattttaatcatacttaaatgctatctacacttaattttctcagattagagtaaaaatcagagtgtataatcaagtagagggagggctgaaagacataaactctcacctgggaatgatagtttcagaaattattcgagttgagctggaaatgggaagtttctgccatggaagtagtgagatcacttaactgttttctaacaattaatacttagacctttatttcagggagtgggaaaaggaaatgtcttggatctcatatgtttataaaactgggtacatcaaactcatagcagagagctagtcacagggaaatgcatacgtgacaaaggaaagtcattgttgggataaaacagattcactgcttgaaaatattcagttcagaacaagagacaaacacgcttaagctcgtttggaaaggctcaattttttttttttttttaagtgttaacattttgttcttttaggaaagtcagtgggctccctcttgtggctttgtggaagatttcagtttcaaggaaaatgcctttttggtataatagttaggatatcatttcttttccaataagaaaacacttttcattactttgctttggagagagagagagagagaggaagaaaaagaaggaagaaagtttactttggtgcaaaacctgacttggctacaaagctatgccacgtagaacatgacttataatagccaatatttactgcacatctaccataagctactagatactatagataatgctgctgctgctaagtcgcttcagttgtgtcctactctgtgtgaccccatagatggcagcccaccaggctcccccgtccctgggattctccaggcaagagtactggagtggggtgccattgccttctccaatgcgtgaaagtgaaaagtgaaagtgaagtccctcagtcgtgtccaactcttagtgaccccatggactgcagcctaccaggctcctccatccgtgggattttccaggcaagagtactggagtggggtgccatcgccttctccaataatgagttcaccacattatcctttgtctcgatgctcacgatcaacctgtcagataggttgtatagtgatttgatgtgtgtgagattctgcctcctttcctgtctctaagggaacccctaaggagaccatatgtctgtgaatgaatgaaatggtaaacatctcatttcctgtattaacaaatattttttacgtgaaatcatttctttttttaaaatcagtttctgttggagtctagttgctttacagtgctgtgttagtttccgctgtgcagcgcagtgaagcagctgcacatgtacatatgtctgctcccttctggacttcctttccattcaggtcaccacagtgtgttgggtagagttccctgtgcagcgtgatgttctcattagttttctgttttatacatagtatcagtgatgtatatacgtaaatacagtctggaataggatatgggttttagctgactaatttaggaattgttcagtgattcatttccattactgtttttttctctttccagttacctgtctctggaaacttgattgacctttatggaaatcaaggcctgccacccccaggcctcaccatcagtaactcctgcccagccaaccttcccaacataaaaagggagctcacaggtaaatactcagcacttgtgcctctcactggaggttttctgttcatgttctgttcagcaaagttatccaagtagtgacctccagaactatttccaactcacacacatatgtttttaggtctgtgcagtggttgaaacattgagctacgttttagcgtggggtacttatacttgaaaatcctggtttccagtattacttgagatgctgggaatcgggtccccattcctccatgactggaatcattgtgtctgtgaccactgtcccctttgggctgagagcagcaggttcccagtctggatttttcctggcccttagtagcatatgagtttgagaactctgatctgaattttctgatagttcagacccacagctgggacagactaaggacatatttcttacctcttaagatgctttctgttacttttgctgtatcatgtgcaaaagattcactcacagagtgaaaaaataatttatcaaatggagcaatgggtatcgtttgctctggaggcaagtgtgaaattacctgtttcgccatttttgtttaatgctttagcgaaggcatttggccattacaacacgatgaaacggcattagaactggcattctaccctgctggattttatggccttcagctcatccgaaccctttttattatttgattcttgcatcctacaggattcggtgtatagactgagactatggaatatagatttggtgcaaaaaaaaattcctcttctattcaagtgtgtctttgaaagaacaaaaacaaaagttcagaaaattgtggcaggagaaagacattaaaaaaagaagacattgatttggtttttaaaaagatgattaatacataaaaaccatcaaaagccaacaaacacgtaggtattgtaccaggaagtaataatacaatgaagttttagaaaacatagttaaatgaaacttgtattaaataaggataaaatatggttagagtgacatgcataaaattcttgagtgtaaaatggggtgttgaattatgtatatgattgtttcttcagaaataagaccacagcagcaaggggaaagaagatataagaaatgggtgaagagggtgtacatttattaaattttttaaaaagcagatataacagacactacctctagagtcactggtatcttagaaaatgaccaatccagtctggacaagggtaaaatggcagggaaaggggtaaagggacaggaaatgaggttctgaacactgatagctcaggaagcagcatgctagacacagaaaagaagaggcttacaagttagcaaatctgacctaataatatataatacattataacaatataatgaacatgctataaactaagctaagtcacttcagtcgtgtccgactctgtgtgaccccaaagacggcagcccaccagactcccccatccctgggattctccaggcaagaacactggagtgggttgccatttctttctccaatgcatgaaagtgaaaagtaaaagtgaagttgctcagtcatatctgactctttgcgaccccatggactacagcctaccaggcttctccatccatgggattttccaggcgagagtactggagtgggatgccattgccttctccgaaaagatatatatttttaaatacaattctggattatgataatgtaatgtttttatatcacttctgaaaggaaagtaacagaggttcctgaatccccagtgatttttaaaagtctaacagttctgtaaaataaaaattttttaattttttaataattaagaagtattaaaacagaaaaaatagaagcaacctgatttgtttttctttgttttgttttactctctgtaaggcagctaataatcccttattgcatagatcgcaccagagttgctatgcaaacagatcaaatggagttgtcaccaaatgcctctgtcccaaatgcctatttttgtttttataaactcagagtagtaaatagttgccctagaagtcattgaatcatttcattctaacaggttctgatggaacctggctcaaagttcttaaataatgaattcatttccgtgaaccagttagagatccagtttgggagcttcttggctcagcttctgtctcagtgtgttaacacatcaaagaaagactgaaaagtgctatttcctgaaaagaaaatttgactgctgacaatactctattgacagcaacttctcataatctctggttatttattttttttgttgttcgtacctgtctgtcgttccagcctgtcagacatctttgttactggtcttctaccattttgtagaagctaaatttttgcatttattggatatatattgcttttgaaaaaaaaaaaaaggaagtctttgattcaaagttaaacatttttaactctggttttatttatagttaagtcagataaacatctatctgtttagacaatgaagtgttgttttagtttacaccactgtgttccttgaaaggttctggtttctaatgacttcattcatgtatacagcatgtatttttcccacagagtctgaagcaagagcattggccaaagagagacaaaaaaaggacaatcacaacttgagtaagttggttttatgtttattacagtagagttgaggttcccccttatatcagagagtttccaggcattttgaagagaaattgattttacctgttaaaggtacattttatggaagaaaattgttttttgaagagtccaaagtatatactttgcctcatattttaatctcagattaaagtgaattatatacacacacatacacacacttgttttcagtatcttgaggactgatgttttttcttttttttgtaagagggaatcttgatccctgactacccaattataagttgctcacactggaacttaactaacaaaaggggattatggaatcaccttctccagtgagatttaaaagaaaaaaaatgaaacatcttcaggagagtcattgagtgaggtgaggtagcctcccaaatttctaattttaactttgatttttaaaaagtcttctatcagtagaagaattaccatttgttgtataactttctatgaggaagtgatttttaaaagtctaacagttctgtaaaataaaaatttttaaatttttttaataattaagaagtattaaaacagaaaaaatagaagtcttctaacatttaaaattactttcttatatgcttaatttactcttgatcacatctttatgctttttcctatgaaaattcaagatttttgttacataaacaagttcaagaggctgcaaaaaaaaaaatattgggcttagaagtagaaaattgggtctgtgtgaatttcttatctcaagatcctctgtcctctttttcctaaattgatttttaaggatgaagttatcgataaacactttgtccatgtaaaaatgataggataagctcacagttcttctctgagctctaaaaataatcattgttggtttttttttccaatttgttgtttgtctttgcaaccttttcctgtgtatttaagaatacacacccttatgcatgcagagattataacagaatgattttgtctatgatttaacacaaatagtctcatattgatgcctggttttgcactccacagtgtgtcctaaagaccttttgctattactcatctagatctatctatttttttagaaaattgttgcatggtgttccacatgtgacttgtgatatttagtaatcctcctactgctaagtgttagttctgtttccagtttctccctattataaacaatgccacagcgaacatttgcagccatggctctctgtgtgcagcagagttagtttctccagtgtaaatgctaagaaatggaattgctaagtccttaggggaaggcggttgtgtctgtgtgttttctttgactagatcctgctcttcccagttaccctttcacttagaggaaacttttctcaactattaaccaagagattttgactaatatttctaaagtctcttctggtttccaagtaactctaagataatttcttcttttaaaatacattagaaatgagataatgaggcaatctctaaagcttctcctaaactgaaatgtggaaaactaagttggatgttggcaagaacagtatccgcctttactttgtcacctgaactctcaagttcagggttgtctgtaaagtgcaaacataatcagctccaactctgaggacactaaagcagtcttaagatttcattgaactgttagaaattaatactcgaggttcacctgcccattgacttttcctcttctaggaatttatcttgtaagagttcctgacaaaatgagctaaagattacattcatttattcacacgtaactactttttgagccccattatgtataaggtacttttctacagaggtgaaccagacagacagatttgtcccctgtcctgagaagcttacatgtgagtcaggggcaaacagaatgggtgagcaaacagattcatgcagatgttttcagcataggctaagtaccgtgaggggaataaaaagtacatgcgaccactagcaaaagtagtcattatacctttgaaaaagaaagacattggaaatagtctaaatatttatcagttgcggatttgtaaaaaataaattatggtacatccttataaaggacactcagtggctcttaagaagaatggtgttggtctgtttcatctgtctacaacgaattactgaatgaggagagcaaacagcacaatgatatgtataggatcccattatgtaaaaggaacacactgtgtatgcgtgtatgtgtgtgtgtgtgtgtgtgtgtatgtagaagatctaggagtcagccttgtcattggcaatttcctcaggcatatagatgttggatggtgtacagagttgtttcttacttttttctttacacacttttgcatgttttgcatatttttcaagctgataccacttttatagtaaaaacatagttgagggaggaggcactgaattaaaaatgtagtacatacaaatgttgatgataataggtgtcaacaatacactgttaagtgagaaaagatagatgcagaatgggttttcatgtaattctgctttagtgatgttatcctttatttggttcatggttggaggcctggtgtgtgctaggctcatatgggtacttggaaggcatcaatgactaagcatatatgaataaatagaaacatgcaaatgttagatggtagacaggtctatgcttaagtgaatgaatgaatgaatgaaatatatagatgtttatatatatttatatatatattatatatatatttatatatcagaaagtcctatgaggaggcagagtgcagagaggggagtagagtgttgggatgggtacgggaggaggtgggtcccttctaaataggcagtcagggaaggctcataggtaaatttgagtcactactggaggagggtgagggcagagccattcaagtatctgggggaagagtgtttcaggcagggtgaacagcaatatgaggtcctaaagtggggagtgtgtctaatttggttgaggaagagcaagaagctcatgaagctgaggataagagaaacacagatgagtcacaataaaacctgatcagaggaggagaggaagagaaatgagatcagagggagggaactcccagatcctataggacacctcaagggcaagcaattgaagggtttccagcaagagattaacaagttctgaaaaaaaaaacaaacaagctctgactcatgttttcacagcttatgcattgtagatagactaatgagggtagggaatgaagagcatgggtgaagcagaagtaccccttgggaggactgcaataatccaggcaagagatgctgattggtttctatcaggcagcagccgagattagaagtggacaacttctggaaatatttcaaagatagagccagcagattttgatgatggattgaatataggatgtgaaagaaatagagctacaggattgattctaagtttctgccctaagcaactggaaagatggagttatagtgaggtaagaaagcccgggggtaaagcttattgaaaaaaggaagatcaggggctgaagtttggagtgtcagggctgcccattggacctttatatggaggacttccatatgaccttcgtaagtctctagtagtagatttgtgagtctagagttccagggagatgtttgggctgcaaatacgatagtcatcattgtatatgtggtattcaaaaccataatagtaaatgaggttaccaggaattgaatgtagattaagaagagccccaagatctgtttcctgggtgcacccctaggccacgtatgtgcttttcttagaacataaaaataatcaccaaggatatgtaacaaattttacagtggtggtatcaggctcattagagacttttatttcattttatgtatttcagtaatgtttgattttttatgaatattatatgcttggaaaaagaaaacatgtcatacttcagagttttggaagaagttagctagatcagaggtccaaaaatttcttcttcagagccagtgattatccctaactatttctgttttatagaagtctgatgataagactgtgttatgcataactgatttaatcttagaaataatcactcagctaagaaaaaaatgtaatatgcattgagaaagtagtgaataatactatttattaagcatgcagaatgttagtgagtcaagtataaatatatattagattttgtatatgcaaagtaaaatattaatacctttaatccaatttattagactttatttggaatttcttttcagactaggtaaatttaaaacatttattaagtcatatgcctactatttcaccccttttcccccaagaagatgattattcagttcaacatacacctggatttataaaagaatgctgttaggatacatagtatagttgaagatgcttgacttctaggattattttattcattattgtagccagtggacatgtctgcctgttgaacatttgaaatgtgcctaattcaaattgtgatttgctgcaagtataaaatgcacactggattttgaaaagttagtataaataaaaggatgttaaatacttgtaaattttgatagagtccacatgttgatattataatactttcaatatattgagtttaataaaaatattaaagtagatttcacgtctttgtttttactcatttaatgagactgctagaagactaaaaactacacgtgaaacttgcattatgtttctgttgggtattcctggactggaggaaggtttttgtatggcttgtaggctgagaatgtttttttgcatttttaaatggtttaaaatgcccggagaataatattttatgacatgtgaaaattatataaaatccaagtttcaatatccagtgattcttttcagtaaacttgcatcattgaaaatcatattcagttaatatcagtacattttgaattttgtcaacacaaaattcatggaaatctgttttctcttttgctgtgtaggtacttaattatatgcttattttttctgtttggcctacagagaggtcactatctggccctttgtagaaaacttgctgcccctggtctgggggttcagggtcgagtactggctattctctgcctattgtgtcctcatcagctctctgatatcacctaggtagttttgtcatttgtaactaaggatggtagctctaatttcaggagttactagggtcaaatgagaaattataatctcagggcttcataaatgatacagttctgtaccaaggtagctcatcttttaaagggctttaacctcagtaccaaaaacaggaaagtaactgggaaatatagatttaggttttcattgtcccaaccaagcagagataatacacacatgcctttaatgagatgtgctaaatgcgtatatggcaccattactaatagccctttcctgtgctctttttttgaagttgaacgaagaagaagatttaacataaatgaccgcattaaggaactaggtactttgattcccaagtcaaatgatccgtgagtacaattgcatcatatattttttcataccttaatgttttttcgtatgttgcaaaaagtgtgcagataaaactaaagaagtatcccttcttcctttggtttcatttatgcataccacctgctcctttcttttggttggttcatcaaactaaaatctcaagagacgtgaactgagttgttcaaaaagattattggacatgagctgttcagctttggaggtgggaaggtggcttcctgaaatctgaggatttttgacaaacactgaactagtaaaaaaattattttatcagttcatactggacagagacttcagtaggagataaagcaagatttgttggctatttatttgcttttaagctcatacaatataggaactgagagctgaaattggagatttcaagtttaacaatcttcagtagataaaaagtcagtttttccccccaaattatatgccctttgtttgttttaccaattaaggggaaaaaggaaatttttaatcctcttataagcatcggtcagctaatttggatttcaacttccagtctctaatgcactctttcagagataacggttgtaaagataattttcctaccagcaatgtcagcaaataggacaacaaatacacaatttttatccattagaaattggcccatttgaagtaaagggctcgaagatgtatacattttaatggctcccacaggcattctatgaaattagcctccgaatatgaccttttagctacctaataaaatgtaaagatgaaatcaagcattattcatgcaaggcttattaaatttgctattcacattattgtcagagaatttgtgacaaaataaaaccattgcccattctaaggtggttttgatgaatgttcaagcaaagtctccatcatcaacatttcactttcccaggtttcaaggaaagccgttttgaaactcaaaacattcaaattctcagttctgcagcacaaatgcatcctatgaaggggctgtgaccttcatttcctatagtcagtcttgcatgatagttgaaattgaattcccattttcctgttctttatcagctttcactttttagcatattcttttaaactgcagcacatggatctctttagcaacatattatgaaattatggggctgcagtgaaagcctctatttgcatatcttctttattgtattagaatacttatgtgtttataatctgaactgataacaatctttaattgtaggcattgttttaagatacagcggacaacatctgttctgtcctaagccaggtttctgtcacagaccttggggctgctatagagacatagtcaagctgatcacagtctcagctccacacccgctcctaccctagactaggtctgcctttagtgacttatgtattggggatctgtttacacttctgtgtgaggaaaaaaaaaaaggattgcgctcattgcaaaaaaaaaaaaaaaattgaaaactccaaagcataattaattaattgggtctcacaaggaagtgaaacccaaggtaagtgattttaattctgagcttagttgctcagtcgttgtgactctttgcgacaccatggactttagcctgacaggctcctctgtccgttgccatgccctcctccaggggatcttcccaacccagggatcgaacccaggtctcccgcatggcaggcggattctttaccatctgagccaccagggaagcccaagtgattagaatcatcacctcttaaaaccagagtatctgctttcaggtttaattacgggtttctcaccttactgaaggcatctttcattataattttatttctctctggctggtgaggcaggtctgttgttttccttttagccctgaacaggttggctttgtgctcactcttagcatctcaggacacctccctgggttgccacttttggtgcccagaccccagagatcagccctagggagttctccaggggctgtaactcagcatctcatgggagagcttctgttttgttctccatctaagccatgtgaggatcggttacctggtggcttgttttcatgttcctccattcacacatcccagctgatacttccaatctttttatcagctatagattatggggtgtccctcatagctcagttggtaaagaatctgcctgcaatgcaggatacctgggttcgattgctgggtcaggaagatcctctggagaaggaaatggcaacccactccagtattctcacctggaggatcacatggacaaagagcctggcaggctacagtccatgggattgcaagagtcggacatgacttagcaactaaaccaccaccattcacatgtcccagctgatacttccaatctgcttttagcagctttagattatggcacaggaggttttccatacataaaattgtttttggctttaccattgtcattattatcatggatattttctataaaagagctcaggttaatttcaagcactatagaaatatcactgtttagttgtaattttattcttaatgatattttgggggcactctaagtttttcaacttgcttttacctacatcttccctggtagttcagttggtaagaatctgcctgcaatgcaggagacgggttctatccctgggtcaggaagatcccctggaaaaggaaatggcaacctactccattattacttgcctagaaaattccaatgacagaggagcctggcaggctgtagtccaaggggtcgcaaaagtcagacatgacgtagctgctaaaccaccaaccttacctacaccttaatggcctttttaatgttctcatataggaatgcattagaacgatagtgtttaaaaaccctaaggcaccaagctcaggctgcctgcgtttgaattagaaaacctgttagatgtgtgacttggggaggaaattttccccaagtatttcatttttcttacctgttaaaaaaaaggaggcggtgcagggggcggcgcagagcagactatttctatctagtctggttgatttgaggattcagtctcttgagagaaaggtggtttaggggatggagtctggtgccagattctccaggcttcctggctcgaccatttcctagctgtatatttagagcaaattatttaacctgtctgtgcctctgtttttcaatctatagaatggggataatattaatgtctaccaattgaggttgttatgattaatgagcagaaaaccactttaaaaagtacctgtcaggcagcaaatgctatttaaaggcagctgtggttattacgatgttgaatcctagcacagcacctgctccgttgttggaactgtattctagacttttttcagcatactcatataaagtgtctactttgattctagcaacatacctatggggctgctcacagaagcatagcatcaccattttattgatgaggacatggagactgagagaatttataactggcctatgaatattcgtgataaaacccaaggatgccactttgatgatgcatacaattaagcattgggatctcacagaattttttttaactgtatattactctgttttaattttataatcctagaaagctatagctattgaatatagtgtttaagaatattgactgtcatcaacagacctaaatttaagtcctgactcggccttcatgtagctctggaatggaaggctatttgaatcatctctgattcagtacatgctcagtggccctccttcgccaggcacctgtctggctgaagtaagataaagtagaagatgtgggtagactgtgtccagcataactagcactcagtcaatgacagtgattctcaacttctaattgttatttcatcttgagaaactgaatgctctgagtattgaattttcatggagcatccaacactaaaactctgtttccttccattttcattccagagacatgcgctggaacaagggaaccattttaaaagcttccgtggactatatccgaaagttgcaacgggaacagcaacgtgcgaaagagcttgaaaacagacagaagaagctggagcatgccaaccggcacttgttactcagaatacaggtacctgccgtgcgcagggtggaggtgactggagatggagaagatgggctgtaatgagccataaggggcctgacttacgtgaaactgtctgtactcattatttgtggattctattttgtgcttttgtttccgtgcaaaacagttatctgaaagccccaaatcgactcttgtggcacttacatgctcattcacacatgtgcagagtggcaaatgtggcttagctggtgtgtttattccgagttaaggttgaacaatgctctatcttcttctttcagctcatactataaacaggtgtcctttttgctgtgttttcagtgtcttgttgttcacatttttggggttttgggatgatttgctgtttaaagtggctggtgagcatggccctgaagcgctttctcatctttctgagcacagcaaggctgtgatgtgctttatggagatatgtttcattcaggcatgagttgtggtcctcttggccttgagtttaatattaaagagtcagtgatatgctgtaaacaagttgtctttaaacagagacacataaagttacatgttggttagttggtgaaatgtgcctggatgctttattgtagtgttttagtcgctaagtcgcgtctgactctttttttgcgaccctatggactgtagcctgtcaggctcctctgtccatgggatttcccaggcaacagtactagagtaggttgccatttcctacgccagcagatcttccagatcaggaatcaaaccttggcaggcggattctttaccactgaaccactgggggagctcatgttcagatgcttgcaggaaagtaatcctctgttttcaccaggagcagtgttcagcattcacgaattcagtgttcatagcagctctgtagcacataaccgtctttgaccaatcatgctcatgtgataaaaagctgagaggtttacacatcaaacatttatttttcacagttctagaggctgggaaatctgatgctggccgtttcattgtgggattgaggtcctgcttcttagttcatagatagctgccttcttggtattacttcacactacaaaagagttgcgggatctctctggggtctcttttataagggcctcatcccatttgtgaagggcccctgcttgtgacctaatcacctcccagaaccctatctctaaataccatcctattgggaattgtttcaccatatgaatttggtgggggcgggggcacagattttactccatagctataactactgtaagtcatgacaactcacaggagttgttaagtacaaaggtgtcttagtattgaaggaggtgcagtccatggtcaaagctcatgtttatagggaacctggggacaccttgaaaatcttatcatcaggatataaattttagaaattgttccagataatgaagttttccatatgtatctttgacttgctcttaaagggagaaaagtgattttaataatacctggacttcttatgtcattccattgagggagcatacataccaatgtaagcatatcagctcctgttggttctttgtcagcacttggcttttcatgctaaatataaagatgcaacttcctttcaaactgtcttagagaaagaaaaactgactttttggttatgattaaaggagttggcaagagtcattttactttacttgctcactttgaatacaaccaatgaataagggttaatgacattttatcttcttcttgagtagatggacctacttgtacccagttttgccatataccaatggtttctttctttcttttcttttttttttttcatgtttccagtgcaaataattgtggaatagcaatgcagagtatggcaattgaaaggctatctagtgatgtttataccccgacattacatttacttaacagagcagattacttatgatctctgatcttgttaatgccccacaacactgtcaacatttctagatgtcacatctcttgtttcactgcagtaatcttcagtcccggatcagagatgcagaagatggttttcttcttgggagagcattttagaatcttggtagtgaaacagaggttatatgtcatttggaaatcccccttaccctcttcccttttttggcctttgctgcttgctttatgtaattagctagacgtcttttggtctcttatactttgtatatatacccatttttaaaagccactcatactaatgtgttatttctttatgcaagtattcagttcagttcagttgctcagttgtgtctgactctttgtgatcccaaggactgcagcatgccaggcctccctgtccatcaccaattcccggagtttactcaaactcatgtccattgagtgggggatgccatccagccatctcatcctctgtcatccccttcttccgcctttaatctttcccagcatcagggtcttttcaaatgagtcagttcttcacatcaggtggccaaagtattggagtttcagcttcggcatcagtccttccaatgaatattcaggactgatttcctttgggattgactggttggatctccttgcagttcaagggactctcaagagtcttctccaacaccacagttcaaaagcttcacttcttcggcgctcagctttcttcatagtccaactttcacatccatacatgaccactggaaaaaccacagccttgactagatggactgttgttggcaaagtaatgtctctgctttttaatatgctgtctaggttggtgattacttttcttccaaggtcattacttttcttactttttgtcttttaatttcatggctgcagtcaccatctgcacctcaatacaaatattaacatataataactgttctgaaagagaggctaggtttaacaaatcaatgatattattgtaaacaagatgtctttaaacagaaacacatataaaatgaagttacatgttgattggttggtgaaaggttgtgcccagatgctttattgtccaaatatatccattcatgtgaaatacaaatactgtgaaaaatatgaattggaaattgcatggtgactatgtcttgggtttctcccagtgccagtgaagcagcctttagaacttctgtgtatcatggaaagcattgttaattaggaaagctctgtcatgcagtgaacctgaattttctagatgagacttgtcacactatttaacaatctaagtaaaagtttaattggctggtaaacatttttaattaaacaacaaaagattagaataagacgtgtgcctccattcattcaacttgttttatttttttaagacatactacaagtgtggaggcactgctttcatcttgtgggtgtagatttacagtagtgcatgtgatcagcttgagcctaagggattcctttcattttcaccctaagtgatgcatgcaaaaatgttcacagaagaaagaccatgaagccttaatatcactgggactggaattttattattaaacagcgcatggttttcaaatgatgcccagggacacttgtgtgtctggaaatcacgtgaaggaatatgcagatagtgttgtgacatctcagactcctgtctctcacttgtactgaatctagagaatgtccttggagatcagacagcctttcatacaggctgaacatgacatgtgtttctaggcttgtgggcaaaggttgagaggtttgacctgttgtgtcctttgccttctctcctgatgcaaggtgacttgcttcagatatatagtctattatttttattgtatcataaaacataggaagatagcataggagcatagcataacatttggcacataggagcaaatgttctctggggtcagttgttgtctatacggttcattttacggaggatctaaggatactcttgtatcttgggcttcccttgtggctcacctggtaaagattctgcctgccatatggaagacctggattcgatttctgggttgggaagatcccctggagaagggaaagggtacccactccagtattctggcctggagaatcccatggactgtatagtccatggggtcgcaaagagtcggacacaactgagagactttcacttcaggatactcaggaagggaggcaggaaggagcttgtttgaaaggttttccctatttgtgtctctgtgtccttgcagtgcctcatgatgaggacccaccccaaggatctcgttttaacttaatcacctctttaaagacactatctccaggtactgtcacattccgagttactggaggttaggatttcaacgtatgacttgagggtgattgtttttcagtcactaagtcatgtccgactctttttcgacctcatggactatgaccccctgagcccaccagactcctctgtccattgaattttccaggcaggaatactgcagtgggttgccatttttttctccagtcattttggggaggggacacaattcagtctatagtaggaaggatgtgaaaaagttgtaggaagagattgttcctcttacacataagaaccttcttgtggaattaaaacaaaataactccctttgcctggatgagatgggttaaatgatgtgactttagttactcgtatggcactgtcataacttctgctattattattcaatctttatttgttccccgtgcccttagtatcacagtaaccttttcattgcaccttaagccaaagaaatacctaccatttccttgttaggtcttaacaatttagtaaccatttcagaagataaaatgtataaattgaaagaaaaatcatattttcattttatttttaaataaccatgttactaccagggagatgtgtgcacctgttggggcacggcttctccagccttggagtcattttggacgctgttaccctctttaccattccccatttattttcatgcaggacttggtattttttgtttgttttctttttgagtcacagtaaccgtctgagacctggctctgtgttgatatgatatgatggaaagagtgtagcacaatctcatactggaactatgaaactatattgagtttgatcattcttgcagtaaggtgcattctccttgaaactttaaaatagtcccaatatcccgggagtttattgtagtacccacggatatctctgcacagtttagggaccgtgggactatattatttactgaatattttcctttaatcagctcacattttgacattttgctttttatattttttgacttatcttcactgtgaacattaacatgtatgagagactgtcttacctaatatataataaaatccatataccaccttaaaaatcattttatacattaccagtgatacagtgtactttttaaaaaaatgacacttatgaatttgaaatagcaaaaaaatgtttattttaataatttattgtcttctgaggatatgatttaaaaaaatactttactttttataacaattttaggttcagagcaaatatgacctaaagtcatagatagttcttatatacctcctactcctgcatatgtatagcttcccctgatattaatacccccaccaaagtgagacattctaacagtggatgagtctacactgacacgccattatcactacttgacctaaggattgactgttagcgacgcacatcctttgagtttggacaaatgcatagtgacagataaccatcattataatatcatgttcaatattcactgtccccaaatcccctgtgcaccaccttgttaagtgtctgattcctgttgtccttttaggaacttgaaatgcaggctcgagctcatggactttcccttatcccatccacgggtctctgctctccagatctggtgagtcggatcatcaagcaggaacccgctcttgagaactgcaaccaagacctcctccagcatcatgcagacctcacgtgtacaacaaccctggatctcacagacggcaccatcaccttcaacaacagcctcggagctgggaccgagagcagccaggcctacagtgtccccacaaaaatggggtcgaaactggaagacatcctcatggacgataccctttctcctgttggcataactgatccacttctttcctcggtgtcccccggagcatccaaaaccagcagccgaaggagcagtatgagcatggaagaaaccgaacacgcttgctagcaaattctccctgctctgctttctcacaaactgcttcctttcttgatcagcagatttaataatttacctgaaaggggttttcttgatcattttcttttaatatgaaaaaaaaaattttttttcatgctttatcaatagcccaggatatattttatttttagaattttgtgaaacagacttgtatattctattttacaactacaaatgcctccaaagtattgtacggtcatgtacagtatctgtgaactgaatacacccagactttagctttcagagcaagaggattttggtgtcagaaaaatttctgtccttttttattcaggggaaacttggtttgctatctgtatgcctgcaacttccttggaaatgaaatgtaaagtttaattgaaagaatgtaaagcaaccaaacaagagagagagcgaaagggagagagagcaagacagagaggagaggggtggggaaaaacagaagaaaaaaggaatctgtactaacctttttc

SEQ ID NO: 179 - DNA, 196500 bp, Hippotragus leucophaeus
  source 1..196500: mol_type = genomic DNA
ctatatactgttaagaatgaagtaaagaggtaacagatgatataaatcacttacaagcagttgggtgatgtaaagtgaaatgggaagaaaagaaaaagaaagaaagggcaaaacaagccaacaacaaaatcccaatccttgaagcactgagtccgtgaatagggcttacttgttccaattttagaaaaatgaaataaaaatcactgcctgattattttttcttttatactcatgaattcttaaaagttaaagtaagaaaaaatatatatttaatggaaagtatataccaatttcactttattagcctaatttaggaatgggatgaggacgacggggtcaaggtcaggtgtgaaggaagagggttaaaacttgtgacagcaaagatcccttcaaaactctggtgcagtcctcagtcactgtagcctgtcagtcaacagagttgaaatccagaataccaaaagcagactcctgtgctccagttctgtccaggggctcttcagtcacagtgtgatgaggtccaccaggttgcctttaggaggagtcatgctgtcaggaaagaaatttactaaggtgtcaaagagctgagttctttgagcataggtgtgatccacatccgaaaagcctggtgaaagagagataacaaagaaactcatccactgtgtttaacgctctacacgtaacagtaaagctagttgacaaaagcagcaatgtataatggaaaaatcaaaaccaaatcaggctttgaaactagagagcaatgggctctgattccagttctgcgacacagcaatggtatgatcttacgttaaggtaagcagcctttctacaactgtttcctcagctacaaatctgtgataatcctgtttatgtcataacctttacagtgcagattaaatgcaattatctgaataccatccagcagaatgattagtattttagtaactaatattgatttctcttcctttccttgtaagcattttccttttctggtccactgaggaattttcatttctcttttctttttaatgcttttggccactaaaactgttttgataataaaaatctaatgatattaaaggggtctttagaaagcagtgggcttcccttgtagctagctcagccagtaaagaatctgcctgcagtgcaggagaccagggttcgatccctgggttggaaagatcccttggagaaggaaatggcaacccattccagcattcttgcctgtaagatcccatggacagaggagcctgttgggctgcagtccatggggtcacaaagagttgggcatgactgtgcaactaacacttacttagaaagcagtataaaatcattatgccactgacagctggaagaagtctcaaagaacagtgaaaattcagatagttcagaagaatgtccttccagaggatggaagcaacattttttatttttttaaatttatttttaagtggagggttcttgctttgcaatgttgcgttggtttctgccgtacaacaacaagcatcagctggaactatacatatatgcctctctcttgcgcttcctgccccccaccccgaccccagccctctaggtcatcacagagcaccgagctgagctccctgtgccatacagcatcctcccactagctagctgtttcacacactgcactgcatgtatgtcagtgctaccctctcgtgtcatgtccacaggtctgctctctaaatctacgtctctatgcttgcactgcaaatcggtttatcagtactatttttcaagattccatatacgtctattaatatacgataactgtttttctctttctgatttactccattactctttgagtacctcctcactttctggcacagtaagacctccaagcttatctttatacagctttggaatctatcattttccctaacagctctagttccttttagtggcaaatgatatttacaaaccaagatcggtggtgctgtttctaggactatatatatgcacacatataatacgcatatctcttttaaaaggaataaaatcattagtccatgcttttactgctaattcatttttaaaggagcctcacaggattcttcctctccttatttcattccatatttatatctcttttctcctactagggaaaccatctctctcagcaataccatcgtatgtattcatttgctcaacctaaaacacacacaaaagaagttccagaattactataccccaatcagtaccagcaaaattcaagatttccttgcttttgctatctttagaatatacttcacttagagtatacagtttaagctgtacttaaaagacttaattctcttttttcccctattgtctgactatgtcacaaatttgataaacatgtttgtttctgttcacattcaacttcagggcatttaccacctttgttttttttgtaaaaaatgttgtagtataaaaaaatgttgtggtgtattgtatttttaagagaggacattgattctgtggtagtacttatcattgtcatgagatcaagtgatgtaggagggaaggaaataaacggagtctcctactacctgctaggttcttcatgtatgaccacatttcactgtcacaaaaatcatacgaagcagttaccataaactccaatttcagatgagacacttaagagagattcagtcattcagtaatgtatcacagttggagaggaaagagaatggagtgtgaacccatgtctgtccgactctaaagctcatttatttatttttatcaagtatctgagtacttattaaatagaaaacctattttttatttttattcaccatttaccaataaggaacatgaaatttacacgatcattagatgaatggttaaattatggtagactcctactatgggacattgtgtatcacttacaaatacgataaatctagtatagtttcacataagcatccccaagccatgttgttaaattttaaagagttatgtggagaatacacatttttatattacataataaatagaaccagaacacataaaaccaaacatctgtgtgtgtgtgtgtgtgtgtgtgtgtgtgtacacgtatccagttgatcctcattattcacagatttcatatttgtgcgtttgtctacctgctaaatttgtaatccctgaatcagtattgtgccacttttgtggtcaatcacagacaggcaccaagtggcaaaaaaatctcagctgccacatgtaaatatacgttctcaactgcggtcaaactaggtagtgctctgcccacttgtttcagctctcagactataaacaagtgctcttttcacaatctacttggtgtcatgttcttcacattttgtgttttctgttggtgacttcactgcttaaaatgccccccaagtgaggtgctgaagtgatggctagcgtttctaagtgcaagaaggctgtgatgtactttatgaagaaaatacatgttagataagctttgctcagggtgagatacagtgctattggcatgagttcaatgttaatgaatcaacaatataaatatgtaagtaaggtatgttcctgctgtagcaaaacaacattaagtattaattagttgaaaaaattctgtgacaagaggcttgaaggaccctaactctgtattttccatagaagcaatgggtcagtattaaacaaattcagggttacaagtaactgtatagaatattattgtgaattgtgggaatcaagtctatctatatgcccgtgtgtaaatatctgccaaatgcaagcagtcacacttgaaggaaggagacagagattgagggaagttgttcaaagacaacctgaatattaaaaaaaaaaaaaaaacaaaacaccctttaaaatgtgtggggcactgggaaactcagcaacattactatataaatggtagtgacaggacaaaaaggctgtattgattttaactttcatgttcttaaaacataccttgctgaaaatatgcttttaaaattagctaaaagtcagaagtcaagcttccaagtgtccacagccatagccacagcagcctaagctaaagatcctcaaaggttatttttctccgaagtcagtcatttttcaaaactaagacaatgccagcagtttgtaaaccactttccatctttctaaatttttaaattacaaataacattagcaaatactttttaattctgagaggttaagataaacttggatgaattctgaaggaagtcagaaattttagttgagccaattttgtgggtaacataatttagaaaatgaaatagttatttatacatgaaaagtgtacacatccatacattaaaaaaaataacccactagatttaaattctaagtggagtgaaggtaaaacaatcagatagaaaatgaacgagaaaaactaggaactctaaataggcatgaaaccttatgaaaaagacttcttaaaacaaatgtcaaatttctctttatgaaaactggcctatagcctgaatttactccttattcaaattcaccagtgttacaaagcttacatttataaggcaggtaacagaagtggtactctaaatagaacacttaccaagcatttcattttgctgttttcaagaatacttaattctctcaacaacctgaggtcactactctgcttacctccattttacagatgaagaaattaatgattaatgattagaaaggtgacttgttcaaagtcatttttaaaattagcaagtggcaaagctgatatctaaacctagattctgacctttaaccactatactatactcttccctcttaactactacaccgcttcccttcagacaaggtaggaaataaaacttcacagaaaatttccctttttgtatttatttctgttgtgtctgtactgatctcagtgtatctaaggtctgtttagaatccaagtaaaacaaactgttcctgacaaaatatattagctgacagtgaacagaccaaaggaaagagttaagctacaggtaaaatatttgctgacaacagtttaatatatttaaatgactgccaagaaattcttgttctaaaggctaaatataagtcagccagagacattttagtgctatccaccattaaaataaaaataatggctctgggctgtggtatccatacataagaaggcacgcattcactcaaactcaatatctatgtgccaggctcccagtttgtctatcactaaatccatttcaaaagataaaattcaaaagggcatgaactttctaaaataatgcatataactagactctatctcagggttgagattcctaataacctgaagacagttaaaaaaaattttttttaaactagtttatttatttatggctgtgctgggtctttgttgctgtgtgtggggggccttctctagttggggcgagccagggctactcttcactgcattgcacaggcttctccttgcggtagcttcttttgttgctgagcgagggttcaagagtgcaggcccagtagttgtggtgcgtgggcttagttgccccgcagcatgtggaatcttcctggaccaaggatcgaatccatgtcccttgcatttcaaggcagattcttaaccactggactgccagggaagtcctttttaaaaagtctttcagtgtatggaatggtggtaaaccattatgtcaatttttagaagaaccttctgaagttatgttttatagcggtcctcttgccttgtggtggaatgttaactcatggtaagtatatcagtaatacagtctgcattccaaaacaatggtacacaaattattttgaccaggcttctgtgctgtctatttgcataataacccagcgattggtataaagggaactgcaaactgacccatgaactgggaactgatgccagttatcaagaattttttgcatgttaccttgagaactgtttcatttgtttggatgacatctcatctaatgtttcattttgaagaaatcaaaatcaaacctccccaatgctagggaatatggccagataaagtacactgcaatacttacctaaagctgtgaaatctgaaccagatttaaatagagctgaagctaggagctgaaactgtggggaaaaaaagaaagcaaattagcttagctaggaactgcagtgtcagtcactcagtcatgtccgactctttgtgaccccatggactgtagcctgccaggctcctccatccatgggttttcctaggcaaggatactggagtgggttgctatttccttctccaagctaggtaagcacactggagaaaaaaaattcctataatttcaaccatttattagttactggatctatctccatatgtattgcttaggtctatttaccaaatagaaagactgaaggcgggagaaggggacaacagaggatgagattgttggatggcatcaccgactcaatggacatgagcttgagtaagctctgagagttggtgatggacagggaagcctggcatgctgcagtccatgaggtcacaaagagtcagacatgactgagcgactaaactgaaccaaactgattcaccaccaaataccggaaagaagaacattgtatttaaagaacacgctaattttttttactggactctcttatcatttttcaaaatactagactaagtcctggaattattttattttaaaaatatattaaatatgtacttgttaaggaacaatttagtccctagtactgtgttcagtcgtatctgattctgttggaatcccctggactatagcccaccaggctcctaaggaacaagaggtcaactgaaataaaaaattactgctaccatgtgatccaacaatttcactcctgagtacatatatccaaagaaaatgaaaacattcattggaaaagatacatacactctgatgtttcacagtacattatttacaatagcttgatatggaagcaacctaactgtccatcaacagatgcatggataaaaatgtggtatgtatacacacatccacacccacaaccctctacacactggaacactactcagcaataaaaaagaaaaaaatcctgccatttgcaacaacatggatggatctggagggtgttatgctaagtgaaataagtcagacagagaacaataaatactggatgtcaacatttgcatatagaaaccaaaaaataaatgaatgaataaaacaaaagagaaacagactcacaaacagaacaaaatagtggttaccaatgggaacacagaaagggtaggggtgaaacaagggtaagattaagaggtacaaactactatatatataaaaactagacacaaagatatattatacagtacagggaatatagccagtatcttacaataaatctaaatggagtatagtctgtaaaaatactgaatcactatgttatacatctgaaactaatacaatattataaatcaactatactttgattaaaagaaaaagacaattacttatgtgggaatctatcatagagagattgatgccccaaatacagttactgaactttagggatggcttatacataatataaattacaacttagactggtattccatggtatttataactgtagtattatataattatataattttaaaggctcaaagtaaaaaaatgttgtgttgattagcttctcagattagtcagtttaaatcagacaatgtagctgaatgacgacaaaataaaataagacaaaactattgcactggggtactttaacaaattggtaaacaaaaatttaggctcccctggtgtctcagatggtaaagaatccgcctgcagtgcaggaggcttgggtttgatccctgggttgggaagatcccttggagggcatggcaacccactccagtaactcctgcctggagaatccccatgggcagaggagcctggtgggctacagtccatggggtggaaaagatggacatgactgagtgactaagcacatgacataaaaatttaggagaactattgatatttatcttgactgaggatcctggaaaacaggtcaggtaaaggtcaaataaacagaatctcaacagagttacttgacactttgcaaagcttgagccactgattcttcaggatgaatctcacacttattcttgtagcctttaaaatttcagctatcagtcacctgattaatcatcctttgaatgtaagaaactggacaaataatccagaagcaactaaacaagagttagagggggaaaaggggtataaaaggaagagttaaaaatatatgaaacttcttcatgtattttgggtatcagtactgtgtcagacatatctactacaaatattatctggtctgtgcctcgtctattttttttttttttactgcacggtttagcttcgggatattagttccttcagccagggacagaacccaggccctctgccgtgaaagtgggaagtcccaaccactggaccaccagagaattcccttctgccttaaaaaaaatttttttgacaatgtcatttaatgagtagaaattttaattgtgttgaagttcaattcgtgaagttttctccttatgattagtgcctttatgtcatatccaagaaagctttgcttatcccaaggtggtgaagataatctgttttcttcttttagttagttagttcagtcgctcagtcgtgtccaactctttgcgaccccatgaatcgcagcacgccaggcctccctgttcgtcatcaactcctggagttcacccatactcacgtccatcgagtcagtgatgccatccagccatctcatcctcggtcgtccccttctcctcctgcccccgattcctcccagcatcagagtcttttccagtgagtcagctcttcccatgaggtggccaaagtactagagtttcagcttcagcatcattccttccaaagaaatcccagggctgatcttcagaatggactggttggatctccttgcagtccaagggactctcactcttctccaacaccacagttcaaaagtatcaattctttggcgctcagctttcttcacagtccaactctcacatccatacatgaccacaggaaaaaccatagccttgactagacggacctttgttggcaaagtaatgtctctgcttttcaatatgctatctaggttggtcataacttttcttttaaggagtaagcgtcttttaatttcatggctgcagtcaccatggctgcagtgattttggagcccaaataaagcctgacactgtttccactgtttccccatctatttcccatgaagtgatgggaccggatgccatgatcttcattttctgaatggttagctttaagccaactttttcactctcctctttcactttcatcaagaggctttttagttcctcttcactttctgccataagggtggtgtcatctgcatagctgaggttattgggatttctcctggcaatcttgattccagcttgtgcttcttccagcccagcatttctcatgatgtactctgcatagaagttaaataagcagggtgacaatatacagccttgaggtactccttttcctatttggaaccagtctgttgttccatgtccagttctaactgttgcttcctgacctgcatataggtttcccaagaggcaggtcaagtggtctggtattcccatctctttcagaattttccacagtttattgtgatccacacagtcaaaggctttggcatagtcaataaagcagaaatagatgtttttctggaactctcttgctttctccatgatccagcggatgttagcaatttgatctctagttcctctgccttttctaaaaccagcttgaacatctggaagttcacagttcacgtatcgctgaagcctggcttcgagaattttgagcattactttactcgtgtgtgagatgagtgcaattgtgcggtagtttgagcattctttggcattgcctttctttgggattggaatgaaaactgaccttttttccagtcctgtggccactgctgagttttccaaatttgctggcatattgagtgcagcactttcacagcatcatctttcaggatttgaaagattttcttcttaaggatggactatttggggttttatatttagatccataatccatcttaatttttgtgttaagagtgaaacagaggttgagatagccatctatttagcatcacttgttaaaaggactttcttttccctattaaacttggtgctttggttaaaaaaaaaaaaaaatcaactgactgcatatgtaggagtctatttctgaattttattctgttcttttgatctatttgtctatccttaaggcaataccatacccctgtgattactatggctctatacagagccctgaaatcaggtagtaagtaggagaccaccaacttttttttcaagattcttttagctagtccagagtcttcacatttccactggattttagaataagttgggatactgacagaaactgcagtttaaattggtttaaattataaaccaatttggggagaatgggcatctcaacacttttacagtctttcaaaccataaatgtggtttatttctccatttattcaggtgttaatttcttttaattacttctgtatatttgattatgatattaatataaaaatttaaaaattttcattctttttttttttgaagcaaggaaaatgatttatttggaaagccatctgatcaagaagatggcaggttagcacctcaaaatactcatcttatcagggtctggatgccaggttcttttttatagatcagagagaaaaaagcagtgaggaactaaagtgaaaaggcagaatacagagtaaacagttcatttctaagtgctcattgctattataatattggaactgctttttaattctattggccttgtattctgtaagcttgttgaattcagttatcttagtatatcttttgtagactgcatgatgttttctatgtacacaataatgtcatctcaagatgcaaacggtttcacttgctccttttaaatctatatgctgtttatttattttttttattgcactagctagtacttctggcacaatactgaatagaggtgttgacagcagacatcttttccttgtcataatcttaacagagagggtttaacgttttataatgaagtatggcactagctgtatatttttcataaataccctttatgagacttatgacttttttttaattcccagtttgttaagaatttttataatgaatgggttttggattctgtcagatgctttcttcacttattgagatgatctatggtttttctctttcattctgccaaagtggtgaaatatagcgacagatttttaaaagttaatacaaattcaacctctaattccttaagattttctaattcttcttgtttttgtaagttgtatctttaaagaaatttgttcattttatcaagctgttgaatttgttgacaagttgtttataatacttctgtaatatacttttaatgtacagaggcttgtaatgatttcccctttccatctgtgatgttgataatctgtgttttcattatttcttttcttgataagtcttgctagagattgactaactttagttactttttcaaagaaccatcatttcactttttacatttttttatcataatccattttactaatttcctatattctaaacacttatttgggattaatttgttcttcttttctaacttcaaagatgaaagataaacttcataggctctatgtagatggggggggactgtcattttcactattcaattaagtaagtagcgctgatatgtactggcttagaattttgacaggtaccaagcctactccagtactcttgcctggagaatcccatggatggaggagcctggtgggctacagtccatggggctgctaagagttggacacaactgagcgacttcactttcatttttcactttcatgcattggagaaggaaatggcaatccactccagtgttcttgcctggagaatcccaggggtcgcacagagtcggacacgactgacgtgactcagcaacagcaacaacagcaacaagcagtagtacacaatctgaataaagtcagacctctccctgcaactccagacttgaatatccaactatcacttcaacgtcttaagtaggctatttcataggcatcttgaactgaacacatgaaaaattaaactcccaattcaagtcagaagtctccaccttctcatttcatctgacagtaactccatcctttagtttttcaggctcaatactctagagtcatttctttcaaccctatatccaatcataaaatgttgttggttccacctttaaagtatattgagaatcaaagctattttactcatcgtttctatcattactattttgatctgagcaatataatcccccttgcttagatttatacaccgccctcagagctctctttgcctccatctgtgttcctttttagtctattttgaatacagtaatcagtgtgacctaattaacacataaagcagattatatcactcctctgcatgcacaataccctgatctggctccctattcagaataaaaaccaaagttctaacaatgacttacgaagttatttataatctgttctgccaatagctgttcttacctctctgctgctgctaagtcgtttcagtcatgtccgactctgtgcaatcccagagacagcagcccaccaggttcccccatccctgggattctccaggcaagtacactggagtaggttgccatttccttctccaatgcatgaaagtgaaaagtcaaagtgaagtcgctcagtcctgtccaactgttcgcgaccccatggactgcagcctaccaggctcctccatccatgggattttccacctacctctctgatctcacctctgattactgtctccttacctctctattccagccacaaggggtgtctccttgatgttctaaacaaagccaaatactctcatcttaaggtctttgttctagccctccttttgctaggaattaccttccccaaactatctacttagatcactccctcataattcttcaactttctgtgcatatctgatttctaaatgaggtctactatgattactctacttaatagccacaactgtccaattcttaccccttgtatttttaattctgtttaactttcctataatccttatccaattctaatgtactatatttatttacttaatatgtttatcgctcctccccactagcttgtaagtatctcctgggcaagtatcttgtttggttcactggggtctctcgtatgcctggcatattgcagagactctacacatttgttaaataaatgacaccagtacttcagaagctcagtagaagataattaatacaaaatgtgcaaaactgcctgaaaacttgtttttctcattccttctttattatagaactctctctaaaaaatggtagaatcagttttaggcaaccttttcttggcccttttctagaaaaagaaatataattttcataaacttttttataatctcatcaccaatttagattccacgttctagagactgaagaaagcaaagaaccattactgggtacatagttaacagtctaccagcattttccactaacaggcacaatgatgattcaaaaaagggggagaaatatctaaaaaccatttgtaaaagcgaaagtcactcagtcatgtccaactcttagcgaccccatggaatatacagtctatggaattctctagcccagaataccggagtgggtagtctttcctttcttcaggggatcttcccaacccagggattgaacccaggtctcctgcattgcaggtggattctttaccagctgagccaccagggaagcccaagaatactggagtgggtagcctatcccttctccagtggatcttcccgacccaggaatcaaactggggtctcctgcactgcaggagtattctttaccaactgagctatcagggaagccaattgctgataaaatcatttaacattttgtaaaacatacacagaaaacgaaaccaagctactacagaaaatgaacagcagtataggcctttttcaataaggggaatgatttcttacaaggaaaagtgaagatctacatgccccactaacaaatactgtaagtacatatacatactggagctgtcaccaagggatttctttccccaaacaaaatctggccacacatttttaaacaaaatactaaacttacagatcagcaatcctcaatgttttagatgtgttttcagttttccattataaaagagtaaacagagaagaatctttgagtgtgggtattgttttgaaaaagtttctaaagtgattctgatgctgacacatacatgaataacaagaataacatcactttttcctaacttctactctatttaagaaatagaatggaagtctgtggcatacaaaatcataatttgatagtcttcaggaaaacagaaactcatcatcaaaattcttaatatgactatttgaacttgagatacctccctgtcctggtttttcccattagcttagctttaagaacaaactctctgttttctttggcctacttgcagctcacacagctgaaattatttacttcgcagtattttgctttggtttggtttttaaaaataagacaaaaatgaatgttcccggtttagagccattttagacagagtatggtgaaaacacaagaaaatccatttatctcccaaatgtacaagtctaacaaaatgaacaataatgcacttttcacaactatcttcagcttattaatataatccacaacaggttaatctaaatatactctgctatttggcaaaatcatgattgttgttatagctaatctgtgcccaactttttgcaacctcacgcagcacgccaggcttccctgccctccactatttcctagagtttgctcaaattcaagtccattgagtctataaccatctcatcctctgccgccctcttctccttttgccttcagtctctccaagcattaggggattttccaataagttccctcttcgtatcaggtggtcaacttattggagcttcagattcagtatcagtccttccaatgaatattccaggttgacttcccttacgatagactggtttgatctccgtgcagtctaagggactctcaagagtcttctccaacaccacaattcgaaagtatcacttcttcagcactcagccttctttatggttcaactctcatgtccggacatgactagggaaaaaccatagctttgactatatggacctttgctggcaaagtgatgtctctgctttttaataccatgtctaggttggccatagctttccttccaaggagcaagcagcttataatttcatggctgcagtcactgtctgcactgactttggagcccaaggaaataaaatctgtcactgcttccactttttccccttctacttgccatgaactgttgggagtagatgccatgatctttcttcagggggttttaaattgtgttttgctgatcctccacctgctgaagggctataaccaatactgagtaagagaactggggcttattttcatcataggcaactatgaaagaatatttatttgttttggtgccaagaacatgcaggctcttcttcttgaaagtacaatgaacctggtgccggaaagtcattcgacattaaatctgaaatctgtgtcagtgctgaacagagaaaaacactgtgtgatgttgctattacgaagccaaagcactgcaacagctaacagggaaagagatgaaggaagggaaccacatatgatcaccaattctgagaatgaagataaatggactgcagttcagatgctgttggatgaagcatgaacaagaatagctgatgaaaggaagaagtgacaaaaggagtcttagaagttagcaggaagaaacgttagtaagaccatggaactcacggcaggtgtattcacacaatagggataagcagatacaccctaagaatattcttacaaacagttgcttcgtcccatgttatgtatcaaaagagaaaaccgaaaagtaatgatctgttactaatttctcaagcttaggggctactgatgaaccaagcttgaggcctatagtaaaactgtagtgctacaacattcatataactaagtatcaagccagcaaagatgttattcctaccaacctctcttcactctcttcttatattaaaggagagttttccttcttcttttaagggattttggagtaccaatagaaaaagtttatactgaacattacgtaacccttaagtaaaagcagcatggaactatggtagaagtcaaattttctatttcgttcccaatacaaacactaatgtctaagttacaacttcatacctgagaattcttttctgaatggatcacaggtttctgacttgaatcttacattattaaatagaaatatgtctattcaatttctatttcatctgctccataccatttaaaaaatatttagtgttatcatatattcctcacttccctttaaacactcaagaacaaagtcaacaaatataagttagaaactttttaaaaaacgttcaatttctgaagtttattatcacctttacctctttagtctcttctgggtctgaatgatccacagttatataaagatcattttgtaaatatttcagagcactaaggggatccatttgggccttttcttcaaacctagaaaatgcaaacaagaatagtaattgctttagagttatgaaaaagcatcagaaatgtctttcaaatatggagtgaaataatctgtatctgaggagatattgtggatatacaaaaaaatctgtgtttaagaatccagaagtaagaatactgccacttatataaacagtgtacatgtggagcctctggaaacaagggtaatgccaggctgtggtgctagagactagataagaacatttcctaccctattcttagggacttccctggtggctcagccagtaaagtgtctgcctacagtgcgggagacccaggttcaatccctgggtcgggaagatcgtctggagaaggaaatggcaacccacttcagtattcttgcctggaaaatcccatggatggaggagtctggtaggctatgttccatggggttgcaaagagtcagacacaactgagcaacttcactcattcactaccctcttctaaaactataagctaagattaagtcaactactaacacagtggatctatcaaatattttttataacaaaactacaacagtcaaatgtgtttcaaaaaaatgtaagtagggataaaataaaaatactttcctagatttgtgtcacatactttccactggaggtgtttaacagatacttcagaaaccaaaatgactatagtttcttttaatgattagatattttttaatgagactacttccacatctcagtcagtaataacaataacaaaaacaagtgtactaaccgtttatcaattgtttgtgctagacactgtatcaagcatcttatatatatcatttcatttatcctcacataacctctatgacaagttgatgatcatttaaaaagcaagagatgaagaactgttggccagtaaaagaatttggccatgctaaaacctagtaagcagcagaaatagaattaaactcaagtttctctgattccaaagcagaaaggaaacaatgagttctcctaaattaaaagtctgcttcgactatatatttatttaaataatgataattccttttgtaatagaattatatatggatttattttcaaaaaattggtatgcttttcaaagtattatacaaaaggaaagaaaagacattaaacttcatttggaaaaggaaaatagtaatgagcctttcatgactatgttcagctgacagcaccaacaatttcctgtgtttggaactaacctcagtgaaagggtacctgcaggaggggcagagactggcaaaatattacagtattcctgtaccagatagtaccctgattgtcagccagccttacaacccgcagctgagagttttagtcatgttactctaccatcctgcccataatgaattatggcacttgaaccaaaagcagtcatcttgagcttgctgagccatttataaagtggtctggcaaaattctttccaggatacactctccagggaactttctctaagataatctcttagagaaactgaatgagagatacacaagaacacgaaaacacaaaccacagacagcaacaggtagaagacacgaaatggtagatcctttcccttctatcctctcccttcctacctagctacctaccaaagccgtaagggaagacagaatcaagaagtagaacaagaaaaccagacagaaagaagcagaaagagaaaggctcaattacaacgaaagttacttcagtagcttctagctaatcagaactgtctcagtatcttaaacaattcttcattaggcctcaatgttcaggtgctaagaaagtactttaattctctggatatactctttcttttccagtgagatactctaagtatgtctttatcctttgtaacctgataacttaatcaacacatatctatggttctattaaataaatccagcaaaaggatccattttcctgaagttgtgttctctctaagcttttttggttagcctgctaaaacttattactgccatctagaattatatttcagccactaattgtgccctctacctaaaggaacaagggactaatcctatcaataacgggtttttttgcccctttctatcccccaatcatatgtttggaaacgaatattacagaagagcggcactttattttctgtatcatgtggcaccattaagaacaaagacacattcttggcagtcaacacacttctctccctccaaatttgtattttaactaaaatttatattttaactaaatagtcacaaatttcaaaggcttattatttgatcacacaaaactctttcaacttcagtcactttatttcatgaatcacactcacaagatttgctagtctttcatcatataattacaaatgtaaataatttgttactgattattattttccttattcactttcatgcctcactttgtgcatttactagcacaagtcactaacaatgatgctctgtatctaaaacttaaaagatgccataatatttcatagtatttcagagtcccataaattgtcattttgcctgcccactgatagatttttaaaggagaaaaactgccaaagatcaaaaataatatcttttaagatgagttggctgtgtggaaatgaataattctacttatttctagaaggaatgaaaattattttttctgaagggcaacttataaatcatcagatctgcctctatcctatagaaattttggataggggtgcatacatgcatgcttagtcactcagtcatgtccgactctctgcgacctcatggactgtagcctgccagactcctctgcccatgagattctccaggcaagaatactggagtgtgttgccatttccttctccagaggatcttcccaatccagggatcaaacccaggcctcctggattgcagattgattctttaccatctgagcaaccagagaagccacagaggagcatacagacttatatgataacattaaccacagtgttatttctgttatttataactgcaaataagtcagaaataatctaaatattctacaaaaggagactagttaatgtaaattacacagagtagaacactatgtagccattacatttatatttactaatgtaaggaataagacatttatactacatcacttattaaaagaaatcaggttcaaagcaagatgattcctattttttagttaaagaaacaaaaatttgtgcacttatagttcacgggatacataaccaaaatattatttctgaatggtgggatgagggatgattcaattctctgcagtagagagagaggacttttttattctttattaaccatgtattacttttctaattaaagccagagggaagtatttacaagtaaattccaattctttacatatagtactaaacaactcttttaaatctctagtgggcttttggtcaggaaatttttttcaaaaaccaaattcaacattctaactatagttgttgtatctgaagtagggaaggaaaaaaaaaaaaaaccgactatgattttcccaaacctgtcttatccctttaaaaacaaagtttaacattaagtaaaataccaaggaacaaaattttagcaatgcaaaataacattagctgaaggaaagttatgaccaacctagatagcatattgaaaagcagagacattacttggccaacaaaggtccgtctagtcaaggctatggtttttccagtggtcatgtatggatgtgagagttggactgtgaagaaagctgagcgccgaagaattgatacttttgaactgtggtgttggacaagactctttgagagtcccttggactgcaaggagatccaaccagtccattctaaaggagatcagtcctgggtgttcattggaaggactgatgctaaagctgaaagtctaatactttggccacctcatgcaaagagttgactcattggaaaagaccctgatgctgggagggattgggggcgggaggagaaggggacgacaagaggatgagatggctggatggcatcaccgactcgatggacgtgagtctgagtaaactctggcagttggtgatggacagggaggcctggcgtgcggcaatttgtggggtagtagtcggacacgactgagtgactgaactggaactagactggaaggtactttaagcttaaatgttgctagtaagacagaattgatctcttgctatccagccaacgtgacaattcagcccctttctcctagagatcctataggaaatactcttacttattcatagtaatgacaaagcaacagaagcaactcatatctctttgtttcttaagcacaacttgtgaaagcagagtaagaaataacaggtaaatatgatatgataaagaaataaaactctattttatacctgcacagaggttttaattttattctatatattaatataatacataattatataataaacatataaatacacataagtatgcatgtctgtgtatatacatatgtgtatgaagtggaagtggcggcggtggtgaagtggtaaaaactctggagtcagaatactcaggatcaaatcctgctgtcacagctgaatgaccttagatgagttacacaatccacttaaaaatggctccatttcctcttttacaaaaagagtaactgtaacaataacttctccactgacttattgtgcaaataacatgcaggatttagcatacaaaaactgttcatcagttcagttcagttcagtcactcagtcgtgtctgactctttacgaccccatgaatcgcagcgtgcaggcctccctgtccatcaccaacagccagagttcactcaaactcaagtccatcgagtcagtgatgccatccagccatctcatcctctgtcgtccctttctcctcctgcccccaatccctcccagcatcagagtctttgccaatgagtcagctcttcacatgaagtggccaaagtactggagtttcagcttcagcatcattctctccaaagaaatctcagggttgatctccttcagaatggactggttggatctccttgcagtccaagggactctcaaagagtcttgtccaacaccacagttcaaaagtatcaattcttcggcgctcagctttcttcacagtccaactctcacatccatacatgaccactggaaaaaccatagccttgactagatggacctttgttggccaagtaatgtctctgcttttcaatatgctatctaggttggtcataacttttcttccaaggagtaagcatcttttaatttcatggctgcagtcaccatctgcagtgattttggagccccccaaaaatgaagtctgacactgtttccccatctatttcccacgaagtgatgggaccagatgccatgatcttcattttctgaatgttgagctttaaggcaacttttccactctcctctttcactttcatcaagaggctttttagctcctcttcactttctgccataaacgtggtatcatctgcatatctgaggttactgatatttctcccggcaatctatggtatctatcatcaccattaaaagctgtctctccccgcaaactgtaaattttaattacaatctaacactattagcaaccaagggaatagatgtatttttctacatttttcagtagcttatcatttgctaaggctaaaaaacaaactagactgaggagatatatatgaaaatgtttgattacatgattttgcaattatattgcaaaagtaatgatgcaaaactataatattttaaattgtattctgaaacatcaaagtataaagagattatttagccaactatatcatcatatttactgttaagagaatcaacaataggtcagtcaaatgccaataattctacaaatgatattatttgtagtgggttaggccttgagttacttgaaggtaagttcatcatgttcatagaaactttttccattattgtgacagttgcaatatatccttgcttatctttaataacttttagcattaagatctatcttcactttgtacctttctttgaaaaagaacgaaaaaaataaggagagtaatagggcatttacaaaagccatgatcttcacaatatttacactgtcgtgtcactaaatttccaaagataaagtcacatctccaaagcttaggtaatatcaacaatagctgataatgctaaataaaagtttttagtgaattatttttatacctgtgttttcttatgaggtacttgcaatgccgcagtaagtaatcttttgaaggcctacacaatttcagtgaccagaagtcatctaatctcatctttggggagcatgattttcctggattcccaccaaataaataatgaacctataataaataaagcaaatcagatttttaaaaaatgcatgcatactcaggaaagtcgtagtaaaatttcttcattttggtagtagtgtataacatgtaacttgtttagctttactcatacaaaaaaactaaaacattcctgcatgtctaccaaaggcttcctctgatttttctcaagtttccattttactttaaagtactgtgattacttccttaaattacatttcatgttaaaataagttgtattaccacagttacactgaaaatggaagacataaaaataaagcaatggtagtaagaagctattctaagatacagtttggttaggcaacaaataatagggattatcaagttaatcaagtgtcgatcataataaaaaatcatcttttaaaaaaactgacacacaagttgaatcactgaaggtcaaaaatagctagaagttttaaaaattttagcatcttaacttttgtagaatgtttcaatatgaatataattgaatattagccttaatgctgaatattaaatgagatgtacgatttgtgaaataacttttaaaatattattctatcatataattaatactgttagatagttagaataggaaataggagtccaatatagcagtggctaaaagacaaagaaaggaaaaagcccacaaaaacagaacaaaggaagttccaaggactggagtgagaacctcaggtgaagcaaacagccctcctggctagcccagtttacatagggcaagctcaggtggaggagaaagtcacataaaaagaggagtcaaaactgagccccgcacttcttttgggttggcccaccctcactcctagaggatgcattttcccttgcttgccaaataaaactgagctgtaactgagctgtagcactggtccactgcttaaactgagctgtaaccaagctgtaacattggtctgccacttcaatttttgctgtggcaagacagaatgaggaaattacacgctcccctgacaataccacataagaaaagtgaaaggaatgcaataatggcataatgacactattaaaggtttagtaatattctgtattcaaagtggtaaagcattttttgatattttgaaacatttataatcagcagtgttatacaagagatattatttctatcctatagatgggaattcatttaaccttcactttgggagactctcagagaaaggggttttagttattcaaatggtatcgtttacctaaagatctcaaatgattgagaatttaacagaaagaatacagttctgtcagtaatttactatataatctgagcccgatcattaaactatatgtaaagtttaagggagaaatacctaaagaaaccacactaaacacttagtgacacgaaaacttcagaattcagaactattttcacaaggctgatggaatagatatgtcaatcataggaaaaataaagatttcttacacaacaggaaaatctaaaatcaggaagttatatatatcttttcatatcatggaaaaaggtatacaagtgctgaaaactgtgtatcctctacttgaatattcatattatagaaacaataggccatgctatatatcagatctatgcagctaagaagcaatagccactggccattttcataagaaatgtgccaggaactatggattatgcaaaaatgtttattcttttaaggaatttcagggagaagtgatatctgtgctacatattctagtaaatgttggttatttttattcagatctactgaaaataatcagaaacagttattttgagattctttctgattgtacgtcatagaaagtttaccggtcaatgtagttaggataccttgtgtaattcatcatatacaagctgatgggcaaatcttggacatggttcttcctcctgcagacttttacttggattatcctttgcagcttgatcattcttatagacacaagacctgcaagacattgcttttaaggcattctatcctagaaaattagcagtacacataaggttaatataattgtagcaagcaaattaatgcaatgtctaattaccaacaaaagattataaatttgttcacatcaaatcttaaagttctggtcactctcatataaaataatccgaatttgttagaactgagttctgaagttctttaatgtccatcaaaatctcatttaagaacaacctactttgtgttatgaaataggatcagcatatatgaaggcttaaaccaaaggttgaaagagatgatatcatatttatctattatacaataaaaactcacaacagactgctttcattcttactataaataaatgtcccatttagaagataacaaatcccttagttgccgagcatcaccttccattactgaatggaagttctcagaagttcctctgttctggagaatattcacttaggtagtactacagaacattaaagctgggtcctctaagtcagtgtttttcaaagaaaaatgtatagcagttctgtgaggtgctctgtgacaaaagggtcctaggtttgaatatgctaaataaataatactccccttccctcaatcttgctctagtcaaactgcttcattccataaaaactaagaaaggcctgggaacattaaaaatacattcttctcaagcttacccatctacatggtagcaaaagctaaactaaaatataattctcctgatgctcagaccaggagatatctactaactgaaaaattcagaggtaaaatccattgctggacatcattgtaaacatgggcaccaatactgactcttccaatacctaatattgatattaaaatatatgacatcacaaactaaggtaagccttctacctccctcttcttctgaataaaccaacaacctcaacctcaaagaaatgttacacagggatttcaacacagacaagagctacttaccaactatttcttacaatatcataaatccagaatgaatttctgacattctcttccctcttttccttgtctttgctgagtccagataagacatgtatttcattcagctctggatcaatggttgctctctgtgtgaatcctgtcattggaactataaattgaaagagaaaataagaggatagtgttaacattaggtaacaggttagtactacttcagcacttatcttctaacatatgaaataacttttatattaaacaataatcaaatgtttattgccctctcctcactctaaaacataagctctataagggcaaaggttgtttggatcactgttttgttcccagtacctaaaacaactgccaggcatgtaacagttactcaactgtttgttgaaataaatgaatgataactatcaggatggagttaggaggagaaaagaggtagaacgagtgcaatataattatttttattgagggaaggggcaatgctttatttaactgatttattctcttgactggttctaatttaatagcagagacaaaatatttcaatcctgactaagaaaaacaaaaatttgacacacaggtttgtttaataaagtcaaagtcatctaaaatacctgttcaagacatataatgaaatgacaaagtttccaagaaaaatacatatttgggggtaaaatatgccattttgttttccagagtggtttggactcccttagtcagtcagttcagttgctcagtcgtgtccgactctttgcgaccccatgaatcacagcacgccaagcctccctgtccatcaccaactcccggagttcactcagacttgtgttcatcaggtcagtgatgccatccagccatctcatcctctgtcatccccttcttctcctgcccccaatccctcccagcatcagagtcttttccaatgagtcaactcttcacatgaggtggccaaagtattggagtttcagctttagcatcattccttccaaagaaatcccagggctgatctccttcagaatggactgattggatctccttgcagtccaagggaccctcaagagtcttctccaacaccacagttcaaaagcaccaattctttggcgctcagtcttcttcacagtccaactctcacatccatacatgaccactggaaaaaccatagccttgactagacggaccttagtcagcaaagtagtgtctctgcttttgaatgtgctatctaggttggtcataacttttcttccaaggagtatgcatcttttaatttcatggctgcaatcaccatctgcagtgattttggagcccaaaaaaataaagtctgacactgtttccactgtttccccatctatttcccatgaagtgatggggttggataccatgatcttcgtttagagtcaattttatgagaaaatattttcctgagaaacccattaaatgagtgatggtcattttgcattatccagtaatttgcaaaacactaatacggcaaatgcaaatcttctcactattgttacttggaaatattcagttcagttcagtagctcagtcgtgtctctttgcaaccccatgaatcgcagcgcgccaggcctccctgtccatcaccaactcccggagttcactcagactcatgtccatcgagtcagtgatgccatccagccatctcatcctctgtcgtccccttctcctcctgcccccaatccctcccagcatcagagtcttttccaatgagtcagctcttcccatgaggtggccaaaatactggagtttcagctttagcatcattccttccaaagaacacccagggctgatctcctttagaatggactggttggatctccttgcagtccaagggactctcaagagtcttctccaacaccacagttcaaaagcatcaaatcttcagcgctcagctttcttcacagttcaactctcacatccatacatgaccactggaaaaaccatagccttgactagacggacctttgttggcaaagtagtgtctctgcttttcaatatgctatctaggttggtcataacttttcttccaaggagtaagcgtcttttaatttcatggctgcagtcaccatctgcagtgattttggagtccccccaaaattacctatttcccatgaagtgatgggactggatgccatgatcttcattttctgaatgttgagctttaggccaactttttcactctcctctttcacgttcatcaaaaggctttttagttccttttcactttctgctataacagtggtgtcatctgcatatctgaggttattgatatttctcctggcaatcttgattccagcttgtgcttcttgcagcccagcatttttcatgatgtactctgcatgtaagttacataagcagggtgataatattcagccctgacgtactccttttcctatttggaaccagtctgttgttccatgtccagttctaaccgttgcttcctgacctgcatacaggtttctccagaggcaggtcaggtggtctggtattcccatctctttcagaattttccacagtttattgtgatctgcacagtagttgaaatagaattttgtgattgacaacatacttgccacagatctaaaaacaatgtcattgttacagtattaaatttcttttatacattaacaagtatcatatgctggaaaagctacacaaacatcagcttgaagtaaaatatctcaatcaagccataataatacggaagcagatgctaaccacaccgatactcatccgtctttatctactttagtagggccaaataatgcaatattgactttttcctagtttaattcatctatcttttatattcatattcaataaatttgttgggaatattttagagactatccgaatgtaccccacagtaaatatagtaaaaactgtatgcacacacacatatgtaacatatgcatccatagacaaatacatttatcttgatacacacatacaccaacctaaccttaataataacctcaactctcattctacaccgtttttagtggtcatgtaaagcctggtattttctaattaaaccctggtaaactttcaaaagtaccttggttctgacctgttcctcagataatcttggaagataaaacagtaaagaaattaaatcattttcattaatggtagaagcagaggacataactgcctaaatattttgcccttaaatttcttcattccatttagaattctatagcatgggttgacaaactatggctccatctgatttgctgaggttcaaatcaggcctcagtcaatcattcacactgtgtctgtggctgatttcaccccacaatagcaaggttgagtagctgcaatggcaataattacagctggttcttcatagaaaacatctgctaatccctattctataatcttttaaaatgaaaatatcagagatgtatgacttataaatgaatgcagcaaactgcttaccttaaataaggacccactgaggaaatggaaatttctgggtggaatggaaatcagtagagtgggaaagagattttgaattctattaaaacagggctgaagtcactaagaggacaataaaggagtcctgggctacacaaggcaaggaagaatgcagagggatgtaagaccaagttttacatgcttcctcgtccatactgtcacatttttacctagaagcaggtttgcaacacatgaaaaaaatgacaagtgttccttcttaaaaacaaaagcagtgggccggtttacaatacttagggaggcaagacttccatgtttaccaaatgtgcattataagaatttttaaaaattactttgattataaagcatattagaaaacatatatttcccatttctttgctctttcacatacaatatgccttttactctatgtaacactgatttttgcatccgacttatatatttaaatcttttattggctttttaaacaactttactgaatattaaccaaataccatgtgattcacctatttacatagctgggttgttttttttatatccactgtaaaaatatcatcataatctaattttagaatatttttatgactccaaaaacaaaccctgtacccatcaggagtcatttcccaccccctttctgcccactgggtcacagcatcatttgacatgtctaccaacaatgagtgtgcagcagagacaggcacagggagaggatcctgagacacagagatcaatcaggaggctgttaagaatgcgatagagtggaatgaacaaaagccggaaggaaggatcaataaacaagcatttatttccatcagcacaaaaatataaaaatctctgaactggctgaagagagacttggaatggaaacttgtgaaaaataagagtaaaatgtttcactgaaattttttggaggttttcaaatattttactctaaaatattcaaatgcaaaatctttcaaggacagaatttctactaattcttaagtttacagatctttacaaatataatttttattgcatactaatgacaagaaaaatgttcacatataaaatatttacatacatgtgaatagaaaaaaatatgacagtacataaaaataatagttattggagaggggaagttaggacattttaaatttctaactgtataatatgaaaactttcaatatatattgcttttatagttataagaaaagaagaacaatctaaaccaaaatatatataaaaaaaaatctgggtatacatactgggaacttttagtaataagtgaaaaactctcacacatcctctcaaatttctcaaggacaaaattttacattaatatttgaaatgctgctatttacatggaaagagaactcaggtttcaaaagacaattttaatggcactaaaaagccctatgttttaaaatcatttagttacaaaactaaaactagagattaaagtattttttctctaaaaactaaaaatgaaaacatatctaaagagttcctaaaattaagggttaattcaaacttacactgaatgcatctatgttaatggccttttgcttaaattttacaaattgtacttaagtttaactcctatttccattccactctacagacactaacaattcaaagaacatttcaataagaaaccaataaaaataaagcttttcctctaatttgaaaagatacactcagcccagtattcatagaaacactattttcaataaccaagacatggaagagacctaaatgtccactaacaggtaaaaggataaagaagatgtatgtgtatgtgtagatatatatataaacatgactctgcacaaaaagaatgaaattatgccatttgtagcaacatggattttgccttttcatactgttcatagacagatgggcacaataaaggacagaaacggcaaggacctaacagaagcagaagagtttaagaaaaggtggcaagaatacacagaagaactatactaaaaaagatcttaatgacccagataatcacgatggtgtgatcactcacctagagccagacatcctggaatgggaagtcaagcgggccttaagaagcatcactatgaacaaagctagtggaggtgatggaattccagctgagctatttctaaccctaaaagatgatgctgctaaactgccacactcaatatgccagcaaatttagaaaacacagcagtggccacaggactgcaaaaggtcagtcttcattccaatcccaaagaaaggcaatgccaaagaatgttcaaactatcagacaactccactcatttcacatgctagtaaggttatgctcaaaatccttcaagctaggctttagcagaacatgaaccaagaacttccagatgtacaggctggatttagaaaaagcagaggaaccagagatctagttgtcaacatcgggtggatcatacagaaatcaagagagctccagaaaaacatctacttctgcctcattgaccacactaaagcccttggctgtgtggatcacatcaaagagtggaaaattcttaaagagatgggaatactcagttcagttcagccgcttagttctgtccaactctttgcgaccccatggactgtaggacaccaggcctcccttccatcaccaacacccagagtttactcaaactcatgtccgttgagtcagtgatgacattcaaccatctcatcctctgtcgtccccttctcctcctgccttcaatttttcccagcatcggggtcttttcaaatgagtcagctctttgcctcaggtagccaaagtattggagtttcagcttcaacatcagtccttccaatgtatattcaggactgatttcctttcctttccttggtccttcttgcagtccaagggactctcaagagtcttctccaacaccacagttcaaaagcatcaattctttggcactcagctttctttatagtccaactctcaaatccatacatgattactggaaaaaccatagccttgactagatggacctttgtcagcaaaggtctctgcttttaaatacactgtctaggttggtcataacttttcttccaaggagtaagcgtcttttaatttcatgactgcagtcaccatctgcagtgattttggagcctgccaaaaataaagtctgtcactgtttccactgttagaaatactagaccatcttatttgtctcctgagaatactgtatgcaggacaaggaacaacagttagaactggacacagaacaacagactgattcaaaattgggaaaggaagtacgtcaaagctgtatactgtcaccctgcttatttaactcatatgcagagtacatcatgcaaaagactgggctggatgaatcatgaactggaattaagactgccagaagaagtatcaacaacctcagatatgcagatgatactaccctaatggcagaaagcaaagaggaactaaagaacttctaaatgaaggtgaaaaaggagagtgaaaaagctgacttaaaactcaacattcaaaaaactaagatcatggccatctagtcccaacactttgtggcaaatagatgggggaaaagtgttaattaacagtgacagatttcattttcttgggctccaaagtcactgtggacagtgactgcagccacaaaattcaaagatgcttggtccttggaagaaaagctatgacaaacctagacagtatattaaaaagcagagacatcactttatcgacaaaaatctatatagtcaaagttatggtttttctagtagtcatgtacagatatgagagttggaccataaagaaggctgagcaccaaagaattgatgctttcgaactttaatgctggagaagactctgaagagtctcttggactacaaggagatcaaactgtcaatcctaaaggaaattaaccctgaatattcattggaaggattgatgttgaagttgaagtgccaatactctgggccccctgatgcgaagagctgactcattggaaaagaccctgatgccaggaaagactgagagcaggagaagggggagacagaggttgagatggttggatggcatcaccgactcagtggacatgagtttgagcaaactctgggagatagtgaaggacaaggaagcctggcatgctgcagttcacagggtcacaaagagctggacaagatttagtgactgaacaatgacaacagcaacatggatgcacctagcaattgttacactaagtgaagtctttagaaaaagacaaataccatcacttatatgtggaatctaaaatatgacacaaatgaacttattcagagaacaggaccagactcacagatagaaaacaaacttatggttaccaaaggagaaagggtaggaagggataaactaggagtttgggatttgcagatacaaatcactacatccaaaataaacaacaaggtcctacttatggcacagggaactatattcagtatcctgaataatctacaatggaaaaggatatgatggaatcattttgctgtaccagaaactaacacagcagtgtaattcaatttaaaaaaaataaagtttttcatatctaccttcaaaagaagtctgtatttgttatctcctttgtaaacagaaggaaaaaaacttttcattttaagcaaagattttatgaattattactaaagaaaattacatgttaaatgttacatatatacagaaaccaaaaattatggtctagccctagtaggcattttagagttgaatttttactaccaacagctgctgcttattaaatcaaaaggttagggcttttggttttagatagcaagctaaaccttaaccacatttttcttccttcccagcatcccacttgaaatggcagaattctagccaaaagaaaaacaaaaaaacaggactggaaatgttaagaaagtaccaacagataagaaattctgaggaatcttgagaaacagcagttgggattatactgagaaagaaatcacagccaaggaagagagcccaactcactagcaatataagatggaaaatttctgagtaaatcatcaaatacaaaaggcaggagtggaccatgagaaagactcctgtggggagcttataataaggacaaagagtaacaatgagagcagagctttagtgactccaaatcttcaccacagacgttaggtgaagacagcaaacaaggcagctgtgctgtgataaccatgtacatgtcccagcctgccttcttatcctcagtttatgcatcctgtaagaaagcttgcatgcatataagcctgcatcctgtaagaaaggctgcaaaactgtcagtcagattctggttaaagtgagacgtctactgaaaaaaaaagagacatacaatgcacaggaaaccagtgtcagctaccttctttaactgatatagtcctttattaaaaatttttaatgtttagataagaatcacatcataatataagaaaaaaaaatcagcaatgtaaagagagggacctagatgaacaaacagaacaacaagaaaagataaatcacagaaaggaacagaactctgaagaaaaaacacaaactcattatccttgtagaaagtaaagaaaatattacatgtgtaacacaaaaataaacttccacaaaaaagaggcagagagtatgaaaagacattaaaaagtaaaatataacagaaaatcaaatagaatgaaaacaaaatgtgtacagtaaaaacaaagtcagtcatttcaagatataactgacaaattattagaatatatagcataaagatatagaaattatgattaagatatagaaaaatgttaagggacacaaaggataaacccatggaagtaaaaaatttctctgaaaagtacaccagaaggagaaatgaaataatgtagaaaaaagaaataaagaaaactttcctgaatgaaagaagtaagtgggtgttctgtttgaaagacctgaggtactaagcacacacatacacacatatacacacatctcccagtgaaatttcaaaaattcagggattaaaagaaaattctaaaagcttccagagagaaaaggcaggttattatatacagaggaataagtatcaaactaacattagaccttttatcagtaataaagaatgctagaatacaactaagcaattaacttaaaatttttcttggaaatgaagatatggaactaaaaattctatttcctattaaactagcaatcccaatagtgagggcaaaataaaggaatttttggaccagcaaatatattaaagtttatactgatgactgcatctgaaaaaattctttgaggagctagtccaactaaacaaaaatgaatccaacaaaaagaacgacatgggatagaagaaacagtggcagtgattcagtgacagtgaagtcactcagtcgtggcagattctttgcgaccctgtggactgtgtccatgggattctccaggcaagagtactgtagtgggttgccatttccttctccaggggatcttcccgatccaggatcgaacccgggtctcccgcactgcaggcaggtgttttaccatgtgagccaccagggaagtctacacatgtgatatatgacacaggaaaagaaaagggagcttgaaaggaaataaaggtccattgggtcttaagcactgtgtataagacattttggaatgaaaaagttttaataatgtagaacattttttcctctgtaagtccaatcacaacacttgaatttatatagtgccccttccccctctgtcatatttggatgcttagaattttgatcctaatgttttccttcagtcaataataaatttcctcaagataatttgattaccacctctcacctctagatttctcatgtctcgctttcaaacgggtttcaatatgggccttcatttggtaaacttcaaggcaaaaacatctgataatattttattttatcatcatatgaaagttagggggatataaactgcttggttcatagacattttccttgagtatttttaaagtttactactgtcattcactttcattcactttgctgttgaactgatacctagctagctatcttgttccctacagatcaccaactttttctgaaatctttaagaatttgctttacatctttaacattcctaattttactttaataaatgtgtcttaagtacgtgttctcccttatttttcccacttagcatactataaaccctttcaccaatctgaagccttttatcttttctgaattctaggaaacttatctcttcaattatctttatttcttcaattatttcatcttcttgaaatttcatttttgtcttctcctgaaattgctgttaagatgttggtacttgcacaattcttctctatatcttttcctttcccatatatatgagtgtctcatttcaaattctttccccatttatgttattactatttactgagaattctctgtgctaattagtaggtctgttggctatctattttaaatataaagtagtgcgcacctgtcaatcccaaacttctaatctatccctcccccatgacactggctctctgataaccaaaaattggttctctaagtctgtgagtgtgtttctgtttcataaataagtgcaagatactggagtgggttgccattgccttctgtttgcatattaaaaagcagacattactttgtcaacaaaggtccatctagtcaagcctatggtttttccagtggtcatgtatggatttgagagttggactgggaagaaagctgagcaccgaagaattgatgcttttgaactgtggtgttggagaagactcttgagagtcccttggactgcaaggagatccaaccagtccatcctaaaggagatcagtcctgggatttctttggaaggactgatgctaaagctgaaattccaatactttggccacctcatgggaagagttgactcattggaaaagactcatgctgggagggattgggggcatgaggagaaggggatgacagaggatgaaatggctggatggcatcaccgactcgatggacatgagtttgagtgaactggagttggtgatggacagggaggcctggcgtgctattgttcatggggtcgcaaagagtcagacacaaccgagcgactgaactgaactgaactgaatggtagtatccacaggaggggcaaaggacagaaaatctgcaacatataatattttagagcatttcagattcaactgctaaaaagtgactgaatgccaggaactttagccattcttgaaaaatggactcacagagtaaaattaatcaaacagatcagccaacaagatcgtatgttagtcaggaacacattttggaaggacacttgtctgcgacaatagagaataagaattgtacaacatacaactattattgccaatctgttatttttatagtttttccaagaaattacaatgataatcattcaactctactatttttttgttagcatctttaaaacttgaaatagaactgataaaagggaaatccagtaaaatattttatctgccaggctgactcacatttttttttcccctttgatttacctaataggagagtaccagaatttgtaatacaaggaaaccttacagggaggataaaaacataaaaagttatttcaatttctgaggagatactcttttgccttcatgaactaatctgaattctatttttgcttcatgatccaatgcacctacattttcattattattgctttaagacaggaaaaaataatttttagaattgacacagtaatatgagcttcccttgtggctcagatggtaaagaatctggctgcaatgcaggagacctgggttcaatccctgtgttgggaagatcccctggagaagggaatggctacccactccagtattctggcctggagaattccatagacagaggagcctggcagcgttgaaagaggcggacacaactgagtgactttcacagaaatacaaagtttaacaaaaacaaatttccacaaattctctgttagaatattttcagcttcaagttacaggaaatctgaataattataaattagttcataaaataaatttttgcaaatagatagttccagaatggtttcagcaattcaaccaaataataatgctaggttgtcattcttagaattctcttggctttccattctttccaagtcgccagtaccagctctaagcatcacattgttttatagagtattcaaaccagagagggaaaggactctttcggcatttgttttcttctggaaaatagtttttgcaagtgtcctcctggagcctttccttgtgctcattggccagaactgtatcacacggaaggcagggaaaatgaaataatctggcaaaggataaaaatgactattttagaataatcactattcaactcctgggattggacaacttgtcagtaaacaaaatcatggtttggttaacaagagctaatgattatagggtagcaactgacagtgtctgccacattcttttcttctaaatctgggacatctaaagttttgaatgagatcctactcagtttcagtagtagctccagtctaaaacttctactatttgctttcattgaaattgatttactgtgttagttttaggtgtacagcacagcgattcttttttctgcagattatattccattatatgctgtgcactcagtcctgttcaactctttgtgagttcatggacaacagcctaccaggctaccctgaccatgggatttttcaggcacgaatactggagtggctcaccatttccttctccaggtagtccattatgggttattataacatattgggtacaattccttgtgttatagagtaaatccctgttgcttatgtgtttataaacagtagtttgcatctgttaatcccttattcataatttgtccctccttcctcctctctttaggtaaccagaagttcattttctatatatattcatttgtattatttttttagattccacatacaagggatattatatagtatttgtcttcttctaacaagtcactaatcattatattctgtaagtccatccatgttgctgcaaatggcagtatttcattcttattttatggctgagaggagcctggtaagctacatatagtccatggggaagcaaagagtcggagatgactgagcaactaacccacaaaaatatttatacacacacagacacagtgagccatcttcttaggtcaactgtctgttgacaggcacttgggttaccttcatgtcttggctattataaacagtgttgctattagcatcagggttcatgtatccttgcaaattaaagcttttactttttccaaatatatacccaggagtggaatagctgtatcatatgatagttctatctttggcttttaaagtaacctccatattgttttacatagtggctgcattgatttacatttataccatatccctttcctccacatcccctccaacatttgctatttgtatacatattgatgatagctattctgacaggtgtgaaccaataccacactgtggtttttgatttgcatttctctaataattagcaatgctgtgaatcgttttgggcttccctggtggctcagatggtaaagaatcaggagacttgggtttgatcctgggttgggaagatccccagaagacggaaatggctactcatgtcagtattcttgcttggagaactccacggatagaggagcctggcaggttacagtgatggggccacagagtcagacacaactgactaacagccagttagccatcagaatgtcttctttggaaaagtttctattcaggtcttctgcccactttttgattgggttgtttttcgacactgagttgtatgagttgtttgcacattttagatattaatttcttgttagctgcatcacttgtaaatgtgttctctcattccatagatcatctttgcattttgttgaccatttcctttgttgtgcaaaaccttttaaaatttcattcagttcagttgctcagtcgtgtccaactctttgcaaccccatgaatcgcagcatgccaggcctgcctgtccatcaccaactcccggagttcacccaaactcacgtccatcgagtcggtgatgccatccagccatctcatcctctgtcgtccccttctcctcccgccctcaatccctcccagcatcagggtcttttccaatgagtcaacacttcgcatgaggtggccaaagtattggagtttcagctttagcatcagtccttccaatgaacacccattaggccccattttgctttcatttcttttgccttgagagtaatctaagaaaatactgctaagatgtatgtcagtgttgcacctatgtcttctaggagttttatggtgtcatcatacatttaggtctttaaaccattttgagtttctttctttttttttccacaaataatttactataatcacccacatcattaagtacacccacattatgcttactgtgaaaatggctttccttaatgcagattcaattcaggaaaaatataaattactgagagtttatttctgtatatggatgaacttgagtttatttttggacaagggaatgttctaatttcattgttttacacatagctgtccagttttcccaataccacttgttgaaaagactgtcttttctccactgtatattcttgcctcctttgttgtagattaactgaccataagtatgtgggtttatttctggacttccttttctgttctgttgatctgttctgtgtgaataccatgctgttttgattactgcactttgtagtatagtctgaagtctggaagggttatacttccagctttgtccttctttctcaggattactttggcaatgctgggtcttctgcagttccacataaatttttggattttattaaaactattattttacctgaacctatgtttctaccactcattatttgctttctgtaaaattccaactggcttttgacacccaacaatgtagtatttattaatctatctcaattacatgaagttacaaagaattcatctcatgaatcaaacataactggttagctactggtggataaagttgtttctggatttcttaactcttgcaaacaatgtcacattaagtatctctgtataacttacttttatgcatcagtacatatctgagcagggtaaattctggaaaaaaatgcttggtcaaagagtatatgtatattttattagataaaaacattcaatgagtgatcctttaatttacatttaaaaaattatgaatggagctgtgcttatacaaaagtaaatctgtcagctacctgaattgtatttttctttgaattatctagttctatcatttgtcactgttctaatagaaaattattccttttttaaaattgatttgtaagagtcttttgtttaaaaagtaggacattaacctttgtctcagttcccagtttgtcatttatcatttgatatttaaatatttttatatatataatttttaatttgcaaaaaatcaaactaagtctctttcttttttttttaacagcttctgggttttatgtcatggttggaaaggcttctctatcctgaattattaaaagcaactagacttatatttttattaaaacttgagtctacccagaattttttttctgatatatagacatcaattcgagtcaggattttgctttttgcttgtcaggtcttaagtgacatctcagtgtcatttattgcataatctattttccttctctgactggcgatgcccctttaccatatactaaattctcatatgtaattaggtatattttatagtgtctgctgcattccattccattaatctgcacaaaattgtagctttctaaatactcggtaatattatattatctttcatttttgaaactgtctttagtgtttttgaatgcttctttttacagatgaacatgtactatcaaatgacctgttttattttttcacttttggctgcactggttctttgttgtttgatgcagcctttctctagctatggcaagtggtggctactctccattgtggtgcacaggtttctcaggaaagtcgcttctcttgctgtggagcacaggctctaggagcacgggcttcagcagctgtagcacacaggctcagcagttgtggcttgcaggccctagagcatgggctcaatagttgtggcacataggcttagctgctctcagcatgtggaatcttcccagaccaaggactgagcccatgtcccctacactggcaggctgattcttatccactgctccatcagggaagtcccatatgacctaaattttatattgaaaatatgaaatacctctataagcttataactagcaaaaacacccctggcaaaggtgaaagggggaagttatggaaagttattaccaccagtaatgttgagaagaaaaaagtacataatccagtttatcagaataatggcacacctaatacaaaagatgttaaacagaaagcaatgaagtctagttacattaaaaataggcactcccatctcctagctgagtaactaatctgtgtaaatgacagcaaaacattagtttcagagtcttctctatactgccgaactggccttatttagttaactgttaagagtaaaagggtcaaaaatataggaacttacacacacacacacacacacacacacacacacacacacaaagattaaagaaaataagcacattctcaggctgaaaatcagtagattttgcatttaaagttttcatgaaaatgtttatagataaatcaaatcttgcagacatgactaacacagccctcattttttattttcacagcctgataacggcaaaaaggaacaaaatttaactgtcaaaattctagagctagatgatgagcctttacgatcaactggtccaatcccctgttttcagatgaacaatcaggtccagagaaattacacaattttgccaaagctacagaaggatgagtggcagacccagatgaagaaagatcagatcctctgattctgaattcactattctttcaattataacaagctgccactatggttaggacagaatggtataaacactggcagatgtgggaaaatagagttgacagaatttaaggaacacaacaagtaaacacactaattactatagaataggaactagatgtttgtaagagttctgtatcatcaatgccctatttagtatctggcaaatgttgaagacacaatatatgtttgttaccttgaattaaaaaaaaagatataagaaagtagttctattattgtcagctgagtttctagagcaaaccataaagttctggttgtgtgacagatcttctaaacataattttcaattagtgttaaacagagcttacatatgggaagtctgctaaaccccctgtgttcacagacctattgccaaaagttatgcagaaataaactcaaatttttgatgtgctgaattttgatgtaattatgtatgtgttagacacaataccagtaaatccttttttcctaagcagctgtcaatccactgatttaaattgtaatttccttctaaagaaaacataaaactgttatactctagttaaaaaaattagagttaaaaaaaaagagttgatgtttctttagatcttaaaatgctaaatctgagttaattcatttaagtaatcataaatagcaatcatttacgattttacagtatctgacacagtaagaaattataacaagaagcagtaattttacaactagatatactatctctaactggtggtctcaacagttcatagaaatttcttctatgagtgtaaacagtccaatttgaagctcatataaaagcagttttaatcagataactcacattactgaatcacagaaacatagcaattatgtgttaagtccatctcaaattatactaattaactataataaaacaggtttagaagaacagttaataaatagaatgtttaaataaactacagagcatccatacaataaaattggtattttctaagaatatttaataatatagaagtttaaatagtactgtgtcttgtccttaaaaggactttgaatggcttacaaaataagtaattatttaacaagataaaattaaaatttaaacagacgtttaaaaaccagctaaaagtaactctacgggaggacaatacatacaccatagttctgacatgaggtcttctaattggtctaacttaagccagtgaaaaaaattttagactaagagtactgaaaagattgaatactctttgagaaatcctgaataaagtctgtgtatttcagtaggtttttttttttttttttgaggttctgaaaagcagagtcaagattttactgccagatgaatattcagaatcatgtaaacaactaaagttaaaacaatatgctctaatccctaacctgggtttgaggagtttcaggagacaatgctttataagctaagatctgaaagatgagtgaaaatcagctacactttggaggtaggaggaaagagtgacttaggtagggagaacactatgggaaaaacctcaaaggcatgaaaaaatatgccaccgataattacgattcagtggtcatgaaaaaaagaattggtggcaaggtcgagggtgaatatcaagaatggggaactaactaagctgaggcatattataaaagaatctgtgaattaggctgagtttagacttaatctgagggcaaagaagaacaattaaaaaaaacatcttaagcaatggagagaaaaatgatcaggtttatatttttaaaagattttctgggaatcctggggtggtctagtgataaggactttcagctttcattgctgggggtctgggttcgatccctggttcaggaactaagatcccacaagctgtgtcacatggccaaaaataagggtattttcttatcttagtagtactaatcaaaaggtaaggtgttaatctacttctttttcttccctatgcacaactctaagatccatgaagttagagctcttagttttatccctagtgcttagattatctggcacctagaacgtgatcaaaagatatttgttgaataaatgttaaagtatacggttctgtacttaattggtaacacagaaacagttgcattctgctcaaagtgtgaagaatgggttaggggagggatgggatacacaggaagaagaatactagagacagaggtcaagcaagtgttggcagtccaaactagtgaaacagcaatgagaacagagagaagatggaggtaaaactaatatgacttgattactggatagatcaatgaacctgtaggcagtactgacatacacttgtgaaaaccgaggtacccaacaataacatcagctcaaactagcgtcagtccacttctactcctagagtggctacaaatgagataccatttcacttaacatataatttgggtcacttacagacgtgcaaaataaggcttaacattcagtaacctgtccaagcttacttgattaaggactgagataggctctggagagctagaagagtgaatcttcttaatcctggccactatttagaagtccctcttgagggaggagtggacgatgcaccaggaagacagacaaagagagagaaaaaaggggacttaaagaagggagcagagaaggggaaaatgggaaggaagagagaggagtaaaggaagaagagatggaaagaagtgacctaaggaaaggagaaagggagagatggaaaaaacaagaaagaaaaatgaaaagaaagtaatttcagtctcactctaatatgccagcagagccactgaggtttcacaactccaagtaataatggcaacagttttaggcaggttctaaccagatgctcaactctgccataaaaatcttcagttaaaggatgtacacatagcctgttgtacacataacctttggacaatgcaatttacaggcatactgtcaatattaaacacttggaaaaagtacatttagacaaaagaatgctattttcaaaactttaattagatcaaaaccctagcattcattttcagcaacatggatggacctagagattatcatttgaactgaagtaaatcagacagagaaagaaaaaaatcataagatatcatttacatgtggaacctgaaatatgacacaaacaaacttatttacaaaatggaaacaggctcacagacaaaacaaactaatggttaccaaagcggaaaggatggggatggagggataaaggggtcagtagataccaattactattatgtaaaacagataaataacaaggtcttactgtatactacagaaaactttacatttagtataataaactacaatggaaaagaacccgaaaaagagcatatatacacacacataaatatgtatacacacatactcagttcagttcactcgctcagttgtgtgtgactctgcaaccccagggactgcagctagtttctatagtatgtgtgtatgcctggcaagaggtggcaagaagatgcacatactatagaaaattaaatcaactgtatgccagaaactaacagaacactgtaaatcaactacacttcaattaaaacaacaaaaaaacccttagcattaaacctttcgataatcttctatattttttaggggaaaaaaaaacaaatttcttgtatttgtattgtacaaggcactgaataatcagacttaactatttctccaacctcacttcacgtaacttgtctcacctttgatatgcactagctccctctgctttgggaacacattaaattctttcctgctttgaaatctttgtacatgcacttctctcagttcgtaacacagttcttcctaattctctgtttcttgtctgaaatcttaaagattgcctcctcggaaacagtttcccaacctattctatctaagtgggtcctctcatgttactcactattatagcattcattttcttcacagtacttagaaagcaagcgtaggtctctcttcactaaaatgagttctttgagagaaggtatcttatcctctagtccacagctatgaacctaaacacacttggcatacataaggcactgaaatatattgggagaaagggagggagaaggccaaacttcgatgttagtagatgatcaacgattactattaaattaacaaaaaaacttgcttgcactgtgggataattcaccacaaagcaataaaaaaattaaagaacccatagcaatattggtgattttcattttataaaagttgattaaagcagtaattaagcaataaatccacttatcttttggtaataaaaccataatgacaaaaatataccacaatttaatataagtttaaaaacagaactgtcagtcactcagtggtgtctgactctttgcaaccccatggactacagcacaccaggctcctctgttcatgggacttcccaggcaagaatactagagtgggttgccattcccttcgccagggacagaatataaaattgtgctaaattttataaaataaataagcttaaaaagactagaaggaaatacattaataaaattttaacagattatgtctgaatggtttgatatagtttcttttttacatctttctgtatttttcaaattctctacaacaagcatattattactcttataatcaaaacaaaattgaacaaaaagaacaattatggccattcattgctggccttaaagttagccatagcaatgaatgaaatatattgaccaattctgcaaattactaaataataataattcacttttaaaatattcaaatgatagtcattaaagcctatttattgtcatattgcatttttttttgctcagtctttaccgctatcacttcgccattttttccttttaatcttggggagtactttagtatggtcaagaaaaaaaaaaaaaaacctttgcacctcaaaaaaacaaacaaaaacccttctttgcacctcagcttctaaaccctggctgtatcattatctagttgtatattaataagatagtacttcactaagtttaatttttctcatctagtaaatgagactaatactaccaattagaactatttatgaagttccatgcttagtaactggcatttagggtctaaataaagaatagccattaggaaatcaactctgaatattcatcagaaggactgatgctgaagctgaagctccaatatttagccacctactgtgaagagctgactcactggaaaagaccctgatggtcaaaagatcgagggcagcagaagcaggtggcagagaatgagatggctggatagcatcatcgactcaatggacatgagtttcagcagactctgagagagagtgaaggacagggatggcaagctgcaattcatggggttgcaacgagttggacacgacttaccaactgatcaactacaatccatcagaacattacttactagatacataataagcactctgagagaccaggatcatctagttccaatgtaccttcagtctagcatgagccagcatgtagaagtttttaacacacacctatcgaatcaattactattttcactacctgtttttcaggcagagctgcgtcagaattgtagggaattattattccatctttccagtaattttaatggaaaactagattaagttttaaaagctagaggaaatcaaaaattaaatcatatacctccacattatcctatggtagtagaaaataaatgagtaaacaagatagaaaattttaaacatgataaataatgttattagtcatttcttagaatatttctttctatggaatttcagtccatggaattctccaggccagaatactgtagtgggtagctgttcccttctccaggggatcttcctaacccaggtctcccgaactgcaagcagattctttaccagctgagccacaagggaagcccacttctttccacagttttacattatatcagcacctactgacttcttgttatagtagatgaagaattttactaccttgatgctatcttcccactaaattttatcccaatttttggttaaactgattttagcttttgcattattatgaagaggggaatactgctcattgtagagccaaaaactgtactatgatgaggtctgctttttaaaaaatattttttttcctactgtgttcctatcctcttacatcagatattatttactgattaataccttttagattccaattgttcaaacatctatctagtctacttttatcttttatctacttttagtcaacctcactttttggtgaggagaggtctattttcctatgttctcctgctccaatatgaactggttgttcatacatttgttgtgcaggtatcatgttgggatggcccttcattgctttcctgtgttagattctcttttcctcagttctcagaatgttttcaactacttttactcccttttgttagtatatatgacgtactaactttcaaacaagagtgcataaaagatgatcattttttaaatcttgtgtggcagacactgttaactgcatgatccaatagccatttccaaatcccttactctgtatactatacaaaggctggaaaagctaaatgcttggctttcccagactctcctgaagccacgtttcacagttctagtcaatgaaatgtcagtacggagctttctgggcacatttggctctgcttccttttttcctatttggaaggaaggcatgatgttagaggtgtgtcagtcaacttgccatcatgaggttcagttcagttcagtcactcagttgtgtccgactctttgcgactccatgaatcgcagcacgccaggcccccctgtccatcaccaactccaggagttcactcaaactcacgtccatcgagtcagtgatgccatccagccatctcatcctctgtcgtccccttctcctcctgctcccaatccctcccaccatcagagtcttttccagtgagtcagctcttcacatgaggtggccaaagtactggagtttcagctttagcattagtcctttcccaggactgatctcttttagaatggactggttggatctccttgtagtcaaggtattctcaaaagtcttctccaacactacagttcaaaagcatcaattctctggtgctcagctttctttatagtccaactctcacatccacacatgaccactggaaaaaccttagccttgactagacggacctttgttggcaaagtaatgtctctgcttttcaatatgctacctaggttggtcgtaactttccttccaaggaggaattgcatggctgcaatcaccatctgcagtgattttggagcccaaacaaataaaagtctgacactgtttccacatctatttcccatgaagtgatgggaccagatgccatgatcttccttttctgaatgttgagctttaagccaacttttccactctcctctttcatcaagaggctttttagttcctcttcactttctgccataagggtggtgtcatctgcatagctgaggttattgagatttcttccggcaatcttgattccagcttgtgcttcttccagcccagcgtttctcatgatgtactctgcatagaagttaaataagcagggtgacaatatacagccttgacatactccttttcctatttggaacaagcctgtttttccatgtccagttctaactgttgcttcctgacctacatataggtttctcaagaggcaggtcaggtggtccggtattcccatctctttcagaattttccacagtttattgtgatccacacagtcaaaggctttggcatagtcaataaaccagttaaaaacagaaaaatatatgaaaaagaacctgagagcatttatgacatttcttaagtcactacatcagtcccagattatctacatctggatttctcatcctgtgagacaaaagattcctgatttgtttaagccattctcttggttttctattacgtgtaaacacacacataccccactgataaacctggtatatctgaaaataccatttcttccctcatttccttggtgtttggctagaaatagaattccaggttgatgataattttccctcagaatttttaagaccttgtttccccctttagcttccaacgttgctgaaaatttctagcattctaagacctgtttctttgaatgtgacctcattttacactggtagcttttcagatattctttttatgactgatatgtaaaattccacatgagcaatgatgtgtcatctgactgagaagggtttatttttttaattcaaagtactgacatccaaaaggggccatttataatctgtagaccaatacttttcagtttagggaaattttctgttagtccttcattttataatctagtctcgcacattctccttgctctccacagttagagaaactcattagtttaacaccagacctcttacactgattttctaaggtccttatttctccaatttctaccatctctgtctctttgtctatttctcgggagatgtcttactactcttctactttttaacaaaatttatttccaaaaggtctgtcttagtctctgatctttcactgtatcctattattgttttatggatgcaatatccttttctcttagaaaactgatcttgatcattaactgacagttcatttacagtgaagaaataaaatttaactgaaaatagcatgtatacaacggggaacaccgtaggggaactgggccatgaaagaaaccactgtcctgggggctagccagaaagatcagacatctcagtggaggccggtaccccaaacaacagtatctggaaatcttttctatgacaccacatatttcctctagagaaggtgatactaaacttttgttggagacacatgcctagaatcctaagagcagggaaagggttagaagttccactattcagtacatggacttaattctcctattttacatcctgttctctctgccttcacagagcctatatttctccaggatatgaaattctagcctctgcccaacaggaagtatgggagaaagatcctgagggtcaaactgcctcgcatgtacttttttattatggtgttatatttttttaaaaaaattcttcctaaatataagcaactattatatatatataataaatagtaaaaggaaaagcaaaaacagatagataaaaggaaaagcaagctaatctaatttcttaccctaatgctctaattaggcactttaaagcactgagtcttaaacaaatatcattattctgtgtatactaaatgcaggcaaagtgactactaagcagggtaactatgtaagttatccaaaataagaaagttttgagaatgaatgggacactattaataattatgtataaactgggattatttcaggcaaactaatcaccttattatcagtagaataactttctggatgctgagagtataaagttataaggcattaccaatgaacaatgtgaagtcttccctcaagaacaaagacatactcgactatatgtgtctaacatataagtcaccttagtgaaaatggaaggtggaaagaactagcaaatacaggatcatacagttttcaaaaggtattaattcttataatcacccttaacaagcacacatataaataatccctttacaaatttgcatattgtctttctgttaaagggaatcatcataataataattcatatagcatttttaaacaggttgaactaaataatttagctggtagagactttttttcctcttattcagaattactttgattaaacaaatgggaaaagcattaagaatggttagaaagaaaagctaatgggttatagtcttctatctgaagtaactaagacatgagagaagaatcactaattgcctttacccattccagagtctttcttggtaccatctgatattatgtctacatgatcagaatccacatcataactaaagaaatcattcaaataggtcttcgatcgctggccaccaaatacatataagcaacgatttttctgtaaaataaaaaaaaaaaagggaaagaaggaaaaaaagtcattttcacgaagaattcagaataattcttttaaaatttaaacgtctagagaagtaatttatgagcgattccatgcaatgaagtacttactgtactggtataaagtggaaaaggaagctctgcatatactgctaacggataatcactaggatatcctactgaagtaaaaaaaaaaaaaacccagtaatgcatatagggtgccacctctgtgtatggaaggagaagaaggaatgtgtgctgtgtgtttctctcttcaaaaaaaaaacaaaggaaactagcaataacataattagctacagggaaaggaacagaacagaaagacagggaaaataactgtatctctccaacagcataatgacagttttgccttgagaactatgtaaatgtttttccttaattagaaaataaaagtaaaagaaaaaataatgtctgaaatttggaaaaaaaaaaaaaagaaagaaacaagtaagcctatatacaaaacctatatacaaagatacaattggacagagacacatgatcatgcagacaagtagtagtatttctagtgattttaattctcgctttttgactacccatccctagtgggctatatcctaaacagaaaaataatcagaaagaaatcttaaatggcattcagtgattctattagttttgctatccagtaagctgttttagaaagagcaagtaacatatcatcatcaggaagtaggattttaaccataaagtttcacagaaacaaagatataaaattttaaattctataatcttaaatttaacttggatatcagtataaactcatgatttttttttctcttactaaaaaagacatatgtatacatgtgtgtgtatatatgcaaaggtatactgggacatgggtactcccacaggtcaaagacggagaaaaattagggaatcaaaaagaataatgacagcaagttaaatacatcaaatacataaaaatccataagtttataataatacttatgaaaaactcattggtaaattttggagcctcagctcattaaaatgaaaagacaatagaggaaaagaatcaaaatatttatattacctatcctgtgtggtttacatattagagtagccaattagttaatgaggataagtttttatagaagaatcagttaataaataaagaaaaaggtaattagaaaaatgaccactcatcaaaccctactaaaatctagtctatgactatagactatagtgactgctaaaaccattagataaaaagttgacaggaaacttaataactgatcaatcaggttgataacacctaaacccacctgaacaattttaacaccaccaaagttgtgacagctagacattaaatgctctttatattttataatcggatcagctgtgaagtatacttgcaagtccccttttggcccacccaaaaaaggagaggaatctaaaattaaccctccaaatctaaataccagctcacaggaaatatggaaaacagaggatcatgttaaatgacactataataaaaatcagtcaaactgagaacatgggaaactccaaagcacacatgaggctttcttaaacaaataagcagtatacagaggggggcaaaaaaaggaagggggagtattctcatggattaaaagaaatttaagagctattaacaaccaaatgtaatacacagaacttttctggatcctgactttataaaccaactatgaaaagtatttttcagcatggcaggggaaaaatgagtgcagtattaaatgatataaagaaactgcttttactttggttgggtttcataaccatacttggagaaggcaatggcaccccattccagtactcttgcctggaaaatcccatggacggaggagcctggtgggctgcagtccatggggtcgctaagagtcggacatgactgagcaacttcaccttcacttttcactttcatgcattggagaaggaaatggcaacccactccagtgttcttgcctggagaatcccagggacgggggagcctggtgggctaccgtctatggggttgcagagtcggacatgactgaagtgacttagcagcagcagcataaccatactacaattatgttttaaaaaaatctttatgttagtgacacactatggtatttatagttgtaatgatataatgtctggaatttgctttaaaatacccaacacaataaaatttaagaatagacacagaataatagtaattgttgaaactggtaaataagtacataggaatttattatactgttctgtccactttggtatatgttaaacatgtttcacagtatatttttaaagttttgttcatagcaggagcccatgttctcattataacacttgaaaaaattaaatgtctgtatgctggtttttgctgataaattctaattccaattctataaagtcaattcttaattctctgcacttaatggagagtaacaaaagagaaaataagaacagataataaaatcaacattccagatactaagagaaaacagtaagtaaaaagctatgtaagaaagagaaatagctacaacatataacagtgaagtcagtcataaaaatgctgagataactacttaggaattattaggctgataggaaatataattagcaaacagttcaccaataaaggtagttttgtttttccttattattgtcaacacttattcatttctaatgaaaagttttgctctcttaatgaagaattagattgcatcacttcttttcctattgagagatacatgacaaaataacataagacaatgtacagaatattcttactgagtggaagagcatgcagtgtcctatccgagattggatgtcctcaggaccagcattacaggagtcctctcgaagaagtttccaggtttgacattgacagttgaaagcaaacagtccactgaattgtggttcactggctctgctgtcgtctacactgccattacatgtcaaaatcctaccaccaaaggtgtagatcatgtgtttttccgagtccatacacatctacagaacaaggcaacaggttgaatagctttagactgttcctgtcgcatgagttaaaatctaaccactgtatgcaattttagaatctaaaaaaactgaatattatcttaataataccaaataccatccctgattattatatgcacttattaatttatattaaaatcctgctctgctcactacatggaagagattcaggatcgatttcaaaataggttgaaatcgatccaggtttccttttttttttccccagtgagaataaaatatgttgggttaaggagttttacgctttctcaagttgcataatttttaccaaatcaaccaaaaataatttagttactgatttaatactgaacatattctgtgggtaaaccgtgatcatatcctccttataaaaactcccttttctccattctagtacgtgcatgctaagttgcttcagtagtgtccaactctttgagaccttatggactgtagctcgccaggctcctttgtccatgggattctccaggcaagaatactcgattggattgccatgccctcctccaggggatcttcccgacccagggattgaactcacatctcttatgtctcctgcattggcagggcgggttttttagcactagtgccacctgagaagccctttccattctaagcaagcattctattcctcttgctaccatttaataaaagaaaagatatgtgaataagagtgacgtagcttatatcattttgcatttattttacaaaattctcccagttatgtttttaccaaaacaaacatacgaaaagacatttgcagcaatccatctttgggctgacttctatgaatcttgcctccttttaacacaatatgtaaatttaattttctttgaggtacgtcaagcaattcatcttcaaaagccaaccctgactcttccattctttcaactcaagattgtttttacaaaaatatctctgggaaaacagccactggtcagaggacaataaataagaaacaaattctatttcaaagaatacataagtacaagttggtaatcagagactgaatacaagtggcatttatgcttaagtaataaactgtatacataaaacatatattttttgttgttgctaaagcacaaatactaggcattatatgttcagttctctcctcctatcaaactacttctgctgtttatctatttctggtattgtttttaaccaaaaaactaaataattataaagcttattttaaaattagtatttcatcttaaaaagaaaggattctagtctagcaccttcaaatctttacctaccactaaagattcactcacttgccatttcccaggtttctggcagacttctataaattaagatgaaaatctgtaattcccagggatgaaatcttggggagcacagttcaaaaactatgatgtcaaagttttcatgtccctggcactcagaagaaaagtgatcctatgctttaatcttaaatgattatatcatgaaaagcaatccattatatccaagcaatccaactatatcatgaaaagcaatccatacattgctgaaggacacatataatgtgagcgtattttcattttcttaaattcagagtcacactcattttgttcagtctctgttatctagcccttatggttctacttcaatatgactacaaaggacatttctctttcctttgggggatatttaactttctttttgatatggctattctcatttgttatcagagaagcataaacatctttatttggtagctctttcttgcacagcaggccaaactcaaagacagaggaaaatactgcagtagcttgatgattctttctcatatcttagaacaaacaggacacaaaatagaaataattttattcctttaacttgggtgttccctgtaagatacctagtttcaatgacggtcaattatcagataacaagttttaatcactccaggaaactttgctgttcatcagtttatggtttcctttcaatttttttatctctgaaaaatgttttgaaaatccaatggcttattcaactatgcaatccacagtatctcttccctcaagaaatcttgagtctactctgtcaggataggtatttaatttctaaaatcaaataaataatggatagccacttattcctcacacctatccccaattgctttttaaattgaaagtatcttattttactttatcacatgaacacaaggttggctagggttagggtaggttcaaaattaatttcctcctcacaaaatctgaagaaattattataaagctttctaagtagtgttgtccaacccattaccctacctcccagcaacatccaaaaatcctcatgttaaactgattcttgtgtacgttgtgcatttatgctcagtcatgtctgactttgtgaccccatggactgtagcccgccactctcctctgtccatggaattttccaggcaagaatactggagcacattgccacttgctcctacagggggtcttcctgacccatggaacaaatccacatctcttgtgtctcctgcatgggcaggtggcttctttaccactagcgccacctaggagtctgatacttattactctcaaaggtaaccagttttctctctggttataggattttctctttcttgattctgaaatatcattaaggaagtatctaggcagggatatttttcatttattctgatctttacttgttgggagccagcgtgaggaatcccacccgtgacaaggtcatgagggaggaagctgacatacgcaaggccagtgatcagacttcaggagttccccctggcatttcctgagcatccacccccaccccccaaaaaaaataatctgcctgcttttccactcttctgacattctctggaaaaagtcaattcagggctttagtcttctgcatttgaaagagtgtttcaatccaaaatctcctctgatggctttctagcctgcctgcaggactcgtgcagctgtgcatgtgattgtttgaggcctcctggccgcaggaggcacaggaagcttaaaacatcctaggaatgtaagggcttccgaggagtcaaagtcattagaatacgactgattaaaagtttcatttgttgagccaatacttgctgccaaattttcatatcctttaatatagttggtatatagaaaaataagtagtagacctggtattagcaacattagatctttgagttaagtaccttctttgttataacgaactacgcctttgttctacagagatgtaactttagcgctttaaggagatgcagattaaagaaaaacacttaggggaaacaaaattaacattcattaagaaagagagccaaaaagtgttaacaagcctcttggccaaaagataacataaatcacctgagaccttttgtatacaaaaagatatacagaaagagtctgggctgttaacactacataattttgtattacccactgatctctatgtataatcgaaagtataaaaggccttgaaggacaatagaaggggagccagtcgctggactggtttcccccgtgtctctttactttaatttcaggctgaatttctatctggggcgcggaggctcgccaagtctacttacttgccctggctgttaagacctgcgcgaaagggagcctaaggcgaggcacccttagatattcaagcgagcgccggtggcccaacgtagatggtgcaaattccttgtctggaattttattggtcttccacgtaatccaagctattcagccctctttctccacttaatcttcctactacactatttcttcctaatctaatcttatattaataaataaataagtctttcctcgctgactccgtccacccttcgaattccctggatccaccggggctggaccccggcatttactaggaatttctttcattctgaaaagtatctttcttcagttctgataattttcttcatttttaccttgagtgggtttttgtttgttttttggcttccattctctttctagaactatcaggtgcatattcgaaattcaggtccttttgtttaatttttctctcataatttcagagagaaatgtaataatttagtaaccatttagaggtgaggatgtccacattgctttttaatctatttactgagtttttaaaatttcactatcaaatctttaattgataatttttctatatatttccttttcatggacacaatggcctcctgaattgctctaatcacttaaagatgtcttcagttcacactacaagctgtttttaagtcttaatttgttgagttcagtatctcttgtctcgtagtattaaattatcttcaaatatttggatttgggcattactgttttagccttctttgtatctgagaacccctattcatctgcctgttgcatatacagtctacctaagggactgcgtagggcaagacgagacataatgctgtgaagggtgctgcagcagctctccagtgctttatctgtccagctccaatatccacactgaacacttgacctgttaataatgaccacagtccagtgctactcagtcaaactggaaaccgtccagctgtttcatgcccagttgatcatgtactgtttgccccaaaatacatactgtgagactccagttgctgctgtcttataggttgtggtttattttggttggatctaatcctacctgctttctaactcacaggaattccctcaaatattttaagttacctaagggcaatctttcttgtttttctacacaattactgacgtattctcttgtcatttcacaggatgctgggcaggaagacggtaaaagtgcatgttcaatgatccacactggcccagggagaatgtcagtaagccaagatctgcaatcttgtgactgaagttcttcctgtcatttcttgattaggtcattttacatcttccagtactttatgtcaaatccttggctcatactgtcttttctttgaaaaccctcagatactgtctcttagcactgaatgtaactgcagagaaatctgatactagttttgtttcacctctggatcattttgtctagttcccccaaaatggcttctttatctttgaaattcatgtcactaatatattatcacagttgaattttttagagttgaatgcctagggcaattttctctggctataacacatccttttacactatgtgcaataggtttccttcttgaggaaattcttgaactttatgtataactatttcttctgttccactgttttggttttcttctttaatgtgtccaataatgtgtatgttggctctcttctgcatgtcttttctgtctatactttcctaggtagctgttatatccatacttgctttctttatctgctttttgtatttcttatgacccttacccagtcttctttatgttccttgtaaactagtgaagtttacaatatttttcttcaatttcttccctgagatttaccaggcccagtttcacctgctttgattatttggccatctcatctgcattcttgtagttttcttcacagtttcaagcttcattaagtcatttaatttatgttagaatattggaatataattttcatctgctgttagcatgaaagaaagcttctgctattgtttctactttcactgttttcctttagagtacttcactaaagatctgtttactactgattacactgtctactacttattagtttttcatatttaaataacatttaaatatggttccccatatttaactgagctgaatttccctgcaccagataatataaggatgctatggaggtatgatattctttctcaagttcttcctcctctatttctaatgaattgcatggcttcttcaaaatatggagcttctgtgaagccatgttttctccaactgaatctcatctggcttagggggctctatcttgagccttgagctcccccagttccttcaatggacatgcagaacaagccactgtccctacctgtcatggtgtttccaaacctcttatgggccttgctgggcattttccacatggtgaaaagtcaaagtgaaagtcgctcagtcgtatccaactctttgtgaccccatggactatagaggccatggcattctccaggccagaatactggagtgggtagcctttcccttctccaggggatctaccgaacccagggatcgaacccaggtctctgacattgcaggtggattctctaccagatgagccacaagggaagcccaacagtactggagtgggtagcctatcccttctccagcggatcttcccgacccaggtctcctgcattgcagatggaatcttcaccagactgagctattggggaagcccccatgttacttaactgatttcctcagtagcttcaatgagttcaatttctgctctgctcatgacacttccattaagatgtacctctgctaggcttcctctgcattcacagttctccccattaaacagttgtgagcttcaatacagcttctgggtattccagttgtttctgctaaatttacaaggaattgggagttgtgggttttctttggcttctggttttgccgaatatgtgacttgtcttgtttttttgcttttttaaaaatctttttgtttggttctcatggttcctgaagaatcacacaaagcaacaacatggaaagcttcagcactaagttgccactatgtccttaggaaatctaaaagtctttgaattttaatttttttaatatgctaaaattgaaaatggcaaagtaatttttaaacatatcttcaggcctctagttttctcacgatcctctcaaattgaatgttaagtgtcaaatcttatagtgttacaaacttagagtcggttccaaatcataactttgaatttgcatgaaacagaacagaaaatgtatgctagtacattatgttaattgtccaagttcacagaagtagccactggctgagtcagcactgcaatccgggcctcttcacccccagtgtcctgttaataacatctaatgagttaaaaatgaagcattatttaacagaacctaggcttcgggggacattctatttaaccaaagtcaagagaaacataggcccacatgagcacaacatatgcgatatcctcagactacccctaagttattctttttctcaacctgtaaaaacataagcatcttttggaaaagatatttggaacaaattggaagaaaataaattgtttccctaataacgttatctgttgatgttctatttttaaaagctcagagcaagtctaagttttttagagttcttattttctatgtgaacgacactgagtatgtcagcagaaagtgcaaagctttacagagctgggttatgcacaaccagcacaagttacaaattcaacctggggagcactctcaagactaatgtttttattttccacacaccacatactcggtaggcatataagccactcctctcaccattctcctataaaatctacttgttaatataaatatggcaggaggaaagttttaaagaactaacaaaaattggtaaagaagcagtaaataaagactttggttttaatgcctagatattaggcacagattatgtcataaattctagcaccacgccccaatttctcaagtgctgatataatgctttgttcattaatagtattatagattttttaaaagtccttttcttccccataccccaaaaactttggaccatgggctgagccaagcaaaaccgcctactgaattcaaagtggttactatttagtttgaagtagtactgacctaaactgaactgatacaaaataagaatttaaaataaaaaaaagaattcaaagacagataacaatgataacagggatgatgagagctatacacatactgatatttaaatgatttatgagactgctatatgcagtcttgtttacaacatcattatatgacttctcctggtcctgaatttaaacttcatctagtacatgccaaattcttatctatcttatactgagtttgtgattatacacaaaagtgaatatattgtacttacattggaagaaacactctacatttcaaatccttgaactcattataaagtaattaaaaatttttcaggaatgtagaataaaaaatttaaaattattgttatgatttatgaataccatagaactacatggtagtagttcctcacatgtactgctccctctactctctgtaaagctttcataaattaacgactgtgttctgagatcttattactttattttgtaccaaataagagaaaaaaaattttaaggaataactttaaactactgaaacaacagtttcttttattatttgtcataggtatttgtggtagaaatcactcacagaaaactcagcataacatctgaaattcgaagagcaagagtgactaagcactaattaattccaccatatagttatctaagcaccaaacctgatgatcaaacactagtttcggtcctccatcagcagcagtatcctcactgagtaacatccatgtgtttgtgtcaatgtcataacgatagaaatcacttttcagagatttgctgttcctcacagaggaatccaaataacgccccaaagtgtagatttgccttcgttgaatgtcaatgcacattttatgacatgatctagcactaggaccattctgtggagagcaaacaaaaaaaagaaagaaaattcaaagaataaataatacaaaacaaaattaaatgcctctttttgctgactttcacaacaggtctgctcagaaatttgatcaagtccaactaatatatatccaatattagacttaagtctctatagaaaaataaaagaagcaataggagacacaaatcttagcttagaaatgcttaaactctaccaggaaagatgagaacaactattttctattctattgcactctgtttataacacttctatggcttctaatgtacactgcattacattttagtcatttgtgtacagagcttaattcttttgtacatgtcaatcgactcaaagacacgtttggtttttcaaaatatttttgtacacttcatcagaatctagcattaaacagatactccaagaatatttagaatttcaaattggtaggaaccttaataaaacttgtagtttgatgttctcctttaaaaaataaagacgcagaagctcaaagaagaaagatagcctcctgaaagcagtaagctaatgaaagaagcagaatgagaatccaagtctttgactacttcttccacactttatattacataaaattgactctcctgacaagataaataattcagctacattaaacaattagggaacaaaatgaagaacagtatattatcaacagaagttaattagttgagatcacttgtatcacaggacagaacaaaaggttaaaaaaaattgtagtataggcttaaaaaaaaagaattcatgaaaaaaaaaaaaaggaacttcatctgggtaggactggattagttgaaagagggaaaaggaaaaatatcttgtatttgttaaatatctcctaaattctacctatattaatactgtgtatgtaagataagagaaacaaaagcaaaaatacactacagtatgtgcagttatgaatgagatgaagaattcctgcccagaaacagcagagttgaagtataaggtagaaatacaaagcctgtgaatgactgacagagaactgagtataatcttgcaagcattaaagagctatgatagatttctagagaaggacacaacataaaaaagcagtattataggatgagtaatccagtattatttagattagatgaaggaataaaaatatcagacaggaaaaacagtttgacattcgtgtgagtattcatgctaattactattttacgattattgttaaatatttgtgtcaaggaaaatctgcagcagaaaggcagaaattttatttaagaaagaatttccgctctggctgccatgttgtgtccccacacgtgtgcacctaatttcagctggtctgtgggagaccccatgagcaccaaacctaatcccccagggaagccccacttctgctccagcagtatggaagaaatgctcgtgaaccagaataaactctccaaatggcaggcacaagtgcacatcagtggggaaaaaaccgctagcagaaagaagaaggtggttctcagaacagttacaacagacaataaagaaatttcagttctccttaaagaagttagaggtaaacagtatctctggtattgaagaggtgaagatgttcacaaaccaagggtcagtgattcacttgaataaccctagaggttaggcctctctggtagcaaagactttcgccgttacaggccatgctgagacaaagcagctgagagaaatgctacccagcatcttaaacctgcttggcacagagagtccaaccagttaaaggagaggggctgaggctctgcccgaacaatctgtggatggaaaagcaccacttgccacgggagaagaggatgatgatcaagttctagatgttgtgcagaattttgatgaagcttccaagaatgaagtgaagtaagtaaccgagtcaacttctgaagaagataaatctcgaagaagtgattgggagttgctatcttatattgtgactgctctttaaaattttatggatctaataaaatctagatctagtatttttaatcccaagccccaagacaatgcagctcttcccattttttgcttctatacaattcattctttgcagctaattaagctgaagaagcctgggcgtaaagtctgaaacgaaagttaataaagtcctttacctggttaaaaaaaaaaagaaacaatttcctctgtaattaagcaatttcaaaaacaaatatgaggcaacatatcatgaatctatgccatatttactacagtgtgaaatctgaagttttaataggagaatagaacttcttgcttcagtttaattagcaaaagtgctatttaaatgatgacaaattacttctaactaagaagaaaaaagggaataaagaagagaaaccaagaaactggggaacagaaggaaaaatagagaaaactaataaagttattttttctttcaaaaaaataacagaatgattaacagaattataaaccagtagtaaggctaatttttttttaaaagagagagaaaatacaaattaccagtaccagaaatgaaagcagtaccatcaatacaggctcactagaaactacaaaaaacccaagaactatcataaaaaatacagtaaaatttgactaagaagataaaacggacatattcgtaatgctaattttttacttaatggtgaaatacagaatgctttcctaagatctgaaataaggatgtccatctggtgcagtaaaacattaaaaaaaattgtatttaagagtggaaacaaagaagttaaaatcatctctactcacagaggacaggactgtttaaaacatcctaagaaatcaacatagaacaaaagacaaactattagaaataattaagtggattcacaaaagtaatgatacaaaaaatattaaaacatcaatttacttcagtatattatcaggaaacaagttgaaaattaaaaatgtttaaatttcatttacaacagcaaggaaaagcaaaatatactggggtccatttaataaaaaaagacctctaatctgcaaactccaagtgctgagggataatgagtaagactcaaataaatggaaatttagccctgctcatggataagaaggttcagtattaagacatcaattatctccaggttgatttatagactgaacacacatccaatcaaaatttcaacagtgttagaaactgacgatgattctaaaatttgtgtgaaaatataaaggacttagaagagtcaaaataatttttaaaaagaacaaaaaggtcttatattacttgatctaaagtcacattggaatataaatagattaaaagataatggggcagattcgaatatcctaaaagacaaatatacttatatactccattgattcttgagaaagaagccaaacagggaaagaagataggaagtgaccagaactcacatacatttctggaaggaatgtaaaacagtacaaccactttggagaaagctttaacagttccaccagtggatgccaaaagggcaaaagtttgatgctgctgctgctaagtcgcttcagtcgtgtccaactctgtgcgaccccatagacggcagcccaccaggttcctctagccacgggattctctaggcaagaatattggagtgggatgccatttccttctctggaaagtttgatgagtaacacaatattttcatagtctcaaaatgtctctcctcaaattacttaatcatggagtaggaaatctgttgagtacatcagacaaactgaggtaatgtgcctgtctcctgacaggacatatttaggaggacctgatgttcacacgtggcttcccagctagaaatgcttaacctatatccaatcctagggaaacattaagcagacccaacagaaggatagtctacaaaactgccatatactcttcaaaaatgccatggtcaagaaagacagacaagtcaaggaactaaaggaaactaaagaaatatgacaccgaaatgcactgcattatcatgaactgggtcctgggtcagggacagagttgaggtaacagtaagacacctataacggacattaaggaactggagtgggcagccttttccttctccgggggatcttcccaacccagggatcaaacccaggtttcttgcattgcaggtggattttttaccagctgagccacaagggaagacaagaatacaggagtgggtagcctatcccttctccaggggattgtcccgtcccaggaatcgaatcggcgtctcctgcattgcaggaggattcttcaccaactgagctatcagggaagcccataaaggacactgcactattgggataactacctatatgtgaaaaaggaatgggggttaaaacagcacttcagggatcttcagggactctataaagtcaaagccatttttataacaattgttactgctgttcagtcactaaagtcatgtctgactatttgtgaccccacgaactgcagcatgccaggcttccctgtccttcactatctcctggagtttgctcaagctcatgtccattgagtcagtgatgctatctaaccatctcatcctctgttgccctcttctcctcttgccctcaatctttcccagcatcagggtcttttccaatgagtcagctcttcatatcaggtggccaaaacattggagcttcagcttcagcatcagtaccttccaatgaatattcagggttgacttcctttaggaatgactggtttgatctccatgcagtccaagggactctcaagagtcttctccaacaccacaatttgaaagcatcaattcttcagcgctccatcttctgtatggttcaactctcacatccatatgtgactaccggaaaaatcatagctttgactatacagacgtttatcggcaaagtgatgtgtctgctttttaatacactgtctaggtctgtcatagcttttcttctaaggggcaaacaagtatcttttaattttgtggttgcagtcaccgtccacagtgattttagacgccagtaaaataaaatctgtcactgttcataacaatactattttcactcttattcacttataagtgtatgtgatatcttccagaagctacatgacgtgtgatatagcagcagactgaatttagaaacaaatataaacctacctgccttctattcagtcacaatttacgagacttagaaaactataaaacagtgctacttgacatacgatggctgtcttaaggaaaggcatctatgcagttgttttagttgcatgctgatctagctgctttttccacaaaacacggtatttactcaaaagaaaactaacaatccaggtacagttattcagagattttctgaaaaatagatgaagtattttactttgaaggaaaacaactgataaaatctgttgccagtaataaaacgtacattttaaagccaatttagaattttagaaagcttctccctgccactgtgattgtgacaccttcccaacacataaaagactttgctaatgagactgacagtgatattaacaaatgtggtttggtataataaaatatgtcaacatctgaagacctgcctaactcacagaaccaatatttttcaagtgaccatcaaacaagtaaaaaaacaagcacaggaaaaagatacattcaaagagcaacacagatcagtggattttactgtaacagaatacaaaacattagctgatgaggtctcagagtctatagtgcaattacctttaagaagcaaacaacaatttgtcaatttggggtataagattaaaaaagaatatgtgctattatataaaaaggctacaattaaaatactactaataataatattaatattctttccaagaatatataaatgtgaggtccaattttcttcatatattttacataaaacaatatgttgtaaaggatgacatgcacaagaacatatgagaatctagctgtctttcactaagatagacattaaagatatttataaaaatgcaaaattaaaaatataatttttttgaaccaataaaaacttacatgcatatatacatgaacatttaaaataattattctaaaagctgagccattctactatctttcgacctactacgtgttattagatacattacttaatctaaatgaattaaattacttttgtgtgtgtgtgtgtgtgtgtgtgtgtgtgtattcaatatttttatatattctattccatttaaagtcattacaaattaacagttctatttccctatgctgcacaatatatccttgttgcttaattattttacacacattgagtaatgtatgtaaaaaaacacattctgctttttaattgtatataatactttttaaaaaatatgcaccgaggtatcattaaataataaaacttgtacttactgtactaattttgtagaaaacaaaattggatacatgaacctcttcaattttggaaggaatgaggattttgcgagagccacatatcctcattcacttcactaatgaaacaaaggtttttaggtgtttaaataaagtaagtaataaaaaactataataaatcttaattccaatactggataatcaacttatctctactgatttgaaaataacagaaaagttttctcatcagaataatctactattaattgcattctaaatattacttagaatattacattaatattacttttgaggacccctataattcctctctcctgacaaagcagccactttcctggattttctatttatcatttctttgcttttctccagcattaactttttaatctaacttgattgaactatttactcactacagagtaagcatccatgccttaaggaatttagagtttccactggaaatagaaatataaaccaatcactgtagtaacccactcaaggaatgtaaagggttaagtggtcacaccaaaggaagcttccaattctggctggggaagtcaagaaaagcttcacagaggaactgaagtgtgaactgtgttttaaagggtaagtaggcatatacagttccagaaaaacatctatttctgctttactgacaatgccaaagcctttgactgtgtgaatcacaataaactgtggaaaattctgaaagagatgggaataccagaccacctgacctgcctcttgagaaacctgtatgcaggtcaggaagcaacagttagaactggacatggaataacggactggttccaaataggaaaaggagtacgtcaaggctgtatattgtcaccctgcttatttaacttctatgcagagtacatcatgagaaacgctgggctggaagagaagcacaagctggaataagattgctgggagaaatatcaataatctcagatatgcagatgacaccacccttatggcagaaagtgaagaggaactaaaaagcctcctgatgaaagtgaaagaggagagtgaaaaagttggcttaaagctcaacattcagaaaacgaagatcatggcatctggttccatcacttaatgggaaatagacggagaaacggtggaaattgtcacactttattttggggggctccaaaatcactgcagatggtgactgcagccatgaaattaaaagacacttattccttggaagaaaagttatgaccaacctagacagtatattcaaaagcagagacattactttgccaacaaaggtccatctagtcaaggctatggtttttccagtagtcatgtatagatgtgaaagttggactgtgaagaaagctgagtgctgaagaattgatgcttttgaactgtagtattagagaagactcttgagagtcccttggactgcaaggagatccaaccagtccattctgaaggagatccaccctcggatttctttggagggaatgatgttgaagctgaaactccagctacccacatgagaagagttgactcattggaaaagactctgatgctgggagggattgagggcaggaggagaaggggatgacagaggatgagatggctggatagcatcatggactcgatggctgtgagtctgagtgaactctgggagttggtgatagacagggaggcctggcgtgctgcgattcatggggtcgcaaagagtcggacacgactgagggattgaactgaactgaactgaaagtcttgtgggtacttgtaatatatggactatattgtgatatgtgggatgcagtaggtaactgaaacagtttgactgagattaattatagggtttaagcagagatgctatgtggcccaaagaaaaaaattttttaaagactatgttaatgcatgaagactaggtttggaatcaacaatggaggcaaaaaaaagtttaagaaagaaaccacaacgctgaaaggaataaaaaggaaaaaaatgtctgaaactcaatactgggtgctagaactggtggaacttaggccctaattcaacacaattcactaacgagaaagcatttcaggatgaattgtaaacttcttgcaaaaacaattcagacacaatccacctagatttaaaatagtttaagagaaataagaaaggtattcttttaaaatctgcctttgtatttttcaggagagaaataatcatttcagaaaatggtacttaatactgaaaaggattaagatctctttagaaacattaaaaaatactcaaatggttaacaaaggaacataccaagtaagcaaggatccagtttcctaagatgaaagacagcaccagagtttttaaaaaatggccttcctagattaaaattggtggctttgaattgagtcttttcctcttcttttcatttgctgttacaattgcttttagtttatttttcaccttgtaatctaaaactgcttggatggaaaagtacaataaaaaattctacaaagatatttaaaaaaaacatgaatatgtgccttatagcagtgtataattaattatacacttatttaattcaaaatcataaattcaagacattctattcactatggaagttttacgtgtatatgcatcaatagacagactcacacatgaatgaacaattttagttaaaaataaaatatatatcatttgtggaaactgataatacagtcaaatagtgaggggccaaagtagtaagatagtgaggaatcaaagcgtgtatttccagaggaaacaaaaataaatgtacaaaataagagtagaggtgacagaatatgagaaaaaagatagcttatacagttacaatttaacccaaatggttaaaatctaagttacattagatactaatttctatttatctctataacatagatttgttcatgtaactgtagttcaagaacctggtatagaagctggaatgcaagaatgcttaagccaaacttgtcaccacaaattcttctgctaccactgctgacacacattataaaagaacacaaatcactcagaaagagaagtgtatgcccacacccctctcgtaataaaggtgggtgagaactcaagtctgaaaacttgcctctttctcagtgtctctagagatacaagtccactggttctctttcacactgtacgcccagaagtcagcaagatcttgcgttccatcccagccaccaaacaaataaacagtctctgtgaaaattagaaaaatatgtttaaaaaaataaacttaagacagaatttaagcaaaggcacccatatttagccattgcttctaaggtcatttaagaaggtacctctaagtaaccttacaaatgaaatttttaaactagtaacattccaaaataaatactagtatttcctaaacataagcatatggaaaggctactgtagaaccagtattttgatagatttataaatatgaaggtaactaagaggcatcccctaaaattctgattccaaaggtcctttgtgagtaaaaagaggcagtactttgacagtacccaaggggaatcccgatgagcagccagtttaggatcttctgtgttaggccatgaaaagtttacatttaccagcctctcaacaatccagcttcagtcttaaaaaaaaaaaaaattccagaggaatataccgtgcagaaaaaaacttcacagtaaaactgttttctactacaatatcaaaaataatagttaaaactagctgagttgaaattagatatcttaagaacaaagtaatgcatagccttgatattcccacggaaactgggggaaattactgcaaatatattgtggtagatttaactcctcagaaatcaacttttaagtcactccaggtatcctgaaaatttgatttcttctaactctgaaatgtctattatatctatgaactttatcatgcgacaaaacatttcttgctcagagactagtgaaaatttttatatacaacactgtgaatcatccactttctttaaaaaataatagtgcctttcttttcttcaaatatttatctccgttgtaaatatcttatgtctaccggttatacataccattggaaaagaccctgatgctgggagggattgggggcaggaggagaaggggacaacagaggatgagatggctggatggcatcaccaactcgatggacatgagtgagtaaactccaggagttggtgatggacagggaggcctggcgtgctgtgattcatggggccacaaagagttggacacgactgaacgaatgaactgaaccgaaccactttttaaaattaaataatatgttacaggaaaactataaagccatctactctctaactgacatgacccaagtctatatatatggagactgtcatctacattacatcctaccatgaagggttaaaatgcagagtgcatatggaaatactgtaacactacttaagaaaattcctgccattcatagagatatcttataagagatttttgtcatgttttcaagtaatttcaaactctaagtgaatcttctaaataaaacaacctagaggaaatcaaaacaaagctgttggataagaacaaaccactggaaccgttctaacgctaacttagtaatcatgtgtaggtcacttcacttgcctgggtcccagtttcttcatttatagagctcttagtgtggtgataaagattttcagatataagttacatgaaaacattctgaagactgttgtcaagcatgaacagcatttctacctttaaaacatgcacacacacacacaaaatactttctagttactaagcaccacaaatgcaataaaaataggattactgtgtctgtttccaggtctgacttaagtacctagaacacttttgcttctgtacaaatgtgaaatagtggaaactattaaactgccatctctcagaaatacaaaacaacccattatcattagttaagtaacattctatttcccaaatgaaacacagtaatgcccggatactgagaactttacaggaaaaaatttaagaattttcatctgacataaaaattatttgccaaaccccattagattctaaagcctggagagggagagggtatataactaaaatagcaacagcaattgaccttttgttttaatagtgtttctgggcaacctctggataaggttaccctggttcattaactttaataacctttcctcttgggctctgggttctcaatgttctttctgaaaagcaagtttctttgtacacataaattctcacagcagagaaaacccacatttccacaacagcctcattgatagctgagcaaaataaaatctggcacagagcaagcatcccaatggaattaatccaagatgtcattcttgtctgtgaatgctttgtggtcccagttaaaagtttaatactaaaattgaatgaatcaagatagaaacaggaccttttgacatacctgaatgaaatgagtaacacaattttaattaaatcatctaatcatttaagttaaatcattaagagataaaatatctagaaatgaacaccagcaaaaatatttaatgcataaagaatataaaaaacttaaagattatagaaataatcagaactgtagtgagaagtaagaaagcagaaaagaggaaatgctattatatgcaacatggcagtagcttggtttaaactctcatggttataggttatataacaattcacgtgcagctccaaaccaggaaaacagcccaatttaaaaaatgggtagaagacctaagcagaacttaatctcaaatgaagacatacaaatggccaacaaacccatgaaaagatgctcaacattgttcattcttaagagaaatgcaaatccaaactacaacgaggtatcactttataccagtcagaatggccattaccaaaactatctacatatagtaagtgatggagagaatgtggagagaagggaatcctcttgaactaatggtgggaccataaattgatacagctactatggagaacagtattctccattccttaagaaactatgaataaaactactatatgacccagcaatcccactactggatatacatacaccctgagaaaaccgtaactcaaaagacacatgtaccccaatgttcactgcagcactatttacaactgtcaggacatggaagcaacctagatgtccatcgacagatgaatggataaggacggtggcccagaggttaaagcatctgcctgcaactcgggagacctaggttcgatccctgggtcgggaagatcccctggagaaggaaatggcaacccactccagtattcttgcctggagaatcccatggatggtggagcctggtgggctacagtccacggggtcgcaaatagtcggacatgactgagcgatttcactttcactttctatatacaatggaatattactcagccatagaaaggaaagaaactgggtcatctgcagtgatgtggatgaatctagagactgtcataagtcagaaagagaaaaacaaatatcgtatattaatgcacatatatggaatctagaaaaatggaactgatgaacctatctgcagggcaggatagagatgcagatgtagagaatggacttggggacatagtaagagaaggaaaaggtgggaccaactcaaagagtagcactaaaatctatatgctaccaagcataaaacagctagcaggaagctgttacatacagctcagggagctcagctcagggctctgccatgacttaaagggataagatgagggatgataaggaggctcaagagggagggaatgttgttgttattcagttgctaggttgtgtccaactctttgcgaccccatggactgcagtacaccaggcttccctgtccttcactatctccgggagtttgctcaaactcatctcagggaagggatatacgtatacatacagctgattcacaatgctgtacaacagaaggtaatacattgtaaagcaattaccctccaattaaaataatttttttttaataattcatatacatgcgtagggtagtaaatcctcctcaagaagcagccctttctctattgtctcttcttaaaaggagcataggctacagagactatttctcccagacgcatgggaatgttcagtcaatattttctcagtactaagtctcttgatgaaagtgaaagaggagagcaaaaaccttggcctaaagctcaacattcagaaaatgaagatcatggcatccggtcccatcacttcatgggaaatagatagggaaacagtggaaacagtgtcagactttatctttttgggctcccaaattactgcagatggtgactgcagccatgaaattaaaagacgcttactccttggaagaaaagttatgaccaacctagatagcatattgaaaagcagagacattactttgccaacaaaggtccatctagtcaaggctatggtttttcctgtggtcatgtatggatgtgagagttggactgtgaagaaggctgagcgccgaagaattgatgcttttgaactgtggtgttggagaagactcttgagagtcccttggactgcaaggagatccaaccagtccattctgaaggagatcagcccggggatttctttggaaggaatgatgctaaagctgaaactccagtactttggccacctcatgtgaagagctgactcattggaaaagactctgatgctgggagggattgggggcaggaggagaaggggatgaccgaggatgagatggctggatggcatcatggactcgatggacgtgagtctgagtgaactccgggagatggtgatggacagggaggcctggcatgctgcgattcatggggtcgcaaaaagtcggacacgactgagcgactgaactgactgactgactgaatccgaactggcaagccgctttagaaaaaacaaacaaacaaagacaacattgtccctaccctcaaggagcttacaatctagtgaagaatataaaatgttgaagctcccatactttggcgacccattaggaaaagccaactcagtggaaaagaccctgacgttgggaaagattaaaagcaaaaggaaaagggggtggtagaggatgagatggttagactgcatcaccaactcaaagaacatgaatttgagcaaactccaggaaataatgaaggatagaggaggctggcgtgctgtagtccatggggtcacaaagagtcatatggaacttagcaactaaacaacaccaacataaaacaagtacataaatcaccacagtgcaagtttcataagaaaggtaaaagatcaccatgggagttcacaaaaggaaagagaatacaacaaactgaagggacccaggaagatttcatggtgacgagcagtatctgacctacacatcagaaggtggctctgttgacagaatgaaagaaagagaagacgactttttcaagcaggggacaaagtaaaataaaggtacagggacagaaaacacacagtgttttaaaagacacagaatctaaagccaggcagaccttgaatgatatcgcagctctaccaccatggctgtggaaccaacaccacattccttaaccactggtttcctcagctctaaaattctgtgagacagaatacctatctcataaaactgccatgagaattcaataatgcacgtaccatggtgaaagctgtgtgatgaataaacacactgttcattttaaaagaacaaaaaagatagaggaatatagttaagttataaagacaggcagcagccagatcatgaaatgggataaacggcaagataaatgttttgaacttgactccacagacagtatgaacttcccatgtaggtcagaggtaaataatcctctggtcaatgcaggagaggtgggtttgcaggttcaattcctgggtcaagaaaactccctggagaaagaaatggcaacccactccagtactgctgcctgagaaagcccatggacagaggagcctggtggactacagtccatggggtcacaaaagagtaggacacgactgagcaactaaacaacaactacacacagtatagatccacagaagactttatgcaaagatgtgacatggtcagatctgaacctgcagcatatggacttactaaaaaagatgagccaggaaacagaaagattgggaataatgtgatcaataatagccaatgttaaagatatcaagtcaatttcattctcagagactgaatggatcaatcaccaatcagtcattacttcagccacagaagttaaaatgcagccatattctttggcacaggtctttttcgttatcagttctagataaaccctacaactacttactaccaaaagtactaatctatacatctcagatacactaaaaataaggtagaaatgttatcacatcagtgtcttcacacaattttgcacaaagaagcaagctttttattttataagcccaactgcagtatctatcctcctctgattcttaggggtaaatcagactatgctgattgcataatcctccacaagatggcatactactattcataattaaaaaatccatttttccactttgaaatagtacagaatgcatatactatggactgacataccatgggtccaatctcagataaaattctaatgtgctgctgtatttaaaatggataaccaacaaggacctaatgtacacaggaactttgctcaatgttatgtgacaggctggatgggaggggagtttgggggagaatggatacatgtatatgtatggctgaattccttcactgttcacctgaaactatcataatactgtttgttaactggctataccctaaaacaaaattaaaaaaattttttctttaattcaagtctcaaaaagagggaagaggagggttagtagccttgtaaaagaggttagcttaatttctagtgtaatacacaatttctagtgtaatacaatagaaaaacaaatgaaatttttaaaaaagcttttaagaaacacaaatttatatccaaggttaaatgaactctgtcaggacatttagtttatgagtctaatccctctgaaaatgtagctaagatcttagattgacatgagaatttttgaagggaggaataaattagaagggaaaaagatattttatgtgctctttaaccttactttctttagccattctcttgaactctcaagacccagcagattatcaactggattcatctgtctctctttaaaaagggctatatttcttacataaagctatgattacaaaactacagactgatcttttgggttatttcaacatattgctatttccatgctaaaaggttgtattttctgcctatgacaatatactttatactagggctatattttagaattcctttctgataaccatatgagagaaacagatttgtgtcacatgaagttacagaaatataccatcacatgtagttacagaaatacaaccatatgaatgtatttgtatttaaaaactaaagcccatgtttacctactttcttcaatggtttctttaaagaatatcagggaaaaccattatgtagaattaaaaaaagaaaaggaagaactttatatataaagtatatagaacagtcaggttcagatttccatagaagggctcttttcagcaacttctttaactctttaaaagatatcaaatactggggttttgcctaaatcttatcatctattctgcttaagtcagaaaaaggctggcaatataggttcttaaaattcaatgagagttaaacaaagaattgcctggtgcaatgaagttttcatctggacagacttccactctgaagcaaatcagacatgtcttttctctctattcgccttattttactcagacttgaaacacaactcagagttgaagaatgtaagtggaaaactgccaggtgtaggaattatgatcaataaaattgacatgctcttccaagtaggacaaaatacaacattccttctctagtaataacaacagaattcacttagaagaaaactttgaaaattagagtaaaatctgtgcctccatgtactttttaaaatggccctgtattcttagagctgtagcaaaattgaaaaaaaaaaaaaaagacctacagactgaaaaaggaaaagaaaatttaaggactattacatttttaatatttaagaaaacaagatacatgaaacactgggaatcaataattgctctgaaatacaagtcacttcaaagaagctgaaatgagctctatgaagttttagtctagttaaatacctggcacactgccagcactcaataaatattagcaattattaggaaacctgttgttcctcactcttttatatctgcaatagcttttaacaagaatgtaaaggaattaactatgtttttaaatttcactttatggtattttataagtgaagttatatgctttattactatttacatatttaaaatttgctaaggtctcaggagttagctctcacaatctactgtgttttctcttttctgctattacaccggagattttcattgtatcttcagcataagaatctaagaatcaccaaggtaacagcagcatgaacacaggctttggagccagacagtcctatagacctaggttcaaatcccagctccacagccttggacacaacatcacctattctgtataataaggattatctacctttccagtagtaaataaaataaatgaacatattaaagttttaatccaaacctctacatattgtaggtattcaataaatattactcctcaggtttgaaaaaaacattttagtctagtgaaaatgttcttaactctttgatgatctgaattcatggattctctttcagaaaaatgaatatgcaaaccaaatattacatataattccaacagattaagagccctgctcaggaaacctttgaaatgcatatttaaaataaggactggacttctctatacttcactacataggcaccaactttataaagatagaacttctggtttcttcaaattctacttgaggaaagtcacaacctaactaattcttacgagaaagttcttaaaatgattttcagtatttttttctaaaaatataaaagtatacttatggtttcccttactttctaaaacatcagtaagggcaatatatacaaaagatgaaacaaatatactgaaataatactggttaaaatgtggaattatgggtaaaaattttttccccttcaatactgcttgctttaaattgcttttcaaaaatttttaaactgcttaaaaatatttccacggtgagattatatcaaaaaacaaaagacctctaaatttacatcaaattctctcagaagaacttataagtatgtatttgtatgttaatgttgcatataaatagtatatatttatatatgttataaattatttcatttaactcccacaaatcaattattcctatttttatcatcattataactccttcaagatcaaataaaaagtcagtgggaaaaaaaaatcaggattgaaatccagatatgtttaacaaatacacatacacacttccctcccacaaactcaacctccaaccactatatctgattgttatatcaataagactggactagaaaaggttctttctaagacttaacaataaatgcatcttagaagatgattaaaatcaacctaatggtagcagttataagaatacataatgaagtaaagtatatgaaaccactttggtaaattatgcttttaattttataatagaagaatttgtagagaaaaaaaatctcaaagatatcccagattctcttacactcaaattaaatccagaaagcaccaaatgttatcctaaaaaaaaacacaaagtctataaaacattttatttttctacctacatcccaaggtagtaactacagctgtaagataatatagtctatatacagaacaatcatcagaaaatttaaatatattagaataaaatcaataatataaatttacctcaaaaaatatcagcatattaaacaaatggcatcatgacatgatctactcaccaaggtttaaagcaatgtaagaatgtagtttataaataaatatctttctttccactcaaaggaaaatagattttaaaattctgattcaattcaactaatatttagttcatactccataccaggctctggggccacagaaataatgcaagactcctctctccccgctcctcggccacaataagacttctagggatgggagatagaaaggggagagcaatgggacacataacacctacacaagcaaaaacctgtggtggattcatgtcaatctatgccaaaaccaatacagaattgtaaagtaaaaaattaaaaataaataaataaataaatttaaaaaaaataaataaataaaccaatatggaaatcactatagtgaaagtaatagggtgaacaaagttctatgcaaacacacaaaaaggagatgattattcagcctggacctgtcttctgaaacccaaagtaatatagctaactacttattagaagtatctactaggatttgtaactggaatctcaaacttaacctgtctgaaatcaacctgctgaacaacggaccatacttaatcctctttttctacccatcttagagaatggctatactattttcccaattaatcagatcaaaaccttgagctatcctttactcctttcactcactcatacccagactgtcagtaaatcctgtcagctgtatgtgacattttcaaaatacacccaaagtttaattaattctcatcactatgatcaccaacctagtaaattccaatgctatcactacttctctggtaagaactgcttcctaaaaggtctctctacttctgcccatcacctaatttgttttgttaaaatgcaaagtcaattattaacagtaacatttctcaaagcccaacaatatttcccattaatctctcactatgaataaaggttaaagttcttacagaaaaacaacacaatcgcccatcactacctctctgactttattccctatactctcttcttcacccaccaccttataccaagtagcaaataatctggaaagaaaaacaagagtagaggaaaggttggcaagagtttactttgtaaacactattatttcaacaggaataccacttacacagagtgagaaatttcatttgaaattttatatgaataccaccaatatttacttactgtgcaatgtcaaaacttatgaggtattttaatcctttaaaaaataaataggtaatgaatcttcccagaaagctccacaaaagcagacaaaaatattacataccatttcaagagtatcatgggcctccttagagcccacttatgaagcctcatctaagaaaacaaagaaataccaaaagaatagagcatggcaatagaaaggactatagacagcaagagttagctgaaacaaaagattgagaatgccagggtatagaagttactagacttttgaatggtatttttaaagttccttttgttttctcttgataaagcagattcctggattacctacctcataaataaacacctgtttaaaccacaattctagaatctcatgaaaatacaaagcgttttctgacttgattgagtcctagggcatcttgccttactttatctctgcttccagacacctgaatcctcagaagctgcattcctgctctacctcaatctggattccaatcttaactgtatcactagtttatatgtgtgtgcatgtgtgcgtgcgtgcgtgcgtgcctatcagtcgctcagtggtgtgtgtgtgtgtgtgtgctagtagtcaatgttagcatttgtaagtgtgtgtgtgtgtatatatatatgtatgtatgtgtgtgtgtgtgtatatatatatgtatgtatgtgtgtgtgtgtgtatatatatatgtgtgtgtatgtgtgtatctcaaaaggaagaattccttaccaataagttttacacaccaaccctattactcacacaaaggatcactggaatgtggttaaactccttgaatttcaccattcacgtagttagtactatttccacactataagcagcaatggtaacactgaccatcaagctcacttgagttatggacaactttatgttaattgagattatcatgattatttagtttaccagactttaagtttctggctcctgttgtaaaggctcaaaatttcattttattgtcacatgcatgtgggcatgctcagtaatgtccaactcttcacaaacccgtggactgtagcccaccaggttcttctgtccatggaattctccaggtgagaatactgtgaaggaggctgccatgtcctcctccaagggatcttcctgacccagggatcaaacctgcatctctcttgtgtctcctgcattggcaggcagattctttaccactgagccatctgggaagcagcacgggcccaaagaaagcttgatcccgcattaaaaagtctagcgggggggaaatcaccaaaacagatacaaaatggctctaaattaaaatccctctatttggcacagtggatagagaagcctggtggactgcaaatccatgaggaagcaagagttggacacgactgagcgaacacacacacccacatacagacatattgatagataaatctctaaatttcctgtggtagaaatatttgctcaaaaatatattcacaaagtacttttattacacttctataaacaagtcctcaaacagaagtatagatactggtcaatttttcattgtagatctttgttaatctataataaatcctcagaagctatgagagattaatcctttaaagattccatctagtatatatcccatgcctataagttattcttacttatatacaatgacttactttaagtcattgttttcttatagtttctaaagcaaatgaagtaaatactgaaacaactcttttccattccctgaagtacttttttaaaggaagtgtagggataaggatcttgactaacaagagtctgctgaaatcctccccttaattcacaaaaccaagatattaccaaaaaaaaaaaaaaaaaaaagtcaatctttatcactacatgctggaagtattttacttcaaggatctctgacccgaaaagtcagattttaattgtaaatgtctctgcttataccaagttctgttaggacatctgcctatcatttgaatcttctcattttccattctcaaatatcataggttacaaaaaaagaaaatctttctcttttgttacaaatgtactttaacctattttatataggccacattccataataagcaacgcagaaagcactatgaaaattccttctgctccttgataaggaaaactttaaatgtaaaagtaaaccacattattttcatatttaagaaaaatagcattttatctaggagataaaagtagctttccaaacactcttttttagtattttcttagcaatttctaaaggatgacctaataatattttcatcgtgactgagaaaaaaaaggaatggcattaaaattccactgtatgttcaaaagaggagaaaagctactatagacgatctaaacacaaaattttacctcttttttcatataaacttaacttttttggattaaaaaaaatcaacttatatatagatctggttctctgagaaataagcatatgcattatttattgagctctcaggtagaaaaaaaagatgcttaagactacagctgagtcaaacctatttctgtgggaaggaagggggttgggaagagaagctaagactaagaaagcaaattcctatgcctcaaaatgaaccttttccaaagagaccctaataatactaaacaaactcacaggttactctacaaatttagcagtggattttaaataaaatattataatttctcctttaacttataaaacatgtgtgataatgttaatgcctagatcattattatctgcactgcaataatttttttaaattatgaatcaaaaggactattcctggagaactactgtcagcataacacaatactaataaaacagagtttctattacaagtaaaatgttatttgggctaatattggcattttatgtggtaaagtttttttaaaaaccaaataaaataaaactatacagaattcttgtattatttgcttctcaagatggtaatttgaagccaattataattttagcattaacctctaaatataacagtatttaagctgttctaggctatatgtagaaacctagggaaaatttgtattatcaattacagaaaattaaaaaggcaagaaagattaactaaaacaaattatttatatacccatggacagtgtttagcaattaatggatctaccaacattaggctacctaattttgtatcctctgcttctgaaaatataccttaatttctcttttactacaattcccataatatggcattaaaatataaatgcactaaaaatcaagaaatattccagctaactgtggaatcaagcacatataaaactacacacacacacacacacacacacaaaggtctgcacaatacattttttctaggttttctaatttcatctgtgcagcagcctccccaggctgatgtgccattgcctggttttagttatatctgaagctaatgcctattttctttgctccttggttatggccaataacatgtaacctctgcaaggaatggaaagaagtatatagacgcctgagtatctgatatttaatcatgtatcatttttttaaaaatctgctttccattccaagtagtccttacctgtctggacatcaataaccatctgatgacctcccctcattcctggccggttatcttctccatcacctgaagtagaaacaatatattttttaaaagaagtaacaactgcatatccagagtaacttcattcataagtctgtaatgagtagtgaatttaacacacttatttcttcaatattaagaataagaggactcatagaagaaataatattacttataattaaatttataataattatcttgctctttttttctattgctttcagggtcttaatgcactggaagctactttcaaccaatgccattaagcagcaaagacataggctattccacaaaaacataaaatctctaaactagtggaatgacaaagtgaaggtgtgaaacaattacagaattagactgcaggtcttataactctaggcatggtttattaataaaatgagcagttttatttttattataaaaaaaatttattcttatttggctgcactgggtcttagttgcagcatgtggggttctagttccctgaccagggatcaggaccccgacattgggaacacatagtcctaggcactggaccaccagggaagtccctaatgagcagttttaaagttcattaaactagctactgataactatgatgttatcaagtttcacattaatgataatttcctcactgtattaatttcattttccaatatttcagaaatcagtttccacataatccaccactttgagtagtactgtgtgacaaaatgtaagacttgctttcttttgactcttcttacacatcacagagcttaataggcaggtttaaatataatcagtgaagggacttccctgctggtccagtggttaagaattcgcctttcaatgcaggggacgtgggtttgaacccagttgggaaaaggtcccacatgctgcagggcaagtaagacggggcactaactacagagaaaccaagcactgcaacgaaagatccctcattccacagcaaagacctgcgtgacacaactaggacctgatgcagccaaataaataaatacaacgagggaaaattttaaacttcagtaggagaaaactattattaactttaatcttacttatatcagatcctacataaaagaaaataaaatttcatttccatggttcaacagctacaagattctaatgctttacttgatgtaaacttgaaaacctgaatttttctttgcaactctcccattaattaatgtattacattagctaataactttccctgaatcagccttcttctacataaaatagggactatccaagtttttactgatttcacgggggtacaatgaaaaagaccgaaatgtcagttcttatatattatacataagatgcaaaactgaagctatattcaagcactaatcaatcagaagtttcctacaaattctttctcctttttaatagacaggtttagattctgcagctcattactgcagaagttttgcccttttattccttcttctctccaatcagtaaagtcagtattaccactttcaggaacagattaagaaaacactgaaataaatttgttgtcagtatgcttgcattttatatatttaatccaatagctttcagatatacagctataatctgtttgctacatgtttgaagaaacatgctttcttcatctttgaagaaaattaccttgtatgtgactgataaaacaggaaaatgatgccaatgtaactcagaacttacggaggttcataagcaattttctccagtatactgatgtttaacactatctggggaagctttttcacaaataaaatgaaggctttgacaatgtatgaagaaagaccagaggaagaaagctgaacgtccacagaactgccttcctttaccacaagtagttgcattttaagaactgctacactttccattatgttaaccatctgacaaagcagtgagtggcgatggaggagtgacaaaaactcctcccatatgaaaagacagattaatgaagaacatcacacccaaggtcagattttaagttttgataaaaatagtcttcattagcatcaaatgtcctctagtgtctatagctcaaagaagaattgtgtgacccgagctttaaagctccaaaatcactgtgatgcttaatataaacgcctatacttaactgttgctgttcagtcacgtcagactctttacatactagcattattcttattagaattactatactagtttttattagtatctggctattaagttccacagatatagaatggcatgtcccatttctacctctctcctaagtcctacaagctttagtgagcaattttgcggaatttaagattttctagggacacatgtttagcattataataccataacctataattttacagagactctatataaaagcagtttatgctgctattctctataaataatgcccaaccttctgttatagccataaaacaaaaatttagaagaaaactttaatgtaataaaatatctctgccttcttgctgaggaacctttgtctttttttaagcacctgattttcagtagtagggcacagtgaaacttgagtacaaatgaactggaacattaaagcaaaagcacccacaacctagaaggtcagacttacctttggtgcttttgggaatgatctgactccatcgtggcttatattcctgctgactgatatactggttaaacaagccatctgcgaatattaaaggagaaagaattacatcttaatagcttacactttttattacagcaaaaaagaccaaaatgtggaagcctacgttaaagaaatcactaatatgacactaaaacaacagcacattttcataaaatatgtcactttagtttttatgctacctcaaatacaaagagcaaaatataagttgacataaccatgtacacaaattttttcagtggcagctcatactaaacttactaagttctccccatttttgtactattatcccaaaaaactagaaaaggaaatgggagctccaacaactttggactaggcccttgtatctttgggaaaaaacaaaactagtcctttaaagtgaaaataccatttttacagtttaagtataaaattgtatagagataaaagtaccagtaactgtaataatatatttattgaatactaaacattagaatctgtgctatcttatctaattctaaaatcaactttatgaattacacattatcatcttcattttatatatgtggaaatgtgtactcagagagtcatcaatgaatttaacccaaataacagagctcttaagtagtcgggcggggactcatgtttcactatgctttactttcttcatttaataaattctaaatctcattcttaacaggagtttctacagtataataactagttatactaggtactatgatggtctatactaggtactatgatggagactgaactccccacatacatccattctactactaattattatcaagtcctaatcctgtgcccttcaacaaagattagtttaagaatggtatgaaaccaatctctggctattgaatcatgacgatcttctggcgggtggggtgggttgctttcagttcagttcagttcagtcgctcagtcgtgtccgactcttcacgaccccatgaatcgcagcacgccaggcctctctgtccatcaccaacacccagagttcactcagactcacgtccatcgagtcagtgatgccatccagacatctcatcctctgtcgtccccttctcctcctgcccccaatccctcccagcatcagagtcttctccaatgagtcaactcttcgcatgaggtgccaaagtactagagtttcagctttagcgtcattccttccaaagaaatcccagggctgatctccttcagaatggactggttggatctccttgcagtccaagggactctcaagagtcttctccaacaccacagtgcaatagcatcaattcttcggtgctcagccttcttcacagtccaactctcacatccatacatgaccacaagaaaaaccatagccttgactagacagaccttagtcggcaaagtaatgtctctgcttttgaatatactatctaggttggtcataacttttcttctaaggagtaatcatcttttaatttcatggctgcaatcaccatctgcagtgattttggagcccccaaaataaagtctgacactgtttccactgtttccccatctatttcccattaagtgatgggaccagatgccatgatcttcgttttctgaatgttgaggtttaagccaactttttcactctccactttcactttcatcaaaaggctttatagttcctcttcactttctgccataagggtggtgtcatctgcatatctgaggttattgatatttctcccagcaatcttgattccaccttgtgtttcttccagtccagcgtttctcatgatgtactctgcatagaagttaaataagcagggtgacaatatacagccttgaggtactccttttcctatttggaaccagtctgttgttccatgtccagttctaactgttgcttcctgacctgcatacagattgctcaagaggcaggtcaggtggtctggtattcccatctctcgaagaattttccacagtttattgtgatccacacagtcaaagggtttggcatagtcaataaagcagaaatacatggttttctggaactctcttgctttttccatgatccagcggatgttggcaatttgatctctagttcctctgccttttctaaaactaacttgaatatcaggaagttcacagttcacgtattgctgaagcctggcttggagaattttgagcattactttacttgtgtgtgagatgcgtgcaattgtgcggtagtttgagcattctttggcattgcctttctttgggattggaatgaaaactgaccttttccagtcctgtggccactgctgagttttccaaatttgctggcatattgagtgcagcactttcacagcatcatctttcaggatttgaaagagttcaactggaattccatcacctccactagctttgttcatagtgatgctttctaaggcccacttgacttcacattccaggatgtctggctctaggtgagtgatcacacctagagtgactatctgggtcatgaagatcttttttgtacagttcttctgtgtatttttgccacctcttcttaatatcttctgcttctgttaggtttgctttagggaaatattttcttacttttaaatgaatatacagagaaggaagaaaaaatctacttttgttcccctggaaatgtttatatcaacatgcaaatgtacataactgctacattcgaaaatgaaattcactttgtaatgatgacaggacagagagagagaaagaaactggatcactgaatccactaaccatgagatctaccttacctctggacttctgcttatatgataaaacaacattcccttacttttcaaactagggttttcttttacacgagctaaacagattataatttacagagttacttttactgtaaattctgtcatttgactctgatttcaatctgaataaaggatttccttttgcttcatttagccactgaaagcaaatacttttgcaaagaacttataagtaaaactgtctgttctccctgacttgtatacttgccaaagaccgtgtaatttacagaacttccctaatgtcttttttttctgggcaattatgaagctcaattgctaccacacccttcagctttcaattcctttcacatagctttgagaagaaaagcttatctcataaactcaactcgtttctttttctttgcttgtggactttaaaaaattattgcaaaaagtaagctctctccttcttaaattagcactcataaattagcatttatattttgaatgttaaagtaagggtaacaaatagacttacagcatgttttattgagtgtttctatcaatattatctactcccataggttttcatgacagttcttgccccattcagtctattctggccaatagtattttcccactacaagagtgagaaatcttttttaatccagacaaaatgttgtggcgctcctactaacaataatgatgacaataaatgtaataattacaattttaggaataaaacagtacattttagttcattttgtgaaaggcacataaaagttaaatgatccttcttacaaaccgtaaataggacaagataaaattatttaagataaataatgattttaaaatattctacataatggctaactgaaggggagagagaggaaaaagtaaaagatggaactatacagagataaacagaaaacttagggagataagaaaatggcagaaaaatacaaagcaacagtagagacaattagaaagtaatacattttgtatttttttgcatgttagtcactcagtcatgtccaactctttgtgaccccatgggctgtagtccaccaggctcctctgtccatggaattctcccggcatgaatactggaatgggttgccattcccgtacccaggggatcttccccaccaagggattgaacctgggtctcctgcattgcaggcagattctttaccatctgagccaccagggaggcccaagccaacacaggagacataagagatgcaggttctatccctgggtcaagaagacccctgaaggagagcatagcaacccactctagtcttcttgcctggagaatcccatggacagaggagactggcaggctacagtccacagggctgcgaagtgtcacacaagactgaagcgacatagcatgcaattgtcctattacctaagtctcctacagtaattaattataggacttttgataagtcaattaagttcctcatctataaaactggtgtttaagagctggacagagcctgaggttccttgcaaattctgccattctaggattccatcactgttagaaccaatatatttatttacttcaactgtgtgtgtctggctgattccaccttatgttcaccttagaaaagtcttcatctcctctttctccttaaagtcttctgtgactattctgaaaaagaaatcacaatccactgggggaaattcttctaagagctcctaaggtagtgatagtaggaacagttataatcagatgaaggacttcctaatctttaaagtcattctgaacactggaggtaaaattctgtttcttcaaccaatccttctatcctcactcttaactaacctgaaaagcttacaaatactttatccatcaagagcttcacaatttctcttctatcaaacacaactgtcttatgaaaatattgtcaggaatttttcaaagtaaaaaaagcaattctcaaaacattatgtaatttttgtaaaaccaatttgtacataccacacacagacagaaaaacacacagtaacatacatcaaaaacttaaaagtgactttctttggttggcaggagtaggataattttgatttttgcctttgtatttatttgtcccctctccttttttttttttgcactgagtgctattactatcagaagaaaacccacaaaacaactagatacaggtattttttcccataacttagggagaattttgcaacatactgttattatcaatataaaccattttcacatatactttgttacccctgaaatatctcttcttcaagcctcactagacatattcagtttctacaagcagtgctttgtacattgacattagcttgttttaacaaggacaaagagacctaagcatgcataaaggatttatactcaggcatgcagaggaacttacttccaaaatttaaatattaagtactccaaacttaaaattagaaattatgatgattttactctagatagatacagttaaccttcttttgaataatgacagttaagagtataacatcagagatgttcagtatataataaatgcttagaatggaaaaaagagcaagaggtggagggactttcctagccacatggttgacatttcctttgagtcatcttactgttactaagttccttacatttcaacaaactgttcataaaactcctactttcagtgaagtcaatttctagtacataatggctccctgacaagtcacaccatcttgcaaagcagtcaagcaaatatttaaaaaacattgtttggggaacttactaatttgcctccctctatcacagataaatcccttttctcttcactaaaggtcacacagttctctttggtatctcttattcattcttcagttcagttcagtcgctcagctgtgtccgactctttgtgaccccatgaatcgcagcacgccaagcctccctgtccatcaccaactcccggagttcactcagactcacgttcatcgagtcagtgatgccatccagacatctcatcctctgtcgtccccttctcctcctgcccccaatccctcccagcatcagagtcttttccaatgagtcaactcttcgcatgaagtggccaaagtactggagtttcagctttagcatcattccttccaaagaaatcccagggctgatctccttcagaatggactggttggatctccttgcagtccaagggactctcaagagtcttctccaacaccacagttcaaaagcatcaattcttcggcgctcagccttcttcacagtccaactctcacatccatacatgaccacaggaaaaaccatagccttgactgactatcagaaaacttgaagaaagttacttcaatatagaattatcaaacttggaagcaaatctttaaaaagatcttaacaaggaagagttgacttttattgcatacttactgtgtgcaagacaccagaaaggttaacccatttactccttaaaataaatctatgcaatggctattactaattattgcaaagtttagaaaatcaaggttcagagaaattagtaagcccaaagactctaaagaaaaaggtaaaaagcccaattccaaagtctaaagtattttcaactccttatagagagcatgtaaataaaaataaacacacacatataactaacacaaataatagtttttaaattatactctcagattaaacactgtagtaaaagatacaacaatgtacctattcaataacacttgaaaaaaagcaacagtctgggaaacaaaactcacacacattattaaatattctaataaaagtgggatagaacagttgaaatatgtcacattaattacaatttaaaggaaaaaatgtaatctcactgttaaataaaagacctattagacactgaagctcaagtttaacttcttatgtttcattttctctctgcaacactggtttgccactactccagatcactttcttatctgaagtattcatgtcagttggaagttgttccagaaaacaaatggctagtttgataagctaactgttctaccaaaaactaaaactaaaaccaaaccaagccaaaccacaacacctcttttggagataccataagacataaaagctagaaacataattccagctctctcatacctctccacactcaactctaaattcttgtactttcattttgtaatattaaactatatcatgactcagaattttaaagttacttaaaatgtttcattttgcagagaaacatgataaattaaagattaccctcatttaatctattagaatacatattattgcctattgtgagagaaactgggttatcgttaaatagtccagatcagatctgaagcaaattatatttagtagctattttcaatgaaataacatgcttaagaatcttctttcatgtcctcaaaaagaagaacagtaatataaagtttattaatatactgttttcttggtgaacagtcatttcaaacccataggagacatgctaaagatactttattttttaataggataagttaaaattttcaaagttaaacagtcataagcttgaaatacttgaggtgaccaataaaaatgctacaaacattattaaagcagggtaaagatgggacttccctggccgtccagtaattaagacatcactcttccactatgggaggcatacatctgatccctttcagggaaccaaatgacaacccactccagtgttcttgcctggagaatcccagggatgggggagcctgtgggctgccatctatggggtctcatagagtcagacacgactgaagtgacttagcagcagcagcagggaactaagatcccgcattaaaaaatagaaaaaaacaaaaaagcagggtaaagattttttcaaaatatattgctttcagttccttgttttaatgttaaagaactcctttcaagatctaataacaaatgaaaagttcacacctctgctgcccaaataatttccatatgtttcccaaatttctaattctggaaaggtcttgcttagttaataagccttttgtctggtatatttacttgtatatattctaaatgattgaacacaaactgagctttctactgaaacaatgacattctcatctacaaaactatgaaaacaactgttatattattttaaaagtcccccaaacaaaaaaagtacagcatttaaatgtctaagaactattcaagcttaaaagattattttcatattttaagaagtcaggcagttgctaatattcctatatgtctatttttgacaaaaacctaaagcaggaaatcagaagggtctgccaagaatgaactatcaaaaagaactgaaaacatgacttcagagaaatcacactaagatctagttgctaacaattctcaaactattgagagtctcccagcccaataccatctcattttttctctatgattacgactataataaacacatttcataaagtcttaaccagccacaagctgattctgtctctaagaatgaatacttttttaaaaaggacatggttaacaaaaaaaaaaaaaccttaggaaggaaattttaatcaaaaggaaaacactatggtcaaacttcatccaagattaaaaaaaaaagtactgaatacagaattagggcctacattcaaacttttatcaaactgatttcttaccaacacagaaatttttttataagattaaaaattcacttataagtatagcataaaaaagtttttgatagttcaagaaaaataatggatgggtaaaacagattttttaaaaaattatgcatttcagcagtttgatcaaattctgacaagggaaatacatgacttataaacatttacattacaacaataaatactggggaaattaaaccagtaaatatttacttggatggcaaagcatagtggtaaagtgaacagacttaaaatttagctctgccacttactaagtacactgtcttaggcaaattacttaatcaatgtcagctattaaattcaaataacaatacttgtctagaaagtaggtatgagaattaaataaattaattcatatatagtatttattatgtattaaaaagaagagacatcaatttgtcaacaaaggtccgtatatttaaagctatgatttttccagtagccatgtatggatgtgagagctggaccataaaggaggctgagtgccaaagaattgatgcttttgaactatggtttggagaagactctagatgtcccctagactgaaaggagatcaaaccagtcaatcataaaggaaatcaaccctgaatattcattggaaagactgaggttgaaagtgaagctccaatactttggccacctgatgtgaagagcccactcattagaaaacatcctgatgctggtaaagacagaagccgggaggagagggggatgacagaggacgagatggttggatgtcatcaccaactcaatggacatgggtttgagcaagctccaggagatggtgaaggacagggaagcctggggtgctgtagtccatggggatgccaagagttggacatgactgagcgactaaacaacatagtatttattacagtagatggcatatttgcctttgatataatgatatataataatataaaaaatgatataatatttggaactatatatggcagaaaactaataattttttatatacaaaataagaaaaatggcataaaggcaaacagaaattaagagatggaggagcaactgaagtgcaggaataattctgaaaaactagcttgaaagagctagccttgaagaatgagttggaagcaaacagtgataaaaaggtagtaatcagggaaggcaaatacagcacaaacaaaagtacaaaggccctgatggttcagatggtaaataatgtgccagtgatacagaagactcaggttcaatccctgggtcaggaagatcctccggagaagggaacagatacccactccagtattcttaacctggagaatttcatggacagagaagcctggtgggctatacagtccatgggatggcaaagagttgaacatgactgagcaaataacacacacaaatagctgattcaatctgctgtacagcagaaactaacacaacattgtaaagcaactatacactaataaaaactaatttaaaaaaaaaggcatgaatgaacaggagttagggaaacaagtcatgtttcaggaagcagtctggtggaaaaaaaagagagagagagatttggcattaggagtactgttgagaagaaacaatgtcccaagagaaaagcaagaccataagaaaaaatctttctgttgtagaacacagtcctacgagcctatttaaaacaggaaaaatttatttctttcaaagattactaaatgccaaaaacaagcaatttaagatttttatgaagatataaaaaaggaagaaaaaattttgaagtggcaaaaaaaaatctgattcaacatcaaaatgtagtcatgtaatagatgaaaatggccaaatacttttctgtgaagataaaaaaagtaagaaactctcttatacaatattagcacagttagagatacaaacagaaaacagagatgtggaaaagataaggtttgagaacaaaggtaaataaaacatgaatgtcagagtcgaaggaaaaaaggaaggaaaagaatacataacaggaatgaacatcaaagtaagaaagaaaacattaacaatatagtaatggaaatgagataaagatattagagaagcttaaaaaattaagcataaatgtgcaattaaaatgagaaaatgaaagaaatgaaaaactagacaggcaatgtacctttaacttgaaagaaaaccaaaatacataatagttaacaaggtcaccacactgcagttgccctgtttacataattataaaataacctaaaacaaaggtatagctaatatacttgtatatttaaacaaccataggaaaaaagacagactacatctgaaaaagcaatagttgaaactgccaataatgaaaactggtaacagtgaaatgatacccaaaatgtacttgaagaaaataattgtcaatctagaactccatgtaagttaaatgctagtcactcagtcacatctgactctttgggaccccatggaccacaacccgccaggcttctctgtccacagaatttcccaggcaagaatactggagtggatcgccattttctctagaattctataccctgtaaaatatctttcgagaaaagaggtgaattttcaagcaaacaaaaactgagttaatcttcattagaagaaattctaaaggatgtgcttaaggcagaaggaatatgatcttagatataaaatcaaagattcaaactgcaatgaacagcaaaaaacccagtaaaatttgataaaattaatggatactataaaatcaagattagtaatgtcttctaagatctttgaacacagtatgaaactaaggaacaatagcatatgagctggaatgtaagttgatggaagttgaaagtctattacattcttgtactgataaattttgttaagtatttatatttgtagtcatttacagactcaccataaaaaaatataaacaggctgcactacttccaaataaataaagaaaaaatagaaaggttaaaagttaaaaaaaaaaaaagagagagataagaaccaaagagaagaaataaaggacatgacaaaatttttcagtaaaatagtaggattaaactcacatatttaccagtaattcaatcaagtaagtaaattaatgttcaaatcaaaagaagacagattttttttttttaaaacaaccaactaaatttacaggtgatacatctctgaaaaaaggatacagaaagcttgaaattaaaacatggagatagatatgctatgtaaacacttaccaaataaaggcagttatattaatgtaagacaatctatgccttaaggtaaaaacattactagagatagaaatacactttaatacaaaagctttcatccaaaattaaaaaattaaaaatctgtgtgcatctagtaatatagcttcaaaatataccaagcaaaagctgacagaattatatgaagagagaattccataatcgtagttggaagcgttaacacgttttcttagtaattgagagaatcagatggaaaccttactaggaaggcagacatacacagcatgatcagcagactagactagctggactgcgatgaagcaccgtaccagcaactaaagactggattccgtccaagtgcacatagtatgtttataaaaattgaacaaaggaggcaacatggttaagtcttctcaaattctgtgcaaaacatgtgcaaaacatgtactttgaccactatgcatttagttagatagaagttacaaagaaaagagccagaaaacctttatgtatttggaaattaaaaactatatttcttacataactatgactcacaaaagagcagtatcatttcctaatgaaattaatgaactggataaaaatgaaaacaattcatagcacaattaaaaaataagaagagggaaatttatgtccttaaatgtgcaatttatgtccttaaatgcatataataggaaaataacaaagtctgaaaattaaaaagctaagtatccatctcagtaaattataaaaagcatattaatctcaaagagaaaaagaagacaatattaaacacagagtataagtcaaggacataaaagttaacataaagaatcaacaaaccagaagttggttctctcgaaagataaacttatggtaaaagtaatgaattggggagggagaaataattcataaataataaatattaacacattttaagaaatcctacaaacattaaacagataataggggggtattacgtacagtttcatgctagtaaagtttgaaattttaggtgatcttattaaacctcaatcaaccaatcaaatgactctgcatagtcctataaagtttaaagaaattgaattggtaacctaaaactatttctgcaagtaaatctcaagcacagatagttcaatggtaaattcagccaagcatctgagaaagaaataattcacaacttatatttattcagaaaacagaaagaaaaggttaaatcctaaacattttatgtgaattagtctaataggtattagtctaattaggtatgtcatgaaagcataaaatatgtagattctaccctatccatatttatataggcataagcctataaaatataggagatcaaaccagtcaatcctaaaggaaatcagtcctgaatattcattagaaggactgatgctgaagctgaagctctaatacttcggccacctgatgcaaaaagcagactcacaggaaaagatcctgatgctgggaaaggctgaaggcaggaagagaaggggacaacacaggatgagatgatcggatggcatcactgactcaatggacatgagtttgagcaagctccgggagttgtgaaggaaggggaagcctggcgtgctgcagtccatggtgttgcaaagagttggacacgactgagcgactgaacaacaaaaagggaagtttctaggcaaacaggaagtctattaaagaaataaatatagcccaacattttcttaaaatacagactatacttgaagaagagcatattaatacatcaaatgcactaaaagtagtttttgttttctccaccgtaagaagtctgaaaaatgctttggattccctagactttcttatgatcaggcaggaacttcttacccttctctactatgtttttaatggagcacaagccaaaaaactttgcagtgtttacttccttatttgtccaacaaatcatcatcagtgaagtcagcagcaaactgaataaccctggaaggaatgtttattaactaaacactgttccaggccagtgaagtgtaaaaaaagtatgacttggctttaagtctcaagcatagttactaccaatttccctaaacttggttccttcctagagtcagaaggataagttaactgtctgcaatagcagagttacacatgattttaacttctcttaaatgagtctattgctaaacaggcagttctaaaacctgtttttagttaattacataaaattgctggtgggtctgttgtttaccttaacaaaatattaaatgccataaaaagatttagaacataaagttacttgtgccttcatctacaaagttaaaaaaatataaactcattctcagaaatggtatacatacatatatatatatatatatacacacacacgtatatactttcattagtaacattttgattataagagattattacatatgttctatttgtatatagtccaaagtatattctatttaaacacagtaatcatttatttgaaagtatcatcatcaattagataaacagtaacaatgcataaggttgagaggcaggtttgttattattacacagtgaagctgggagcaattcattttaacttaactttaaatttataaactcaaagaaggcactggttctgtttctctaactgtaaaatactcaaccaaatcctaaaggaaatcagtcctgaatattcattggaaggactgatgctgaagctgaagctccaatactttggccacctgatgtgaagagctgattcactggaaaagaccctgatggctgggaaagactcaaggtgggagaagaaggggatgatagaggatgagatggttggatggcatcaccaactcaatggacatgagtttgagcaagctccgggagctggtgatggacagggaagcctggcgtgctgcagtccatggggttacaaagagtcggacacgactgtgcgattgaacaagaacaacaactctggtaagttagtgcctaataataatgaaagatagtgataagattaaaatatatgaaaagaggaccaggaaagtttattattctttgtttctattaaagcaataggatttctatacaactttgcatcatttcacaagttttatactgagcattaagtgttctcactcacagtgcttctgactccaaatgtgtggattttctccttacaccaaccatttctccaattctctgattccaacttgatatccaacagagattcaactcaattctgacagtatctccctggagttagtgtcagatctcataagttaaaggacttagtctgacaagactatcctcacttcaaatttcaatcgtaaattccatgccactggtacttgtgacctaccagctgtaaattggggtttcccacagcacccttcagagtcaatgagtctagagtaatcacataatttaggaaagtagttactatcactggtttattataaaggattcaaatctgaaacagccaaatggaagaaaaatgtagggcaaggtacgagggtagagggtgtgtgtgtgtgactggaagtgtgtgtttgtgtaccttccatacccttcataccacgctccctagcacctcaatgtgttcatcaaactgaagtagtctgaaccccactgttctgggcttttggagagataccattaggtgggcatgactgattaaaacatggttttaggttactgaacaccatctttgactctgcttctctccccagagatcagggatggggctgaatcacatggtttgatctttatggagatctgaagttacctaaggacttccgcaccactcatctcagcatacaaaagacacttatcactctgcagatcccaagggtttttaggagttgtgtgccaggaaacagaaaagatcaaatacttatttttcattataacacaagcacctactctgtactctgttactatgacagttaaattttttaaaagcatgctactctatacaataagacagagttccttaaataacaaaacacaagaccttaaatatttaattggtatcatcctccaaaacaattaccttgggagattatattgttagggaaaacacacaccctggtcaggcaccatagtaaccatctgcatgagttattttacaacaggaggtcctagtaaagaacatggaattaataagctacctaccactctttcccaggaagactttgtgaaaaggtcaaaaggagaccatgtgtcccaccttctcccagatttctcactggcatctatctcggctgagcaatgcgtgtggccccaggaaggactctgagtcaaaatgattggccagagacaacccagaaactaatcccataacaataaaacctgagcctgggagccacatggcagagcggttctcctgggttcccttatcctactgctctctgcctgggcgccccttcccaataaagtctcttgctctgttggcacatgtgtctcctgggatagttcattttctagtgttagacaagagcccactctcgggccctggaaggggttctcctttctacaacaatattatgctctaacattcacatttctttcagaatcagatcacaggccagccaagaaaattagcaattatgtaacattcacattacacagacaatgtttccaatacaaatctcttcattatcaactatatcattattaactgtatactaataaaattttttggcttatccaagcactccccacccccagattgtatgcgtgtgtatatcaggcgctcagtggtgtctgactctctgcgaccctatggactgtagtctgccaggctcttctgaacatggaattctccaggcaagaatactggagtgggttgccatttcctcctccaggatatcttcctgacccagagactgaacctgggtctcctgtgctggcaggcagattcttaaccatctgagccaccagcgaagccccaaattacactattaaaaaaatgacaacttgttatcaacaaaaatatgtaaaggaataggtcactggtactgaaggtaacattaaaagaatttttctaagtcgctcagtgctagtcaatgttagcatctgtaagtacatggttttccaagatgaaaacttaaatttagatatgtgagttcaagtatgttatttgcttatttttcaagtttcattatcatggtatagacctgtcttacagaaaataagtccctaactcaaggaactaaatctttagagtaaaaagatggggaggagaagggaaaaaagaaaagaaaactaagaactgacataaacttatatattcttaaaaaaaaaaaatcctgtttcttgtatatacttaaaaatcgccctaataaccaatctaagttacatatttatgacataccatttacagctttttcaatcagttcttcacaggcatcaaaatcacccttcaataccaatttatcatgcagatctgttaacattggatgttccagggcaatcttagttttcttttgcagtgattcaaaggcttctgtatagttatgttgtctaaagtgttttaggcaaagacgaatagcttcctgttcacggtactactggaacacaagagaaggtatgaaaaaaagagatctggttagttattactttaggaaataagaagtgacaattactaacctaaagtgagcattttaaacattaactaaacatactaagcataacttagcattgtactaaccctattcattactatcattactaattctactattaaatggcaaagctaaagcttagtcaattgtaataacttgccaaaggtcacaaagtatatagcagaaagatattaaagagatgaagatatacagatatatatactggcatattatttcatgaagataaaagataccaaaagatgaaaccaggcctaattctgaactttcaagaaaagaaccagaaaaaatatttatcaaatcttacttaagatggtaaaaacaatagcttccaaggtttttactaatcgggcgacaacgctggtactgaaagcacagaagccattaaatacacgctctttgttcttagtagtaagttattagttgaatgacaaatatcatcaaatgttcatgtatttcaaattcacaaacaggttttatgactcaaaatcatcagggagaaactatttaagtttcacaattttttactaaccctgagctaattcattgattaaatagctataaagtaaaaaaatctcaattaattacaatccaaaaagaaatattcaaagtactaactctcttccctaaaaagatgaatgccaaaaaacaagatcacatatagaatttaaaagaaaatttaacttcaagtataagttatgacatagggaacagacttatggacaagggtaggggagaagtggcaaaggatgaaataaatggagagagcagcacggatgcatatacactaacatgtgtaaacagacagacaatgggaatttgctgtaggactcagggaactcaaactggggctctgtaatcacctagagggttgggaatgggcaaaagggaagagggagattcaagagaaggggggacatatgtatacctatggtcattcatgttgatgtatgacagaaatcaaaccaatattgtaaaccaatcatcaatcaaaaataaataattacttaaaaaaagaataagttataagacttccacaaatttcctaaataagaatacaacaaactgacatggaaccaatgcataataaccaataaaaatataatttacttgtcagcattactgtttaataaggcaggaaaatttacaagactcaaaatactcatcagtttatagtttctgatattttattaatgacaggttaccaaaacactttttcttaaacactatagcaaggttttccctcatcaatcaacaaaagaataatttatatacaaactaacttgacattaatagcttcatatgtttgctgctaagtcgcttcagtcgtgtctgactctgtgcgaccccacagacagcagcccaccaggctcccccatccctgggattctccaggcaacaacactggagtgggttgccacttccttctccaatggatgaaagtgaaaagtgaaagtgaagtcactcagttgtgttcgactcttagtgaccccatggactgaagcctaccaggctcctctgtccatgggattttccaggcaagagtactggagtggagtggcttctaaataaagatttccccaactatctggaaccattttaaatagtaataccttgttatcatgctgactttaatttctagaggtttacaataacacagagaacttgacaaaagaatgaccaaacaattttaagttctcaaatacaatctgtccacaatgttgtgggggaaaggtgcaatctccaatttctcacagtatcaagtgacttgtgaatatattcaagaaagcacaggtacgtatcagaggctaaagagaaaattttttccggtatccttactcgttaatttttttaaaaaaaagaaccaatagaatttagaagactgtaagtatctgctaagcgctgttatatgtataacactgtaatgatcatttttaatgtttaagaataccatctcaaccttgaaataatttagaatattacaggcaatcccagaaaatatattaaaaatatagaaaaacaaaaacccagcatctactttaaattgaatataatcaaatccccacgataaattagtcaaacaaaaagttcctcaattacactgaccagaaaagaaccgaaattctattaaaaaaaaaaaacttagaaagaacctatattgtttcccaacctcctaagagatgagttgacagttcagcccaagaagtcaggaagcagtgattagattaaagcttatcactcccctaacaagaaagagtcctcccctcaacaaaaacatagccaaaagagttaaatggatatacatcagaaacaaagatgaaacattaaaggtattaaaaaaaaaaaccaaagacccatttcttaataatttaaattcacacttctcaggttgcatttattatataaaatgacctatgaataaaattattaaatattacctttatactccctataagaataagatcacactatttatagaaactatctcaaattttagttctttaaaaggaaaagtaaacactgctattttaatcaacatgaacacaaaggaggaatacataagagcaatccagaaccacaactaccccactgaaaactacgtataaataattctatcaatacagatttggtatattaatgtaatagcagattctggtgccatactgcctgcgttgatgcactgcctggagcccttgacagctgtgtgtcctgaggcaaaatacttatcctctctgtgttctatttcatcatctgtaaaatacggataataattgtacctatcttatagagtggcaatgagtgaataagtgacaaagaaggtaaaacctggcaaaatgcaaatgtttaataaacactgattcatctttttaattaccattgctgttctcagtattttaaattaatctcaagacaagagcatgacacaattctctattacaggcatctgaaacataaaataaggattttaaaatacagtcctaccttactataccagttgagacagggttgtactacatcaggatcatcaatgccactaagttcaacataccagatgctaaagttaaagctgggtccccacgataagagtggaacttggagaagggaaaaaagaaagaaaaaaaattaacatagttcaaataaaactttagcaaagtaaaacaacaattcaaacttaatagcaaattttccgaatactttctacatgcccagcactgtactattggtgctagggccacagcagcaaaatgaaacatatgatctatgccattatgaggttgctttaattataaaaacacgaggatatattcaaagtgtcatgtatctatcccccaaaaacagggccagggctagatgatttattttagcaggttagtttttatcaatgccacaagaaacaaataattactataaaagttatttataatttaaactgtatcagagcacagaaagagacaaacttcaattgcttagcaaagtggcatatcccagaaaacaaaaccagaagagaaaagatttaaggataatatcagctctgagtatatattcaaaattttaaatactgatttttttaaaaaagcaaattaattctaccaggttttcactgcactaaatagaattagttcaaggaatggaaggttggttcaacaggagtgatattaatgtaattcatcatgttaagtaagtaaaagagaagcacatttgattacttcaacagatgctaagagcaaactaataaaatttacttaagaaacccaatactcttaaggaacagaggcagaagaaaactttgctaactagatttttttcttaagtatcaaaacctcaacccaccacccccctcaaacaaaccaaaacaaaaaaaaaactaacagagaaacattaagtattcccactcaaatcaggaacatgacaaagaggcctaatatctctactattcaacactatatgggagatcctagccagtgcaatcaggaaaaacccctgcaaattgagaaaaaaatatcacttgaagatgacttagtttatccacctaaaaaattcaagacatttaactgaaaaacttttatttaaagtttatatgcaatagcatattgaaaagcagagacattactttgccaataaaggtccgtttagtcaaggctatggtttttccagtggtcatgtatagatgtgagagtcggactgtgaagaaagctgagtgccgaagaattgatgcttttgaactgtggtgttggagaagactcttgagagtcccttggactgcaaggagatccaaccagtccattctaaaggagatcagccctgggtgttctttggaaggaatgatgctaaagctgaactccagaactttggccacctcatgggaagagttgactcattggaaaagactctgatgctgggagggattgggggcaagagaaggggacgacagaggatggatggcatcatggactcgatggacgtgagtctgagtgaactccgggagatggtgatggacagggaggcctggcgtgctgcaattcatggggtcgcaaagagtcggacacgactgagcgactgaactgaactgaactgatccaagaaaagaagataaagcttaaaatatctcagaataaactttaaaatatgcaaggtagtaaaattttaaaacataaatacttcatttaatatgtttctagatgggaaaactcaaaggttgtaaacatgttgattcccctcaaattaattataaatttaatgtaatctcataatccttatggtatagatcctatttttttgacatcagacaagctgatacgaaaaatatcaacaagacaaaatatctaaaataatagaaataataagaaaataaacatactaaaagataaaggaattttaagtttggtattagtgaaagaaaacaaagtaacattacaggagcacaagagtgtccaaaaatctctgaagaatccagaggaatttcatagaatcagataacatttcacatcagtaatgacaggacacagcagacagaagtttttatcttgtgactgacaggctcccacaaccctttcaggaggtcccatgtggtcaaaactacttttcgtaataacactaaggctttatagccttttctttttttcctaaactgtactgacatttgcactcatggtacaaaggcaatgctgaataaaactgttggcatcttggtaatgccataaaaagtagtagtatgagagtgttccagtgttcattccttaatacagtgtgaactgaactgtattcctcgccatcacacacctgcagttaaaatacaaaacgacaattcatttaagaatgtcttctgcaaatagacagccagtgggaatttgatgtatgatgcagagagcgcaaatccagtgttctctgacaacctagatggtgaaatggggtggaggtgtgagggaagttcaagaggcaggggacatatgtatacccatggctgattcatgctgatgcatagcagaaatcagcataatactgtatggcagctatcctccaattaaaaataaatttattaaaaaataaaatgcttttccataaaaaagaaaataacataaataaagtaagctacaacaatatagtttactacacagctaatatagccaacattttataactttaaatggaccataagatatattatatcataacactgtacgcttgaaatccatataattttataaatcaagtatacttcaataaacagtataaaaagtaaatatatagataaacttatttcttggtttgtgaaaagttttctaaattttcttaaatgatgctcactttcatagctcctagaaacgcataaattttttaaaataaaatgtcgttttgcctgtaatatacacttaaaaacgcaacataaactcctaaaatcgtgactgcattatcaatttaatgttaattttcactgcaatgcttaattgcgcattcatccttctaattaaaataatatgattaaaacatgaaaaaatgtctctgatgatgtgtaaaaattaattttagtaaattcctatcattaagtacacatcattttaatattctgtgtggcacaatggaaagtacaaaaaaagtacttttggtgcacatgaaagtatggtggcattctcaaggaaaagaacctgtgtaagttgtgagctgaaacagccattgaaatagctctgtaggatacaatttttccttaaaagaaaagctgacatctagtatttagatttcagtatctgccagacatttacctgtcatttcaaagacaacaaataacagtatttgttgccatggacaaaattcaagcttttgaggaaaaattagaatttcggaaattcagtattcagcattgtgagcttagctactttccaatacttttctgataagattggtggtaataataacaagtgtgatttttaaaaaatattatataatgaaatgttccaacatttgaaagatttgcataactcagtgaatcacattttctaaattaccaataaatgattttacaaaaccatacatggatgaaagactggttcaaggtacaaaacagaacaatggattttagtatcacaccaacatggtactgaataatgtaactaagaaactaatacttgtcaatttttgattaagtatcaaaacaaaatgtctacaatatttactatcaggtctaccaatttccaagtccactgctctttcctagcatatgaggctcagtgcagagctaaagatgtactaggtcagatgctttcctacttttgtcatctaaaggatgctgagtaaagacagagaaaagcaacaggatatacgcagggttcctggaacgtttaacgtgaccttcagcttatatgtgcaaataacacaaacttcaaaaagttttataccaacaaatactgaattatcatcactgttttggtgggcatttcttcagaagtaacattttaaaagcgttatctactacatcacagcaataaccattaagcagtataaaatcagaataaaacaacattctaaacccaaaacaccaagaaaacagtctgtaagtgtaacttattagttagtgatctgaaatccattcttaagttccaagtccaatttcaataaaatcaggaggaaaaaaagcttcctattacatctattcaagtcagcaaagtgttcatttattaaatccttataagcaactgtgggagggaggttaattaggaaatcatctcacaagatcttatattagacgaataaagagtacagtgaatttttaacaaactgaaggcatatatacaggatgaggagaatgatatatacccatttcaaatatacacaaatgatttttggtggcattaacaacactactgaatatcagacccaatctgtgttgtatatcagaaatctaaatgtgaactggagcagcaagcacaccttcctcgctccctaataaaagatgcctttgctctcacctcaaataaaaaaaatttttttagaaactcctcacatcccaaggctaagagactgtatcctaagattcactatcagttcttccaatgggataatcagacaaagacaagatcaggatcaatgcctctcagacattttcataaaatggcatgcatagaaaatgacaagatacttagtacacaagcacactaggttttaggattcagtgattctaggattggcagggagtcaatgtacatatgtacatatacattcaatatgctttggcagtatcattgggaaagctctggtctagatgactaaacagctgttagaagatgctagtaattttaagctcaggttctggaagactataaaaattcaagattaacttcgctgaaagagtgcatctactcttactcagttcagttcagtttagttgctcagtcgacatcatgaactgcagcatgccaggcttccctgtccatcaccaactcctggagcttcctcaaactcatgtccattgagtcagtgatgccatccaaccatctcatcctctcgtccccttctcctcccaccttcaatctttcccagcatcagggtctttttaaatgagtcagctctttgcatcaggtggccaaagtattggagtttcagcttcagcatcattctttccaatgaatattcaggactgatttcctttaggatggactgtttggatctccctgctgttcaagggactctcaagagtcttctccaaaaccacagttcaaaagcatcaattcttcagtgctcagctttctttatagtccaactctcacatcatacatgactactggaaaaaccatagctttgactagacagacctttgttggcaaagtaatgtctctgcttttcaatatgctatctaggttggtcataactttccttccaaggagtaagcatcttttaatttcatggctgcaatcaccatctgcagtaattttggagcccccccaagataaagtcagccactgtttccactgtttccccatctatttgccatgaagaaatgggaccagatgccatgattttagttttctgaatgttgagctttaagccaactttttcactctccactttcactttcatcaaaaggctcttcagttcttcttcactttctgtcataagggcggtatcatctgcatatctgatgttattgatatttctcccggcaatgttgattccagtttgtgcttcatccagcccagcatttctcatgatgtactctgtatataagttaaataagcagggtgacaatacacagccttgacgtactcctttccctatgtggaatcagtctgttgttccacgtccagttctaactgttgcttcctgacctgcatacaggtttctcaagaggacaggtggtctggtgttcccatctcttgaagaatttttcacagtttgctgtgatccacacagtcaaaagctttggaagactgtaaaaatcaagattaaccttgctgaaagaatgcgtctactctacttacaaatgaatgaatgtagtaagtacacaaaacactcagcacagtaactggcatatggtaatgctcaataaatgctatatattagtattattaacttctattcctataataattttcttcttaatagtatacttttaaaatgttacctctctatatgctctcatgaaagccaccattggggtacgttcttcccccacctccccacctccctctgacaagacacagtactcatcctagacttccagactcctgaggatccagaatgcaggttgagtccggtcaaagctaaagcttctctctgaacctccgacacccactcaggctacaaaaatccaaaaaattcatagaaatctaagtcatctcatccaccaaaaacgagaactcctccagaatccttccaaaaaatcagtacttccttctgccttcacatcaccttatttcctaatacaaatctttctagtcaccatataagtaataaccttatcccattcaactttgttttcagccatctgatctaatcacccactgaggttttcccgtccaaactttaaacttgctctcttgaatctaaccacccaaataactactctccttccttactaaactttttttttacttacaaagcttacctgaaactaagcttcttcctaaggccaactctcaactttcacactaagtcctactgaagacttcactccagtatgggctctttggttttttgtttggtgatttcccttggatattcaatgaatgctgtgatccaatccctctcagatttaaatgtaaaatgaaaagtacacaggattcagagtaagcaaactatattgaaatatagctataaaaataactaagatacaaaattatgatatagaaatatatatgcttttattagcacattagctaacaagattctagtggcaggtctaataattaccataatttcaaagatataatatttgccacagtgtaatgtgatgagaaatatttataacttctatccaaaacaagtcacaggtaatgccaatactataagctactgcctatattcataattgaagaaaatgctaagagtttagagaacacaaagatgtaacacacagccactgattaatccctataaatctctgtataataaactcaaaaagtataaataggatgtctctaatgaggcaagcagtatgcttgatgcttctgaaatatgagcaaacagaagacagttgctatcaccaaggatttaagaatctacttgaggaaacaaaactttcacccatcacagagtaaaagaattcaacattcataaaaagacagacttaggtttgtatcctatctctatgttctactgtacagtcttggtctaatcatttaatctacctctaaacttcagttttctcatctgaaaagtgagcataatatacctatttcacagagtattagatgtttcataaacaacgtctatttatcactttaaagtaatataagcacatatccaaaagcatataccaaatgttatgtctttgatccatcacttactagctatataccctgggacacatcatttgacttctagtctcattttccttaaccaaaaaaggcaagattttttatcttccagtgaaatgctcaaatgagattccacttgtgaaaacactcacaaatgcaaaagcagtaaaaataacacattcaactctttgcaaccccatgaactgtagcctgccaaggtcctctggttcatggaattttccaggcaagagtactggagtgggttgccacttccttctccagggaatcttcctgacccagggattaaacctgcaactccttttgctcctgtactggcaggaatattctttaccagagccacctgggaagcccattaaaagcatatgaagttctaagtaatgagtgctgaaatgacatgaacgctcaaatcatatgcatatactttttctatgtctaactgatgcataagaggacctctgttctcttataaattttttaagggaacaaactattcaacaaccctgaacaggcttctattcatagttctaacgaataatattagaggattaagaatttcagaggcagcagtagtagtttccttcaaagaaaactgatgggtatagaaaatgtactctgaaaattcaaataaaataactcaaaaaaagagaacatttcattttgcatgactaagcaatcagatgtagaataagtactttaaaatttttaaacctaaaattttaaaatctaaaatattttcactgctgctacatttggaatgttagaactgttcaagcattgttcaagaatgtaagaatctataagaaatggctggcatgcatactgaggaaagaattatttatcagcatgaaagaagaaacaactaaagaatttattttaaaaattagcttattcatcaattttcatagataaacaggatacaggtttttatttccaattacttattataacaaactatagcttctgctgcaagcactgttacaccaagctcaacctgggcagctacatggtgctgcaaagaggagttctactgcaaactccactatcagcagctgtttaagagcaaaggcaactacgactaaggctttggctagaagtagcacaaggagctctgggcccacacggaggcggacctcggcaccaagacagcctgaggcccctctaaccatccactctcccccaccctcgctcagatagataacctgcattaggcagcaggaagggtgggagactggacagccgtgcccgcagtgagggtgggggcagcgtccaaagagcaagaggccaccttactcaggcaggttacagaggcagggctctgctccagaattccttctctccctcagctggtaggggttcaagaaacaggactggggtttgctcatttccctgcttcctgtttctttcaggcttcccaggtggtgctaggggtaaagaacctgcctgctaatgcaggagacataagagacttgggttccatccctgggttgggaaggtcccctggaggagggcatggcacccaccccagtattcttgcctggagaatcccatggacagaggagcctggcaggctgcagtccacggggttgcacagtgttggacatgactaaagtgactagcacacacgcctgtttataaaaaaagtaaaaaactgaaaagtccaatgattctaaagatagttttccctctataaatagtcttttcagatattctttttgtctaattccatgtacagaggagcgtggtgtactatactccatggcattccagagtcagacacacacacaatgaaactatttgactcaatgaaatgaacaggccaacttgcaacagactggcaaataataatggagctgttcctttcaaaagaggatttttctcccaaatcaaaacacaggattctggcttttattactattctttaaggaatatgattcaccataactacaattttaacatactattttcaaaggtatgaaataaagatggaaattaacagtgaagtcctcaactttcataccctctaacacaacttataaacaaaataatcctaaaaacactagttttgaggaggtattacaaatacttttaaagttaaaacacttgctaaaaagataaatgccttagatagcatttttcaagaattactttgaaactaattagtgggttagaaattagttttatgtgtttgacaaatattactacacacacaaaaatgaaatacaaaagaaaaaattagaaaataaccacaatatactgccttaaggaatccatcagtatttggttttagaatgatgcaactttagaactgataaaccttccataaaacaatcaaggctctcaaatcactgtatctcattaaatgataaagtatttagaaaagattctattttaaataactgtcactcaggtacagatttataaaccggggccagccaaacagtaaacattttgggctttgtggtctatactgtcttttgcagctactcaactttgccattgtagtgcaaaaacagagagatactatgtgaaaactggcatggcggtgttgccataaattttattaaaaaaaaaaaaaattaaaaaaaaaataaaacagtgaacctacaggattgggcccacacaggctgtcgtttgctgattaatggaataaagaatttatttctattccagaatgctaaaagccttacctattttaatgaatcgacacggaaacatctgttcatcaattttatgctttaaggtaaatgtttctttgttataatcattctttaagccactgtggaaaaaaaaataaggttattaaatctgatttcataaattagtaaatatactaaaacaaagattaataacatacccagattttaaggtttgacaaatacaaaagggataatataatgaagtagatgaacatgagaatatacgacaaagcttgtacattcacataaactgcactatatggtggtctcttaattaaatgagagataatgaaaatgttcagtgttaattaaagaatgtgactacagtgcatgaaaatgtgtgacaagatccagtgtcctttgtgtagaaagaaagaaagtgaagttgctcagtcgtgtccgactctttggaccccatggactctagcctaccaggctcctccgttgatgggattttccaggcaagaatactggagtgggttgcgatttccttctccagatcttcctgactcagggattgaacccaggtctcctgcattgtaggcagatgctttaccttctgagccatcagggaagtactgaatacaatataaaatattcaagcagtaagaaaattgaaaaacaattcatactcatatcttacaacctgaacagagccagatatttgaattttctaaagatattaagtcattaaattctgactgagatgccaatgttcctttttatagctcaatacattttcaaagacaatcttactctgttggtttaatagcatccagtttaccctatataaaaagaaattaatataatttctgtacttaaacaacttaggactgattcaagtatttatggaaaagtcacttaccttcaggctgccttatattcaactgacatactttcatggcttaaatgaaatgcactctagatgtaataatacttatataaaatactgtgataatgggacacactatgtcacaaatatattctaaaactgcatgacttcatttgtccgctccattttataatccatttttcatcatctagagggcaaattaacattcattcctggtggtctatgctgtcaaaattaaaatttactgagttccttccaagaggtggggctttctggtggctcagctggtaaagcatatgcgggagacctgggttcaatccctgggtgggacagatcccctgagaaaggaagagctactcacttcaggtactcttgcctgaagagttccgtggacagagaggagcctggtgggctatagtccacggagttgcaaagagtcagacatgactgagtgactgacactttcattttttattttctttttcaagaggcatgctctgcacttggtgcagtcacataattttactctgtttagtctccaatttatactaaactctcagggcaaccaatcttaatgttttcaacagattatatatttttatagcaaggattacagcaaagatttcaattatagctcaaaagtatatctgaagtcattaacattttaaaaataagactgaagaataagaagtaaaaaaataaccccaattttattctttctgctttggtaacaatattaattagtatctcgatagaaaaaagttgactcaagccacaatattaaaataaagcactagaaataaaatagtagaagtattcttttctcccttgtaagaaatatcaagccatgaagatttagctacaaagagactaaactaagactacactaagacagctccttcctccccataatcataacccacctggacaacagctccgtcatgttttcttcattcatcccaccaaagactttaaatttcttcaaattgcagacatgagttttctcatattttccaaatgtgatattctggactatagcaggcctttcaagcttcagaatcaagtactacaaaaaggaacaaccaaattatatcctcctccacttaagacaaatggttagacaatctgaataattaaaatattggacaatggactgaataaggttcatcctgtccatcctacaccaacagattttttttttttttaatgttaaaggatagcatgcaacagccaggctaccataacatcaccactttcacccaggaaactacattattttgaacaatgtagatgaaagaggggaaaaatggactagtaacataactgctaatcaaggaatagcatttaataaaataggctatgaataatcaaataaattagaatacaaaattagaatacaaaagtgacaattacatagtctcaatgactacacttcactaataaattcaatattcaaaatcagtgataaaattttaacctagaaaaaagatttaccagtcacccctgacaattttataaattaaaaaactcagacctaccatacacatgtctaatgcagctcaagttttctaactatacacagaataaaatgggatcagttacttagggaatgtattttacattatgcagactgttttcaattataaaaattaaaaaggaaattacctatagtcaaatacatgggaggaaagctatttagacaacaactcagttgttatgctgcagtggcttcatgctttgtaataatcggtaatactcatggtaaaggagaatagaatgaagtggatggtcttactttgtaccaaacacaaaaattaactcaaaatgtaaccaaaatgattcaaaatcaatcctttacaataaaatataaggcctaaaggtaagagataaaactataaaactcttaagacaaaaataggggtatatctttatgactctggtttggcaatggaattctgagatattactccaaaagtattagcaacagaatacaaaataaactggtctttatcaaaattagagttttgtgtgtcaaaaggcactatcaaaaaagaaaaaagacaatctacagaatgggagaaaatacttgcagatacttatctgatgagggcttagtatcgagaatatataaggaatttgtacaactcgacaaaaagaaagacaacctaattttaaaatgggcaaaggacctcaatagccctttgtccaaagaagagaaacaaatggccaacaggtacatgaaaagatgttcaacaccattagtcaccaggagctgggttatgggcaaaggagagaatacttaattggtaccaggttttttatagagtaatgaaaaaaactaagtagaaatgacagttgtataacactgtatatttgaacacttaaaaatggttaattttatgttatgtgaattttacctcagtaaaataaaagaatgaagttggtggtaacacgaaagatgatgatataatcagaaataatatctagtgagtattaattcccttgacttacagattactcaggtttttatgtattttatttcattttggtgagataagacagtaaagcttggtggctcagacataaagtatctgcctgcaattcagaagtgaaagtggaagttgctcagtcgagtctgcctctttgcgacctcatggactatatatatacaattcatggaattctccaggccagaatactggagtgggtagcctttcccttctccaggggatcttccccacccacggattgaacccagttctctcacactgtaggcgaattctttaccagctaagccacaagggaaccaacctggctgggtttgatccctgggtcagaaagatgccctggagaagggaatggttactcactctggtatcgttgcctggagaattttcatggacagaggagcctggcgggctacagtccatggggtcacaaacggctggaaatactgagcgactaacactttcacttatctcattttaataggagtaggaggaacaggagtagtattttaagaacaataatcatcctcttcatcctcattttatggataaaaaagtttggcttagaaaggctaagtaacttgccattgttacacagttaaaaaatagcagagtttaaaatcagtctatctgcaaaggaggcaagaatatacaacggaaaaaagacagcttttcagtaagtggtgctgggaaaacaggacagttagctacatgcaaaaggacaaaatcagaacattctctaacatcatattcaaaaataaactcaaaatggattaaagaccaaaatgttagtccagatactataaaagccctagaataaaacatagaatactctttgacataaatcacagcagtatctttttggatctgtctcctgaagtactgcaaataaaaacaaaaataaacaaatgtgacctaattaaacttaaaagctctgcacagcaaaggaaactaccaacaaaaacaaaaagacaacccacagaataggagaaaatatttacagcaatgcaaccaaaaagggattaactttcaaaatatataaacagttcacatagctcaatatcaaaaaaccaaacaacccaaacaaaaaatgggcagaagatttaaatagacatttgtccaaagaagacatatttggccaacaaacacatgaaaaaatcctcaacattgctaattattagagaaatgcacatcaaaactgtaatgaggtatcactcacactagtcagaatgataacatcaaaaagtctattgtctattggggagggtatggagaaaaaggaaccctcctataatgctggtgggaatgtaaactggtacaaccactatggagaacactatgaaggttccttacaaaaattaaaaatagaattaccataggatttagaaatttctctcctgggcatacatctgtagaaaactataatttgaaaaaacacatgcacctcaatgttcacagcagcacagtttacaatagccaaaacatggaagcaacctaaatgtccactggcagttgaatggataaagaatggataatgaaatattatacatccataataaataatgaaataatgtcatttccatcaacatggaaattatcataataagtaagccagagaaagacaaatatcatatgatatcccttacatgtggaatctttaaacaatgattcaaatgaactatttacaaaacagaaatagatccacatacacagaaaacaaacttatggttaccaaagaagaaataatggggagagataaattagaagtttgggatatgcagacacacatgactatatacaaaatatacaaacaaggatctactgcataacacagggaactaaattctacactttataataacctataagggaaaagaacctgaaaaagaattatatataaatatgtaaaccaaatcactgtgctatacacaggaaactaacacaacaccgtaaatcaactgtagtgaaaaaaagtgaagtcgcttagtcgtgtctgactctttgtgaccccatggactgtagcctaccagctcctccgtccatggaattttccaggcaagagtactggagttggttgctatttccttctccaggagatcttcccaaccctgggatcgaacctaggtctcctgcattgcaggcagatgctttaccatctgagccaccagggatgccattaaaaaaaaatttttttaatcaatctgactgtctgatactgctggttgactgacccaatttccattctcaatccaattcttcctagccacgttccaggcaaaaatagatacatggcaaaattctggtcaatgagatataagtagaagtcgtgggataaattttgcttttcaaaacaaatgttacttctttaccatctgaactgagcctcccacccccctgcaacaagtaagaaaagatctactaacagtcatctgtgagacactcaactttcaccagcagctgcctaactctagttttcttgtgctggcagggacagagatagggacggtgatagggaaaaaactcgtttgtttattaacccactgttataggatcttctgttatttgatgctaaaagcattcctactgattgactaaccccacagtcgaacctttatttaaccactatacaatcacaactgtttaggtttataaaatgtttatattctaaggagctattaagatttctttattatagaaattgccataggaaaattgagtcttaaatcattatccttctcatccatatcaaattaataggtgtggtaacatgatttttggttcactgagtttcgtaagaatacagctgtatattggagaaaagactacacagccaggtaggaaagtattcatatctctagctttctcatgaaattccacttcctcccatctctttccccttctttctctctttggtcattctttaaattctcaagtttaaaagtcagttttccctgacaattggttagtcaggtagtaaaaacagatctttacattaatacaacctgttgtatactatccatcaccccatatacaacagctccaaatacaataggaagcatttgtctacatataattttatttatgccaaataggactttgttattaaaaattatgtaagtaaaatgcaaattctctaactgaagtaaagcacaatgatctgacatacattacaggtaaaaattttagtgtttaaccacattatttataaattttgtaacttcatttttcaaactctttggcctcaataatgaatatgttactattaaacagtgttatcccatagttaaatagatttctgttacttttaatttaaagaaataactgctgcagattcagtaacagaaactgtaaaaataaattgagaatgaacatttgaaaaaaactattttacaatctctattaccgacctttaaattaagtattaataaattaattttaaaacaaaacataatgacccacaatctctttatcaaagcaacttaggttcataaaggatcaaagaactatctattacatgattcttaaattaggcatagaattaagcaaacaataaaaaaaaaaactgctcacaaattcagtccatagtgatttttcaatattaaaaataaaatatatataaaaaatcattttaaatcatatgaatattaacaatttataagaaataagatgatataaaaggagaatactttcgctttagataggtctatcatcaaaagtatctcccaggagctgagccttaaaggatgaggcagcatagtgtcctcaggctgccataacatattaccacaaacctggtggtttaaaacaacagaaatgtcttctctcacagttctgaaggccagcagtctgaactctagatgttagcaggacaatgttccctccgaaggctctaagagcaggtcctcctttgcctctaccaggatctagtggctcctggtgctctttgcttgtggcagcgtaattccaacctctgtctccatccgtcacatgaccttcttccttgtgtccctctgtgttttctccttttctgtgtctaataaaaacacttgtcatttgatttagggctcaatctaatccaggatgatctcactttgagacccttatcttaattacatctgttaaaacctttatttgaaataaggttacattctgaggttgcacatatcttttttttttttcccccagagggtagtggggagcactaatcacctactacacagagccagtcaggcaaaaaggcttatgaaaaatgagttctggaaactgttaaaaggccagcatgattggagcctagtaagcaaggtcgagaatgatatatgttgagattgaagagaagttactatatcatacatcataaatgccatagaatctgttaagcacaatggaaagccaagatatgattaacatcacacacagtctatctggtagaaaatggatcagaggaaatggccaatgaattggatacagttataataattccaacaaaaggagagatgaaggagatttaaactcaggcagtgtgaagacagagaggattagacagttttgacatatattttggagcaagaatgaaagggattaagtaatagctggatatagggatggcttgctcagttgctcagtcctgtcctactctacaccaccatatggactgctgtatgccaggcttccctgtccttcaccatctcccggagtttgctcaaattcatgtccattgagtcggtgatgccagccaaccatctcattctctgacacccccttctcctcctgccctcaatctttcccagcaccagggtcttttaaaatgagttagttcttcgaatcaggtggccaaagtatagggaggggagaaagtagcaatagtggtgatttagtttttgacctgaataacagggtaattgaaatatcatttactctgatgggaaggattgacaaagaaattggcagcatggaaatgaaactagaaaagtccaagattatatatctgtgtaaatctcagtgtaataaatcagtgtctaaaacaacagtcacttcatgaagtcccatcacttcatggcaaacggagaaacagtggaaaaaatgagactttatttctttgggggctcaaaaaaatcactgcagatggtgactgcagccatgaaattaaaaaacacttactccttgggagaaaagttatgaccaacatagacaacgtattaaaaagcaaagacattactttgccaacaaaggtccatctagacaaagctatggtttttccagtagacatgtatagatgtaagagttggaccataaagaaagctgagcaccgaaaaattgtggtgttggagaagactcttgagaatcccttggacagcacggagatccaaccagttaatcctaaaggaaatcaaccctgaatattcattggaaggactgatgataaagctgaaactccaatactttggccacctaatgcaaagaactgactcactggaaaagaccctgatgctgggaaagattgaaagcgggaaaagaggacgacggaggatgagatggttggatggcatcatcgactcaatggacgtgagtaagagcaagctccaggagttggtgatggacagggaggcctggagtgctgcagtccgtggggttgcaaagagttggacatgacctagtgattgaattgaactgaactgaaaacaacagtccccttctgtcatcccctctcatcctctgtcgactagaaggggactgttgtttcagacacttctttccttagttacttgtaaagtctcgtcacacaaccacttctttttctttgggatagttttggtcactgcttcttgtacaatattatgaaccttcatccatagttcttcaggcactctgtctaccagacctaatccctgtcacctctaccgtatagtcataaggaatttgctttaggttgtaactgaacggtctagtggttgtccctattttcttgaatttaaagcctgaattttgcaataaggagctcacgatctgagccacagtcagatcatgttgtttttatggactatatagagcttctccacctgtggctggaaaaaaaataatcaatctaacttcggtattgaccatctggtgatgtccacatgtagaaaggtttctagggttgttggaaaagcatgtttactatgatcagaatgttctcttgataaaagttggttagcctttgccctgcttcactttgtactctaagatcaaacttccctgttattctgggtatctcctgacttcctacttttgcattccaatcctctatgatgaaaaggacatcttttcatgtgtgtgttctagaaggtcttataggtcttcaaagatccagtcaacttcagcttctttggcattagtggctggggcacagacttggattactgtgatgctgaatgatttgtcttggaaacaaaccattctgtcgtttttgagattgcacccaggtacagcatttcggactcttttgttgactatgagggctaatccacaactgagcgtcatttctgctttggtccagccccttcattctttctggagctattagtaattgccatctactcttccccagtagcatatggaacacctccaacctgcagggcttatcttctagtgtcatattttttgcctttgcatattgttcatggggttctcacagtagaatactggagtgggttgtgatttcctcctccagtggaccgcattttgtcacaactcttcactatgacctgtccgcctttggtggccctgcaagcaggaagggtaggctaactctactgttttgcgtaaatgcagttgggattatgatcaggactgcctttatctataatgctgctaaccccaagtcttgaagggaaaagataaacactagctgccagtcttttggttgtacaataaaaaggcttgggtgaaaaccctttttctggattggctccactgatgctttgtccttgatacaggaattgttctgccagtaagaaactgccttttaaagctcctttcatactggacaatacccctggctacctagaactctgtgagtgcaacatcaaaggtgtcaaagtggtctgctgctgctgctactaagtcgcttcagtcgtgtccaactctgtgcaaccccatggactgcagcctaccaggctcctccctctgcccatgggattttccaggcaagagtactggagtgggttgccattgccttctccgtcaaagtggtctacttgcccccaaatacagtgtctctaattcagcctctagatcaggagtcataaagatctttaaggctcatactctatgggaaagattgtcaatgctatggaagaaaactctgatagaacaccatgaacatctggaagaatttcaccactgaagatgccatggttattgtagaaaaagctgtgaaagcctttaagcccaaaacaataaattcctgctggtgaaaactgtgtcccgatttcacatatgacgtcacaggatttataacagagccaatcaaggagatcttgaaagagagagttgatatcaaaagaaaggtgagggatgaaggattccaaaatacagaccttagcagaattcaagagctaacagacatcaaaccagaggacttaaaagtagataacttgatggagataagtgcttctgaactagtgccagacgatgagaaggaacaccagaagatgctatgccagaaaacaaactgacaacagacgacctgacagaaagaagggttccaattattcaagactgcttttgacttcttttacagcatggactctttcatgacagacgcgctgaaactaaaacagagtggaagaaggattgctactgtataaaaacatgtctacagtaatgaaaaagcaaaagagtcagaagttaccaggtattcatgcacagttacaccaagtgtgcctgcctctcccggcaactcctctccatctcccattgaggccactcctgagacagttacaccaacccctcatcttcctcctcctccgcagcctactcagcatgaacatgacgagaaccaagaactttatgatgacccatgtccacttaatgagcaagtaatcatcatgccatacaactgataaacctctctgctgtgtatgtgtgtatcattgtgtgaacatttagtaactgtccagcaagaactatatgaaactatttttgtgcgatcatcattgcctaagtattcattgtatagaacacttctgacttctgtacaagactttactgacatagatagccaatccttacataggcatgaggtgactaacattttatataaaattaatagttttactgttttgcaactttattttcaaataattatcattatttgataatttcatatcaatagtatcatacagtatgccccctctctctttagtaattggaaaaattacatatcaacctatcaacacagttaagaggctgccaggaggcagcgtgaggaactccgcccgtagcaaaggtcatgaggaaggaggcttcggcatacgcaaaggcgggatcgagcctcaggaaaccccctgttcccgagcatctacccccaaaaccagagtctgatttatgctctcacctacacctctgactttacggggggctctcccccatcaccatttctctcggagaaggagttaacttgcagctccagttaataaaaattcctgggcgtgacaagagtgtttcaacttaaaaactcctctgaaggttctctagcctgcctgagcaggttcgtccagccacatgtgattgtttacagcctcccaaccgtgagaggcacgagatgctttaaactttttatatacacactcttttgagaagattatacacactcttttagaaaattattagtatagtatagtagattgattagaacttatatttgtgaagggttttcatttgttgagccaatatttgctgctaaatctccatattccctgcccttataatgaatataactaacatataggagaaataagtattaacctttaagattaatcatgttaaaccttaggctaagtaaattccttttcttgattgtaacccactacaccctcaccctataggaatgtaactttatttggagggtggcgcttggtttaagaaaaaatcacccctggagaaaataagttttctggttaactgaccgttatcagaaaggaccataacatgtcagcagacctcatggccagaagatgatgtaaaacccctaagacctttgtataattttatatgaagcacctgattgtgacaagggtcaggtctgctgacccccacatgactctgtattcatccctacatataacaaaaagtatacaagcaaacctgaaaaataaagaaatcggatcagtttctggaaagactgattcccccgtgtcgttctttctttccccttctggctgaattcccatctggaacgtgggtactcaccaagcctgctaattttgcctaggcttctaagatcggaccggggaggcctcagtgcctcctctcctttgggagaatggaaagacgcctgtggtctacataggtggtgcaaattccttgtcttggagttttattggtattccacataaaccaagttattcagcctctctttctccactaattttcctactacactattctaatctctctttatatctgtaattaaataagttttttcctaggatgccaattctgtctccccttcaaattaccctagatccaccggggctggaccccggcaagaggcttttgagacaatgtcaataatgttttaagtactgtattatgaatacaactgcaataaaatataccataaatattttatggtatactcattcattagtatatagggtaagatactgtgaagcaactgtatcaattacaatactactgaagaattgatgcttttgaactgtggtgttggagaagactcttgagagtcccttggactgcaaggagatccaaccagtccattctgaaggagatcagtcctgggtgttcattggaaggagtgatgttgaagctgaaactccaatactttggccacctcatgcaaagagttgactcattggaaaagaccctgattgggggcaggaggagaaggggatgatagaggatgagatggctggatggcatcactgactcgatgcacatgagtttgggtgcacaccatcggtgtcccgatggacagggaggcctggcatgctgtgattcatggggtcacaaacagtcggacacaatgagcgactgaactgaaccaaaccataaagcaattacattcctgcttcttcatttatcaatgaatggttatacctgtaaatatatacaaatttcttttccacattttaccttttcatttttggtctctagtgttggtaatacatctacagagttttgtatcatgtaataaaatgctgatgtagatatggacagaccactcatcttgtacacagcaaaaacttatgatatcaataaacacagtagagtaaaagtactttctattccttatgattttcttttctctagcttactttattataagatacagtattaataaataatacatataacacacaaaatacctgttaattgactatgttatcaataaggttttggaacaacagtaggctatgagtaatgttttgggggagtcagaagttaccatgcaaattttcaactgaagaagagttgccacctccttgcattgttcaaggatcaactgtatctctaccttatgatgtagcaactttacctccaaacatttatctcaaataattgaaaatatgtatcatttaaaaaatcttataaaagaatatttgtataagctttcttcacaatcaccaaaaacttaaatgtaacaaatatccataaacaggaaaacagatgaacaaattgtggtatatccataggaaaaaatggtattctgttaatgaaaagaaatgaaatacgatgcatgtaagaagtggatagcaaccccccacctaaaaattcgaagtatgaaaagtcatatacaaaagagtgtgtatatgctctgactccatttctattaaattttagtacaagcaaaactaatctgtggcaaaagaaatcctcttgcctccgggtaaagtgtgggagactgaaggattcactggtaagggacagaaagaatctttctgacgtaatgaaaatgcttgacatcttgataagcatataaattaatgtgtgcatttttcaaaatgaataccatgcactttaggttcatgcatttcactatatgtaaattatattaaacaaaactgtattattgaacacatacaatgttcttttcacaaactagggcaaaataccataaagaaacttcataaatttgctggcaccctggttccacagatagaaattacatcaaaatacatatattttctgtttattcctcactttaaaaaatcttattcccataatattgttatggttcacctaacagaaagaataacaggagtgtattgcaaaagctataatatacacataccccaagtgtattaaataatcactgaagtttcttgaccttcaatagcagaatgcccacaatttgttaaactttcaactcttctctctccaggcccagaaagcaaagaatattacctaatatagtacttttatttaaactacctcataaagaacttatagttgtagcagaaaaattatgatttaatctttcttaaaacaattatcaagacatatataaccacctgtacattttaatcaaccctagggcactccccagtcaccctgaaagacgtgttttccatggcagtattagtaacttctataaaacatatctgatgtgggagaaggaggaaattactatcttaaagtatgtatggggttttcgttcatgctacatttactctctaccagtacggacagataatccaaaattgacagcaatgctttcctcactaggtcgccaagtatttgctcccttccacaatggaaatggctttcactcttttttctaattacataaattataagttgaaaatgagaatcagaacaaaagcgtaagaacaaaatttaaaagaaattaaaattcctaaattccattattctgatacaaccaccaccattttgatgattcagttgaaccctgttttacacacttacacagacacacactttacgtaatttgaatatcatatatgttgtttttcatgggaataactctttcaaatggttcttttatctccctttcctctttcatctcctcctctcttaaataaccaatgtcaacaaccagatatatatcctttcatatctttacctggtctcactgtatcaaataaaaatatacacatatacatacagacacactgttgaaggacagagagttgttactcaggtaacaatagcaggatcctattacagatgtttctctgcatcatgtttttctcattttatggaggaaattcctccaagtcaactggtatgaagccagttcactgtatttaaatgactgacaatactccatgaaaaatgtattcaaccattaccttgtagataagtactctttttttctcctgagccaaaatctgaccctcagtaacagggtgaaataatgtttgtttttaactgctaacttctgtggtaatttgttacacagcaattgaatgactaatatagactccaaggtcaaaagaaatatcaacagttctacttactaagtagttatatccaaacaataagtattcatgtcctgacaactgagtagccacctgaaaaaaattcttaacatacattacaagaaaaatatttctatttttatctaccccattcttagtccaacacaagctttagaaaattgtttaagagttcattcactctgggatgccattctcaaaacatgccatacgtcctagcatccatgtatacacatagtccttcctctttatggttaaaaaaggagtagaagagaggctttgagtttgtttcccatccttttctaaataactacacattaacttccatatccacttaagctgcacatactgaacataattacaatatcttactgacaaagtcaagcactatctatcaaactgtatattctaataacagcaatgccttagatctatgcagtctaatacatagccactagccacctggggctaagtattctaaactaactaaaattaagtaaaatttaaaactgcattccttagtggtactagactcatttcaaatactcaacagctatctgctgttagcaactgccatacaatacagtgcagattataagaatatatttatcactgtagaaagtttactgcaaacaatatcctagaggttaatgaaaaacagagtattcttgcactaaagacccactaaatgtcatactgttggttttctacttgttacttattctatcttcccttttatgacactttgccagttatcaacttgctgttgatgtgcctatctttcatagctatggtccccatgcacaaagctgcttccagctgctgaaacctgaagaaacaatgaaccaaacagaataacattaaatgcaaagtggattcttaagaaaaggctattagaacctaaaaatctcatcacattgtttttgatttttcagagtcctctttttctttctttctaatctcagacctgtttaaaatatgataaatgaattgttggttacagtacaactgctcctatcttttcacggatctggtacttgcaaattcatctactcattaaaatttatttgtaacatcaaatcaatattctcagtcattcctggacatgcacagagcagcaaaaaatttaagtggccatatgcaatcccatggacagacgagccgggtgggctggtccatggggttgcaaagagctggctacaacttactgactgacctggcatgcacggatactctctgagcttaaggtcaaacaagggaccctacatacttgctctcatacaagtgtctttctcatggtctatttagtgccacattttaaaatatttttgtgtttgctgttggtgtttcactactaaaagggtccccaaagtgtagtgctgaagtgctgcctggtttttaaatacaagaaggcagcaatgtgccttacagagaaaatatctttgtcagataagctttattcgggcaagagttacagtgctattggctgtgagttcaatgaaatgaataaaccatatacacaaagtaagatgactttaaacagaaatgcatataaagcaacattatgtatggactggttgataaaaatccagtaaccaagagtaacaagaggctcacagaaacctaactctgagttacaatgaacaatccaccagtctggcaaaatctaaaaatcagtcatagaagtgatggggagagtacaagacacagcaactttcatacactgccaatcagagtacaaaccatagagacattttctaaaaacttttgcattaccagatagaactcaaatacacatatcctctatgatccagcaactgtatgccaaggtatataccctaaagaaactcttgtatgtatgtaccaggaaaaaacatacaagaatgttcatagtactctgttcctaagaccaaaaactataaaaactcaaaagcctatcaaattgaaaaatagataaatatatttttgcatactgatatactagaataccaaacagttaaaactgtatgtgttaagtcacttcaattgtgtctgactccttgcaacctatggactatatagcccaccaggtccaggcaagaatactggagtgggttgccatgccctcctccagaggatcttcccaacccagagatcaaacccacatctcttatgtctcctgcatcggcaggctggtgctttacaagttagcaccactggggaaggtcagtcaaaactaacaaactacaattatactcggcaacattaatatcataatgtttaacaaacaaacaaaaagccacagaaaatgtataaatggattcaatttctattatatttacataaagtcaaaaccagaccacctgacctgcctcttgagaaacctgtatgcaggtcaggaagcaacagttagaactggacatggaacaacagactggttccaaataggaaaaggagtacgtcaaggctgtatattgtcaccctgcttatatgcagagtacatcatgagaaacgctgggctggaagaagcacaagctggaatcaagattgccgggagaaatatcaataacctcagatatgcagataacaccacccttatggcagaaagtgaagaagaactaaagaacctcttgatgaaagtgaaagaggagagtgaaaaagttggcttcaaactcaacattcagaaaacgaagatcatggcatctggtcccatcacttcatgggaaatagatggggaaacagtggaaacagtggctgactttatttttggggtctccaaaatcactgcagatggtgactgcagccatgaaattaaaagacactccttggaaggaaagttatgaccagcctagacagcatattgaaaaacagagacattactttgccaacaaaggtccatctagtcaaggctataatttttccagtggtcatgtatggatatgagagttggactataaagaaagctgagtgccgaagaattgatgcttttgaactgtggtgttggagaagactcttgagagtcctttggactgcaaggagatccaaccagtccattctaaaggagatcagtcctgaatgttcattggaaggactgatgttgaagctgaaactctaacactatggccacctgatgcgaagagctgactcatttgaaaagaccctgatgctaggaaagattgagggcaggaggagaaggagacaacagaggatgagatggttggatggtatcaccgactcgatggacatgggtttgggtggactccgggagttggtgatagatagagaggcctggcatgctgcggttcaaggggtcgcaaagagtcggacacaactgagcggctgaactgaactgaaagtcagacgaaacttaaatcacaggaatttataaacatatacatatataatactgtgagaatatggttaacaaatagtgaagtcactcaattgtgtccgactctttgcgaccccatggactgtagcccaccagactcctcagtccgtggaaattttccaggcaaaagtgctggagtgggttgccatttccttctccaggggatcttcctgacccagggatcaaacccaggtctcccgcattgcaggcagacgctttactgtctgagccaccaaggaaggccatggttaacaaatatgaaataataattatggaagtgggattagaggacagatacaagatggggctcacaggaagcttcaaaggttgcagtggttttccatttctaaagatggctaaagagtaaataagtatttgttttattattctttaaattttatatataagtatgtatattttttccctttgaatatagcatattttgtaatcaaacacttaaaacatgaggtgattcaaaaaggtttgtacacagtaaaaaaacaattaaaaggaaaaataagtacagagactaggtttccaagaattacggtaaaattaagttttatttatccaacttctttacctatcagagcattaatttcctccaggatatggacataataagtgtaaatgctgaaagtgtataaatgaaaaatgattattttttacttcagatgacttcagacactatttgtcaaggaaacaatttagctcacggtcctaataccatctaagtacacttctttagtaaaataacaaactaggttaagtttattttttctaacaggcagttactgaatcactgagtagaagtccaatttactaacatcacattaaatatttacagaatgccttgagtttaagtgcagtagaagccacaaactcttcaggtctgtactctgatcagttactgctcagaacagtaaccagcaccacaacctgttcttttagttaacattttcctcaaaatataacaagagacttagttttgtatcattagtaagcccccccaaattagattttaaatgttccagtagagagaaataaaaagtctatgcttcatcaaaccccacactacatttgcctatgaagtaaaaattcttccaaaatataaacaaacaaaaaaaggggaaataaaaatttacctaacagtttcaaagactgaataaactactgatgtaatccagataactgttaaccattcagtacttgcctatttaaaatatgagttctaaatgtaatcaggtattaaacataatcttacctgtggagggtagttgctctctgaagaccaccttgaagactggtcatttggtttatcaactaaaatgttcctgaaattaaaaaaaaggaaattatacacttaattaaaagaataagtgaacaaaaatatgtaaaaagaggaataatctaccagatgctaaaattatcactaagttacataatactgggaacttgaataagaaaaaaaaggaaacagaacaagaaacacagaaaatgtctagcagttttaaggtttttaaatatgataaaggtagtattttaaacaattgaaaaaaagcattttatttatacatatgtgcacacagagagagagctctacttcatatcaagtgacaaaatgaactgcaggtgtacttaggaatttaaggtaaacaaagtaataaaatactaataattaatactataaatttatgcacacacatatatgtgtgtatatatatttaggaatttaaggtaaataaataaaagacctaataattaatataatatgatatcatatatatacacacatatatgtatatgtttatataaatatatacatcttttttttttaaatctttgaatcaagaaggtcttttaagcccagcacctaaaacagacctatggaaaaaggaattgatatatgtaactttggaaggtagtgttttcactggaaattgtaaggctaaagacaaacagaatcacacataaaaaactactttatttgatacatttatttctcagagggatatgggttaatcctgaaacactttatactggtgtcaaacaaacagtaaatggacagtagatgatgggagtcaagcttctcactttggagtggaaagtaacagaaaagcaaggggatgaaggttggaatgaacccaagggtactgaaatagagtcacagacatcagtgtgaactcattaatattcagctttatatagatacagataaagagattcaataattatatgtgagtgtgcacacacacactggcacaaacagtactcccagctctgttcactaatagggactacaatcagtgacactccagtagcagtgagtacactcaataccaattcttggtttctatataccacagtccaataaaaagaaacagggattcttgggaaaggagctgattctaggcatagagcagggaattcagaacattagtctggaacatcttgtagtgctcaaaacaaccacaaaggtcggggcatgggggggcatgtcaaagggacacagaggagccaacctgagagaatgaatggccaaagctaaaataactaaacagcaaaataaataatgaggtactggactacaacccaaatatccctgagtctctagtgatataaataactctagtctaacaatcaggaaaacatcaaacagattcagacttaagaatactcaacaaaatacatgaccagtactcctcaaactatcaatacaacgaaaaataaggaaagatcaaaaaaccaccacagaccagaagagagtaaaggaacaaaataagtaaaagtaatggtatcttgaatgggatccggatcagaagacactaataggaaatctaacaaaattcaaataaaatgtgaaatttagctaacagtaatgtatcagtgttggtatcttcgtcatgacaaaggtaccatggaaatataagatgtcatcaacaggagaaactagatgacgggcaaaactatcacagaaaaggtacttaataaatgtcaaaacgatgaatgaatttttttaaagacagaactataagaaaaagaattttattacatacacattttacaaagataaaacatgaatacatgaaatgacctcaagcattctaaaaggtaaaaaccagctagaaaaatataggcaatgtaaaacacaaaaggctaattaaaatttgaatatttaaacagcacttaattataaatacagccttcccacgtggcccagatggtaaagactctgcctgcaatgtgggagacccaagtttgatccctgggttgggaagattccctgaaggagggcatggcaacccactccagtattcttgcctggagaattccatggacagaggagcctggtgggctacagtccatggggtcacaaagagttggacacgactgagtgactaagtataaatagcccatacaaaaactggcaaacccaaccattcaaaatcaataataaccaaaaattagagattaaaacaaagatacacattatccctataaaattgagcctatactcaaaacaacatatttgaatcataactgcagttgttggccagagctggtaaaatggtactctcatattttgctggcagaaatgtaaactgatacaacttttcaagagagaattttaatatactatatatcaaaaacatttcaaatatgtacatacttttaaataaaaatgataacagccgtgatgacaacgatgatgtttgtatctaacatttctgagcttttacgacatcctggtctaagtgctttccatatataaactattacctttaacgtacagattaagaaactgagagagataaattaatatacctaagtggtggtggcggtttagtcgcatccgactctttgcaacgccatggactgtaccccatcaggctcctctgtccatgggatttcccaggcaagaatactagagtgggttgccatttcctcctccaggggatcttcccaacccaggaatcgaacccaggtctcctgcaatgcagccagattctttaccaaccgagctacaagggaaggccccctacacaccaaaaaaagaatctcaacccaaggcgatctgactccaaagccaatgcttttaatcaccatagtacacagatttagcatatttcacttcctggaacttaacctaaacaataatccaggggatttaaaacatccacgtttatcacaattcaatttataacaggaaattgtaaacaaattgtctaacaatagaggatgtgttaaaaaaaacttatgaaatgtctatgttacagaataacatgtaaccataatgtatattatggcctcactttaatgctgttggcaaatgtttactacacagtgagtgaagggaaaaggcagtttacagagtatgtacactgaatcaagtattgtaagtaataataatgttcgtgcatgaaaagaaaagaccaagaagatatgctaaattgctaatgtagctatcagtggtgagattacaatgactttcttcctcctttgcacttttttgtacttttcaaatattctaaaactaacacatcaacatataatcagaaaaaaaagatgtgttttattaagcattacaaaacaaagataagaactctatgaaaagactgcagtactgttaaaaactaaagctataaaactagggggaaaaaaatcactctgacatgaaagtatgaaagaaaatctaatataactatgataaaattgggaccacaaaaatcacaaagtataatacattgggggaggggagatcaaatgacatgtgaattaacttcattattttcatagctcttaagaataatgtttccaaaactgataaaaagaaagagactcaagaatactgaaatttagaataaaaacatactacctatcttataagttatttgagacagaataccaacaacaacaaaatagcaaaaaggagctaacagaagattaaatgaaagcaggacacactgaaaacagaaaatttaaaatacaatattaatacaaagaatctaaaacagtcagacatataaatggcctaaaataacacagtaagatatcctttgaactgggtgttatagtagtaacattactattacatgaaggcacacacacattaatagagtgactaataatggcagatacaatctttgcaaaactaggaggaatttaaagaaaaagtattaactgggattaaagggctcaacgagagagataaaaaaataaaatttaaaaaaagtttggactggaggaaaacaataagataataagagttcaagctaagattgtgagtcaatgaattgaatgaaaataaaaataaagtaaaaaacacagaagaaactaataaaacaatagcaggagattaaagtctctcagcatctagaaaattaataaacaaacatctatacaatgttgaagtggcagtaagtattaatagtactatgaagaaaaacaaaacaaagtagaagagaaacagacctggataatgtgagggagttagccatgtcacaatctgaaaaatgagcagacagatcactaaatgcaaagctgaaggggcaaatagttacagaatgttatggtcttgtgaattttgaaatgcctattaaacaacccattggagattcagcagctggattaactgaggctgaaattcaaggaaaatgccagagctgaaaaaatagagccatcagtatatcaaatgttaaagcatataaagctatgacactgaatgcaataactcaggggataaaaaggaggtagaagttgcaccccttccacccccaacatggcgctaatggtaaagaagctgcttccaatgcaggagacataagagacacgggttcgatccctgggtctggaaaatcctttggaggaggaaatggcaacccactccagtatctttgcctggagaatcccacagacagaggagcctagcaggctacagtctatggggtcacaaagagttggatacaattgaagcaacttggcatgcaaagagaagctgaaggactgattaagctctggagggtccattatttgtggggccagagagaaagatcaagcaaaagagactgagatggaccaaagatgaagaaactgaaaacttagaaaccatgatgtcaaatgaagaaagtattttgagaacaaagaagtgaaaaactatgttcagtgctgctgacaagacaggatttgggtggtattcacttcatttgcctaactccaaagttaaaagttgccacacagagagtgcttaataaatatttgatagatatgaacaaataacaaatacataaacagcactaaaaggaaaaaaattcaagtgattctattaaagcatagaatatattaattatattaaacatatattaatatatttgttatctgtaatttaaagcttatactaagataaaagagaaacatgtacacttgaaactaatacaatattgtaaatcaattgtattaatttaaaaaatggataaaagagaaatatgatgcagatcagaaatgaggtcaggtctaaggtgccttgtaaagatggaagcttgaaaatattcctgatgatttctctctagttccaacactaagtcaactacgaagtacctctcttaagcccagaaggtaacagagaccagaaccagaacttttaagaattatcacaaaatcttattagtactaggaggaccacgagatccatggatgcacctttccccaagagaaatgcagtaactaaacaagcactcctgggacaacaggctagtctccctggcccacaaagagcttcaggagaactttactgctgaatataagaatgtacttctcttagaggtggctcccagtgacccatggcaaaccacagagagctaacaatatacaaaatgttacacaaaaagccacaagacaaagactgccaggctgcccataatctgaggtatcacaagctctacccagagagtacacaatacaaaaaagttcgtatagaaaaatgtacaaaaagagccaagaaaatttatttaaaaagtgagaagagatcattttatcagcttttaaaacacttcaaattctttataattaaaacagtagggataggaacaaaccaagaactaagaaacaaaaatccagaaattgagcccagtgtagatgagaacttaatattttatgaagatgatattttacttcaatgggaaatgatacttcatatttaaatgatgcttatacaactgtatatccacaagaagaaaataagttaacccctatctaatatcatacacaaaattaattccaattaaagatataaccatacaaacatacataaatatcacagaaaaaaactgagggccaatatatacaaccaaaaaagtgttagagatctttctgtcaagaaacagaagctttaaaagaagaattttatttaaaaaactttaaaattttgtattgtaaaaaacactccataaaaacggatagcaatcacatgggtcagaatggccatcatcaaaaagtctactaagaataaatgctggagagggtgtggagaaaagggaacccttttacattgttggtgggaatgcaaactgatacaagcaccatggagaacagtatggagattccttaaaaaaacaggaataaaattgccatatgacctagcaatcccactactggggatatatactggacatatatcctaaggaaaccataactgaaaaagacacatgtaccccaatgttcactgaagcactatttacaaaagctaggacatggaagcaacccagatgtccatcggcagatgaatggataaggaagttgtggtacatataacacaatggagtaatacttagcttaaaaaagaatgtatttgagtcagttctaatgaggtagatcaacctagaacctaatatacagagtgaagttagtcagaaagagaaagacagatatcatatattaacaaacaaatatgaaatctagaaagatggaacgaatgatcctatgtgcaggacagcaaaggagacaaaaacacaaagaacagacttttggtcttagtgagagaaggagaaggtgagatgatttgaaagaatagcattggaacatatacataactgtacgtaaaacatataaccagtgtgaatctgatgtatgacatagagcacccaaagctgttgctctgtgacaacctagagggatggggtggggagggaggtggaagcagggctcaggagagaggagacacatgtatgcctatggctgattcatattgctatatggcaaaaaccattacaatgttataaagtaattatcctccaactaaaataaataaaacttttttaaaaagacaggaaacaagcaatagttcaggaaaaagtacttgcaactcatatgactaacaagctagtaatcgtacctaaaataagtaaaacagggtttcacttgagaataaaatgaaaaatgagtggaatgcgtgtcactgaagagtcattaaaatttaatgactagtaaataacaacaaaaattttttttctaaatccctgtgtcagggaaaacaaattaacacattaagatatcttttttcacccctcaaattgattaagttaaatctttacttaacaggaaatctcagggagaaactgtggacatgtccattattccaaccttgatgaaaagtcaatttgcaatatctatcaaaattctaagtgtacatattctttcacctagcactctcagaatctatcctataaaaataaaatcatcagtatataaagatctatgtatagagactcacttatgagtctagctgcaatagcagggaaataaatcataaaacactatactgccagatctatgccagctaacttgtagggatttctgcaatataaaaaacaaagaaggaagtatgattttattgttaaaaaattattatttatatatatttgtatccaactgtggcttccctgatagctcagctggtaaagaatgcaccaggagaccaggagaccagggtttgattcctgggtcgggaagatctgttgcagaagagagaggctcccactccagtactctagggcttccctggtggctcagacggtaaagaatctgcctgcagtgcgggagacctgggtttgatcccctggagaaggaaacggccactccggtattcttgcccagagaattacatggacagaggagcctggcaggctacagtccatggggtcacaaagagtccaacacaacagagattttcacttgtatccagttgaattaataagcatgggtggtattacctgctgggcttccctggtggctcagacggtaaagcgtctgcctgcaatgcgggagacatgtgttcgattcctgggtcgggaagttcccctggagaaggaaatggcaatccactccagcactcttgcctggaaaatcccatggacagaggagcctggcaggctacggtccatggggtcacaaagagtccaacacgacagaaatttttcacttgtatccagttgaattaataagcatgggtagtattacctaatttatatcaaatatacaaagcacagatacaagccaataatgaagcatgaaagtcaaagtgaaagtcgctcagtcatgtccaactctttgggattccatggaattctccaggccagaatactggagtgggtagcctttcccttctccaggggatcctcccaacccagggattgaacccaggtctcccacattgcaggcagattctttaccagctgagccacaagggaagcccaagaatactggagtgggtagcttatcccttctccaggggatcttcccaacccagaaattcaactagggtctcctgcattacaggcgggttctttaccaactgagctatcagggaatcctcaaaatgaagcataagtaccattaatgagttttatttatcttcttctacttatcatattcagatttttaaaataaacattatttatataagcattaaagtactgtaaaaatattatgacaaacttttcatatttatggaaaactgactacatcatcatcagatggtcaaatcgggctcaacttttctttctttttgaagacacaggtgataaagaagcaattaataaagatataactgtttcttaaaatttttaagtgacagattatccctcaaagcttaaagtcaactacagattcgttttagttcttcctcccagatgctccttcctaaaatccatttgcactctcctggaaagcaagtgagaaaccagttgtggcagtgactattattaacattactcttcatcaacagggacacagccactatgatagcattctataaaacatgtgcttaagtatccttactcataactcccaaagatctataaaacctaccatcattactggtatagtttttccttcttctaacactcaagacagacattaacctctttcactacaaactgtcaatcatgatactagctcactagccctaatctctgaaaggggaaacatcccatccacagcctctgctgaagaagcaatcacagacagacagtgatgttttcacttgtgattcaactacgtcagtgacagccaatctagcctagctaagagatagaatgggtcatatgaaaataatgtataaaaaatagaaccaatgaaacagagggaaaagtatacagaataagagataaaagagagagaataagacagtcagtagtaaggtaagactgtagcagacataaaatagaagagactccaaggaataacagagaatagaaatggctttctggttctagcttacaggaggctgtttctggccaccaaaatacgtgatcaaaacatacttctaggtactccatgactgatgtttaacattttaactattgtctaagaaaacaagaaaatgatcagcaaaaaaaaaaaaaaaaattacagaagacacaattcagtatagaaactatatgatccaaataatgaaaagtaatctactaagattaagctcaatatatgccattctaaaatatattttaaaaagcaaaatacaaataacaactatcagagaacttgttaagaagaaccgataaaacagatgggctaaagactaaaatggtttccttttttcatcagggttaattttaaaaggtacatttttattcctaccaatgcaagatgaaaattgaaggaaataaaaatgaaccatattaagtctcttagatataggctaaaaaaggcaaggctgtgaataattaatttttctattaagactataaaaatctatagtgaaacacacacacaactgaaatacaggatgcaacattaattttttcccaagttttatgtctctattttgcaaatgttttaaggtggtatatttaattatactaccaactacatgtcaggaacaaactattgaaatgcattataagaatataatttactggacattttgagttcaagtcagcaaattaaaaatcttcttttgattcaacatgttcaaatcttaaccctgcctggcaacatcttttaagttgctgctcttaagaatacttaaacgcaaaaaaagcagcacttgggcaaaaaaatggagcacttaacatttttttctgctaatggatgctcaggatacttaacagtaaatccagtcgattttaaactgagagttttggatactcaaaagctacctgtaatttcaatgtgaagaagtcagtcaagccaagtctgagaatatttttcttctggtagttttaaaataccctactaaaacctgtgcccgttggttgaataatgtgacaaaacgcatctagaagaaatcacctctgactaggaatgataagatcctagagcttggccacgaatttgttgggtaaggttaagcacatcacataatctctcaggactttaatttctttaactgtagtgcaaagggaagggttgaattccttgatctcgtttcttccagctctaataggagcagtgcattgcacaactctagaaaataccattcatgaggccatgttaatattccacaagtctatgaaaagatttcacatatttcattcaagttaccatgtataattctcctcttacacagtagtcaataacaacacacaatctactgactgtaaaacagcttctattatgtgtaaacactaaatagggtaacaccacaaaagtatagaaggggtacctgtggccaaggatattatgatttaataaataataactgtatatagcataaaatgtttgagacacaaaaaccatatataataaaaagccaattcaaaatgcaaaacagaaatcaactcaaacaattttgaatatccacagttgtacagtgttaaagagtatactataaaaattacagcttttccaaaaaaatcgcttgtacactcactttcaaatacttcctaattttcacacaggagcatggtgaagaggccttaccataagctgaagttattcaacaaattttactcatctctaaatgctagacattgtgctaggctctaggaatacactgataaataagacagaaagaatccccacttgtgatgctaaggttcaaacgagaactagcagaaagtaaacaggaacagctgtaaacaaggtaatgacagatcataataaatgatataagagaaataaacagggagatgcaccagggcaggggagttctcttatttgaggtggtccccaaaatgctaactaaaaggatccactcatggaaaaacaaaagaaaagtcaactcttcacaaagaaatcaacaagctcaaaatcagaacaacaggaaataatctatggaaaccatggaaatctgagaactagactaagtcaaataatggcctcacaggctccaagataagataaatgcaaagaaggtaaatctccaaggggtcctgagaacattcataaaatgttgaatctagaccataagaggatttcacaactatcctgcaaatatttccttatttttaggaagacagaaacccattctgaagagaaattactgggaacagaaaataaattaagcaaagcgtaaagaatgacaactcctaggaaaggtaagattcatatgctaagttggcaaaggtccaagcgatacagaactcaagacatatcacagagcaaaatacattcaacgatgcctctccaaaaagcaaaatatttgcaaagcacagatatagatataaaagcaaatagctttattatatctcaaaagtccaaattttacaaatatttcccaaaggagagcggtcttgagccacaaagctcaaaaactatacttgtccattccttcagcctacagaagttcttccatctaaaactattagaagtgaattctttggtggtccaatagtaaggactccatgctttccctgttgagtgtgctggttcaatcctcagccagggaactaaatatcacaagcgacatgggatggccaaaaaaataaataaataaaaccactggaaaaccgaactgtttaaacattagaaagttaaaatgaaagtccacaccaagcaattgtaggaaaaataatacatgtaaaataaattacattctaacagataataaaaacacatgagaaaaatgtggccatgaaaaatgatgaacattattatttagtgtttcaacatgagctaaaagaaatgaagaaaatagctgaagctttattaagcagtaatcaaaattacgacatttcagaaatattagacaacaggaagagctattaagactcacaaatgggacaccggcagtgaagaagcaggcaacccgtgggtgggtggtggctaccctagcgcagcagctggaagacataataaaaaagtcgcccactgctggagtcctgtgcacagattcacaagggctcagtatgggctgccacagaacccaatcggatgagcatgattgggtgctatcagctctagcccagcaagcagctcaggtaagcccagaccccactgacactcctttggtgtatctagaatcaggtaatgggaacattatgatccagaaacacgatggtatcacggtaacagtgcacaaattggcctcttgacatcctgtgtcagttctccagcagcctgtcacagaaatgcagtcctacctgatgctgattatcttatagaactattagaattccagtaattagcccattcatgtaatatgcattgggcacttttctattaattttagagtgagctgctttttgacactctggactgacttatcaagatactgattaaaaagcatcatgttttgaagcagcaggtttaggtcaccttgtatacataatcatgttatgtttaataaacctggttgaaggggaaaaaagactcacaaatgaggggaaatagatttctttcagaaaacaaactaaattagaaataggtatatcaaacattacgttgcacacctgaaactaatataatgtatgccaactgtacctcaactaaaccacacacacacaaccctgcccaaaaacacccgataaagaaaaaacagattacaaacctagattaaagatttactgagcacagccccacccattaaaacaagacccagtttccctctcagtcaatctctcccatcaggaagcttccataagcctcttgtccttgtccgtcagaggggagacagactggaaaccacaggcacagtaaccagtctgctcacagggaccatagccgtgtctaactcaatgggactaccgactcacaacatgtagggccacccaagacagacgggtcacggtggagaggcctgaccaaacgcggtccactggagaagggagcagcaaaccacttcagtattcatgcctggagaaccccatgaacagtatgaaaaggcaaaaagataggccactgaaagatggactccccaggtcagtaggtgcccaatatgctacaggagatcagtggagaaataactccagaaagaatgaagagagggagtcaaagcaaaaacaacacccagttatgactgtgactggtgatgaaagtaaagtccgatgccgtaaagagcaatactgcataggaacctggaatttaggtccatgaatcaagacaaattgaaagtggtcaaacaggagaaagcaagagtgaatgtcaacattctaggaatcagcgaactaaaatggactagaatgggttaatttaactcagatgaccattatatccactactgtgggcaggaatcccttagaggaaatggtgtacccatcatagtcaacaagagtctgaaacgcagtccgaagcaatctcaaaaatgacagactgatctctgttcgtttccaaggcaaaccattcaatatcacagtaatccaagtctatgcctcaaccagtaatgctgaagaacctgaagttgaatggttctatgcagacctacaagatcttctagaactaacaaccaaaaaatatgtcctttgcattacaggggactggaatgcaaaagtgggaagtcaaaaaacacctgcaataacaggcaaatttggccttggagtacagaatgaagcagggcaaaagctaatagttttgccaagagaatgcactggtcatagcaaacaccctcttccaacaacacaggagaagactctacacaagatggtcaataataaaattagattgattatattctttgcaactaaagatagagaagctctatacagtcagcaaaaacaagaccaggatctgactgtggctcagatcatgaactccttcttgccaaattcagccttaaattgaagaaagtagggaaaaccactagacaattcaggtacgacctaaatcaaatcccttacaattatacggtggaagtgacaaataagattcaaggcattagatctgaaagacaagagtgcctgaagaactatgggcataggtccgtgacactgacaggaggcaggaatcaagaccatctccaagaataagaaatgcaaaaaagcaaaatggctgtctgaggaggccttacaaatagctgagaaaagaagagaagcaaaaggcaaagagaaaaggaaagatacatccatctgaatgcagaattccaaggaacagcaaggagagagaagaaagccttcctcagtgatcaatgcaaagaaatagaggaaaacaacagaatgggaaagactagagatctcttcaagaaaattagagataccaagtgaacatttcatgcaaagatgggcacaataaaggacagaaatggtatggacctaacagaagcagaagatattaagaagagatggcaagaatacacagaactatacaaaaaagatcatcatgatccagataatcacgatggtgtgatcactcacctagagccagacatcctggagttcgaactcaagtgggctgtcggagacatcactatgaacaaagctagtagagatcatggaattccagttgagctatttcaaatcctaaaagatgatgttgtgaaagtgctgtactcaatatgacagcaaagttggaaaactcagcagtggccacaggactggaaaagatcagttttcattccaatcccaaagaaaggccacgccaaagaatgttcacactaccacacaatggcactcaattcacatgctagcaaagtaaagctcaaacttcttcaagccaggcttcaacagtatgtgaaccgtgaacgtctaaatgttcaagctggatttagaaaaggcagaggaaccagatatcaaattgccaatgtccgttggatcactgaaaaagcaagagaattccagaaaaacttctacttctgttttattgactgcgccaaagcctttgactatgtggatcacaacaaattgtggaaaattctgaaagagatgggaataccagaccatctgacctgcctcctgggaaatctatatgcaggtcaggaagcaacagttagaactggacgtgaaacaacagactggttccaagttgggaaaggagtacgttagggctgtatattgtcaccttgcttatttaacttatatgcagtgtacatcataagaaatgctggactagagatggaatcaagattgctgggagacgtatcagtaacttcagatatgcagatgacaccacctttatggcagaaatcaaagaggaactaaagagcctcttgatgaaagtgaaagaggagagtgaaaaagttggcttaaaactcaacatacagaaaactaagatcatggcatctggtcccatcatttcatggcaaacagatggggaaacaatggaaacagtgagagactttatttggccgggggggggggggcctccaaaaatcactgcagatggtgactgcagccataaaattaaaagacacttgctccttggaagaaaagctatgaccaacatagacagcatattaaaaagcagagacattactttgccaacaaaggtccatctagtcaaagctatcatttttccagtagttatgtatggaatgtgagagctggactataaagaaagctgagcgccaaagaattgatgcttttgaactgtggtgttggagtagactcttgagaggcccttggactgcaaggagatccaaccagtccatcctaaaggaaatcagtcctgaatattcattggaaggactgatgctgaagctgaaacttcaattctttggccacctgatgcgaagagctgactcactgtaaaagaccctgaagctgggaaagactgaaggcgggaggagaaggggatctccatcttaaatgccaaaaaaaacttgttttaataagagaaagatcaaagaaaaaagacaacatagtgaaagattctaaaagtttatataaaatatcccacaaaatagtagagcagaattgacatcaaacatatcagtaaacgtaaatggccttaacacattttttcttaatttttaagatgaggtaacaaggcaaaaatccaatcctatcacatatacaaaagacataaataaaacattacattttaaaggaatagcaaagacagaccaagcaaatgaaataataataaagcaaggttcaaatttaatttcagacaagaagaaatactaagccttaagcaaaaataagagtactttataataaaatactatagtttataataccaagtaatgctaaacattactgacaaattttttcaaaaaaaaccaaaatctaaaacatctctccaagtgaataaaaaaatctcttaaaaattattacatcaaaggagaaatacaaagcaaactgcaaaatttctacaaaataatgctaatagtaatgtgacgaataatacagcagtagcatccaagagagctttctgtgaggataaaaatattctgtatctgcactgaccaatacaatcgctgttagacacacgtggctactgaacacttacaatatgcctaatgtgagactaaggaactgaactttaaaattcaatttgtactgctacacatggagtcattaacctcagatatgccgatgataccaccctaatggcagaaagtgaagaggaacttaagagtctcttgataaaagtgaaagaggagccatatggggttgcgaagagttggacgtgacttagcagctgaacagcaacaaaatctggtggctcagtgatacgacaatttccctgctaatgccggacacacgagttccatccctgggtggggaagatcccctggagaaggaaatggtaacccacgccagtattactgcctgggaaatccatggacagaggagcctggtgggctacagtccatgaggaaacaaaaggtcagacatgactacgcaactaaacgacaacaaaacaatctagtaattgtcacactgaatagtgcagctctctacagtacaccagaaactcaaattttaataactgtgtcaatataaactaaaaatttaatatctggaaaaattaaagagagaaaaacagccagcaaaattaaaaaaaaaaaaaaaaaacctgctaggcagagactattttaagaatcacacagctattttgcaagtctacaaagataaatttgaaaacttggatgaaatgtacaactctctgtgggaaaaaatgtaccaattggccctagcagatacagaaagttgaaacagagaaatttccctagaagaaaaaaaaaagttatcagaacccaactatcaaaaaacactaggtaggtacaactgtttccagaaagaaaatctttcgaaacatttactaatgaagggattagctaatatgattttaaaaaggaaagcaaaaggacttccagatccagcttcaaaatgttaagagcttagctgctttctctcagtcttattgagagaagataaaagcagaacaaggtgaaaatcaacatctttctttagattcctcaaagagctgaggtcactggggaagaaataccctgtaatctggagagaagaacaaaagacagataatcacagctgagatcaccttatctgaagcagaagccactggagccaataactgataggaaaaattacaaggtcattttgataaatttctggagactgaaagtgggcagtttgacagaaactctgggggcacagttttagggatcgcgcatacttttgtgggttttacttccagtaaaagaagttgagaggaaaaaaaccctgcctgaagcagagcagaggaaaagcgaccatttaaaaatatcgaccgagtgttcctcatcacaaaaggcaactagccaagtccagcccccactagctttcctttctcacattaggggagaaaaacaaaggctaaaaacactctgcaaagtaagagtacagggattcagacccagtaaaaactgggatttaatcataagataaaagaatgcttcccttccttcacatctagccaccacaacaggggtaatgtataattacaggagactacaactgagagcttcaagacacaaactacttaagaacttagggaacaactccgccacctacccacttcccccaaaagaaaaaagagagagagaaaatatgaacactagaggaaaatgaagcctctggcacctagggctacatctaacagtccaacttctaacatgatgaacataaaactttaaacaaaatcctaattacttcagttcctactatccaatacatcctgctgctgctgctgctaagttgcttcagtcatgtccgactctgtgcaaccccacagacggcagcccaccaggctccccgtccctgggattctccaggcaagaacactggaggggttgccatttccttctccaatgcattaaagtgaaaagtgaaagtaaagtcgctcagtcgtgcccgactcttagtgaccctgtggactgcagcctaccaggctccttcgtccatgggattttccaggcaagagtactggagtgggttgccactgccttctccgaatacatcctagatccttccaacaaaaaacttcagcaagctaagagacaagaaaaagcacagtctgaagaggcaaagcaagcgtcaaaaccagactcaaatatgatgtggattttgaaattattagacagggaatttgaaataattacgtaagagcactaatgcaagatagatgggtaatgtatcaaggaaagaatcaggaagcttgaagttaagtcagcaaacagttcccacactgaaagagaaaaaaaaaattaaggaaaagaatttcaaggaactgtgagaaaactacaaaagctataatatatgcataattgcaataagagaaggagaaaaaagagagtaagaagcggaagaaatatatgaagtgataataactggaaaatttccaaaattaatgacaacaacaaactacagatccagaaggttcagacacaagcaggatatatgcaaaaaaatctacacagaggtgttatcatattcaaactgtagaaaatcaaatacaaagaaaatctgagcgtaatcaatgggaaaactcctcaactacataagaacaagcataagaatggtgtcaggtttcttaccagaaaccatacaatccagaaagtgtagaatcaaatacttagaagcattgaaagaagaaaaaaaccaccaacctaaaattctgtatgcagtgaaacagaaacaaatgaaatctcttaaatgtgacggaaaaataaatagcgtgctaaaactttccagatggcgctagtggtaaagaacctgcctgccaatgaaggagacataaacaatgtgagctggattcccaggtggggaagatcccctggaagaaggatggcaactcaccccaggatctcctggagaagcccacggacagaggagcctggcgggcaacggtccacaggatagcgtcagactgactgaagtgacttagcacatatgcacacaaaacaaacactgagaaaacctaccgccactaggatctgccttgcattaatgttaagtaatttctctgaaggaaaataatataggtcagatacctggatcaacacaaagaaggagagaaaaggactataaaacgctaacataaaaaacctgtattttcttattcctaactgagtaatagatacctggttcaaagaaataaaagcagtaatgtatggggtgattagagcatacagaaaagcaaaatgaatgagagcaatgttacaagggagggaggaattagaaatattttggtattaatattaggtacttgaactacccatgaagcatcattattgttgttcagtaactcagtcgcgtctgactctgcacaggcttctctgccaggggttttccaggcaagatcttcccagactagagaccaaacccacatcttctgcactagcaggcactttacttaccactgagcagccaggaaagcccatgtcatttaaagctggattaagttagttgtaaatatagcaatgcaaactctgggacaaccactaaaaacatatttaaaagaagtataattgacatgctaagtggagagaaaataaaagcatattcaatgatcatttcaaaccagagaaggcagagaacaaagaaaaagtaagaagactaaagaacaagtgcaaagaatagaaaataataatcaatttaataatcaatttaaatgtgaatgatcttaatcaaacaattagaagatagagactgtcagagtggactaaagaacaagatctgaatatactgcctgtaagaaaccctatgggcttacctggtggcatgacggtaaagaatctgcctaccaatgcaggagatgcaagagatgcaggtttgatccctgggtcaggaagattccctgcagtaggaaatggcaacccactccagcattcttgcctggaaaattccatggacaaaggagcctggcagactacagtccatggggtcagaaagagtcgaacacacacgcacaagaaacacaccataaagacacaggtagatgaaaagtaaagaaatagagaaacataaaccatgctttcaaaaggaagctgacgctatatttctatcaggcaaaaagatttaagaacaatgaaaagcatcagggatagataaagaagggcattacataatgaaaagtgtcaaattctccaaaaagatgtagcaatctttaagatatctgtacccccttccccccaaaaaaatgtcaaaatacttgagggaaaaactgacagaattgcagggggaaaaaagacaaatccagtattataattgaagacatcaacatctctctatcagtaactgacagatccaggaggcagaaactcagcaagaatacagttgaatggaacagcaccatcaatcaactggatctaattaacatttatagagtattttatccaacacagcagaatacacattctcctcaagctcacattgggatattgaccaagatacaccataaaatacatattaacaagtgcagaagaacagaaaattattcaaagtatgctctcaggccacaatggaattaaaacttaattacacttaatcagtagaattaatttaatcagtaacagaaagagaggtggacaatcccaaaatatttagggtaaacaatactcttctaaacataaaggtcaagtcacaatataaatttaaaattgtattgaattaaatgaaaacaaaacatcaaaatctgggcgacagccaaagtgaaacactgaatatagtactgaatgcacacatcagaagatggatctaaaatcaatggccaaagcttccacttccggaaactagagaaagaagaacaatttaagtataaagcagacagagaagataaacaataaaaagcaaaaattcatgaaactgaaaataggaaatgaaaaagaaaaaaatcaataaaactaaaagctggctatttgaaaaaactgtaatcaagaaaaaaaaaacagagaaatacaaatttctaatatcagatatgaaagaaaggtcatcattactgatcacttagatactaaaaggttaataaaataaatattatacactgttctatttctataacattgtaagagatgagttccttaaaaggtacaaactaccaatattcaaggagaactgtgttagtcgctcagtcctatctgactctttgtgaccagagactgtagcctgccaggctcctctgtccatggaattctccaggcaagaatactgatgtgcgtagccatttccttctccagtggattttcatgacccagggatcaaactcaggtctcctgtattgcaggcagattctttaccgtccgagcaaccagagaagctccccaaggagaaacatcttctgaataagctgatggctattaatgaaattaaatcaataacaaataatcctccaaaaatgaaagcaacaggcccagatggtttcactggtgaattctaacagatatttaaagaaagtaatgatatcacttctctgaaatttcttccagaaacaaagtgaaaacttcgtaactctttgtatgaggccagcattattcaaataccaaaaccagataatgacattacaagaaagaaaaattccagcccatcttatgaatacagatacaaaaattctcaacaaaatatcagcaaatcaaatctaacaatgtgtaaaactaattacatactacaatcaaatggcatttattccacatatgcaagagtagttcaacattcaaaaatcaattaatgaaattcatcataccaacaagcaaaagaagagtcatctatcaatagctgcagcagaaagcacttcacgaaatccaacatgcattcacaatgaaaaatctcagcaaacaagtagaaaggaccttcatcaaattgataaagaacacctcaaaacacctatagctattaaaaaaaaaaacaaaaacaaccacctgtagctaacataaaggtaagaagttgtatgtttctccttaacatcaggaacaaaacattcctaatcaacatcatactggctcctccatccatgggattctccaggcaagagtactggagtgggttgccatttcctccttctccaagggatcttcctgacccagggatcgaacccgggtctcccgcattgtaggcagacgctttaacctctgagccaccaaggaagtcctactggaagttctagctaacgcaataaaactaaagaaggaaatacaaggtacacagactgacaaaaaagaaaatccgaaagaatcagcaacaattaaaaaaaaaacaaaaaaacctcctagaactaacacacaattacagcaaggttgcaggacagaaagttaatacacaaaagtcaactgctttcctacatcctagcaataaactggaatttaacagtgaaaacacacctgcaagccacagctgctgagcctgcgcgctgcactcctgaagcctgtgcacctggagcctgcgctctgcagcaggagaagcctccacagtgaggaggctgcgcactgcgacagaggggcccctgctgccacactaaagaaagcctgcagagagcaatgaagacccagcacagccagaaataaacaaacaaacttttaaatgaaataaaagtaaaagtaaaaccacaataccatttatatcagcacttaaaaaacaaaataattaaagactcagtcatatatgtataagatttatataaggaaaactataacctctaatgaaagaattcaaagaaaacctaaataattaatagagatattctatgttcatggatataggcctcaatattgttaagatactagtttttcccaacttgatctgtacactgaacccaatttcaaacaaatcccagcaaactattttgtggatattaacaaactgattctaaaattcatatggaaagacaaaagacccagggtagccaacacaacactaaagaaatacaaagttgaggaataacattacctgccttcaagactcactcacttataagaaagacagtatggtaatggtgaaagaagagacacaggtcagtggaaaagaatagagttcagaaataaaaccaatcgaataatcaattttgacaaaagtgcaaagacaattcaatagagaaaaagataatcctttcaacaaaaggtgctgtaacaactgggcattcacatagtaaaaaaaaaaaaaaaaaagaagaagaagaaaaagaagaccacacacttttcacaaaacttaactcaaaattaatctcagacctaaatgtgaaacacaaaactataaaacccctatgagatattataggcgaaaaacatgtggcctgggtttgacaatgactttaaacaccaaaagcagatccattaaagaaaaaaactgattaagttggactttattaaaattaaaaacttttgctctgcaagacactgttaagagaaatatacaggccactgatgggaagaaaatatttgcaaaacacttatatgataaaggtctgtatccaaaatctagaactcttaaaattcaaaaataagaaaacaacccacccaatttaaaaacagacaaaagatgtgaatacacatctgtataaggatgaaaactaaacaaatgaaaagatgtcaacatcacatatcattcagtttagctcagccatgtccaactcttcatgaccccatggactgcagcacaccaggcttccctgtccttcaccaacacccgaagagcgctcaaactcatgtccattgagttggtgatgccatctaaccatctcatcctctgtcgtccccttctcctcctgccttcagtctttcccagcatcaggctcttttccagtgagtcagctcttcacatcaggtggccaaagtattggagatttagcatcagtaccttccaatgaatgttcagggttgacttcttttaggattgactggtttgatctccctgctgtccaagggactctcaagaatcttttctggcaccacaattcgaaagcatcaattttttgtcactcagtcttctttatggtccaactctcacattcatacatgactactaaaaaaaccatagctttgactagacggaccgttgtcagcaaagtaatgtctctgctgtttaatatgctgtctaagttggtcatagtttttcttccaaggagcaagcatcttttaatttcatggctgcagtcaccatctgcagtgattttggagcccaagaaaataaagtccctcactgtttccattgttggcccatctatttgctatgaagtgatgggaccagatgtcatgatactagttttctgaatgttgagttttaagccagctttttcactctcctctttcacttgcatcaagaggctctttagttcttcgctttctgccaaagggtggtgtcatttgcgtatctgaggttatttatatttcacatattcagttcagttcagttcagtcactcagtcatgtccaactctttgtgacctcatgaatcgcagcacaccaggcctccctgtccatcaccaactcccggagttcacccaaacccatgtccatcgagtcggtgatgccatccagccatctcatcctcttgtcgtctccttctcctcctacccccaatccctcccagcatcagagtcttttccaatgagtcaactcttcgcatgaggtggccaaactactggagtttcagctttagcatcattccttccaaagaacacccaggactgatctcctttagaatggactggttgggtctccttgcagtccatgggactctcaagagaattacaaattaaaacagtaatgagttatcattacacacgtattaggatggctcaaatgaaaaaaagctgatagtgccaaagagaactaaggattgatttcccacagctggtggaaataccattggcagcgtgatcatattttcccatacgatccagcaatcacactgctaggtatttacccaaataagtttaaaaactaagggaaagggaaacggaagtcgctcagtcatgtccgactcttcgcgaccccatggactgcagcctaccagcctcctctgtccatgggattttccaggcaagagtacgggagtggggtgccatcaccttctgtctaagccaaatcttcacatgaatgattatagcagcttttgctagtaactgccaaaacttgaaagcaatcaatatatgtccttcaatagttgaaaggataaacaacccacggtatatccatacaatggagtatatgattcataagtaaaaagaaatgagctatcaagccaggaagagaaatgaaggagtcttaaatgaatgctgctaaactttaaaaattatatgaaaacttggaaaagacaaaaaactttatacagtaataagatcagtttgccataggtttggtgggagaagggaagggatgaacaggtgaagcacaaaggctcactctataacatcaagagtaaaccttaactcatgcatgcacactcagtcacttcagtcatgtccgactctgcgaccctatgggcagtagcccgccaagatcctctgtccatgggattttcccagcaagagaactgggagtcagttgccatttcgtcctccaaaggatcttcccaacccagggatggaaccaacatctcttatgtctcctgcattggcaggcgggttctttaccactatcaccacctgggaagtccctaacacatgcaagtttaaaaaattaggaagttagaggctttcacaaaaaaatgcaaactgtgacaagagaatctaactgtatcacaaatgtatgaaacaacccaactgaaggtaacggggaaaaggcactgacttaagtaactatgtaaataaatgaaagaactatataagactaaaggcagaagggactgtacttgagtactgtactctagttaataaagttgatttctgcaaggtatggataaacaattctgatactgctatacatgtatgctgggactgaacaattaagatgcttggcaaatggttagagccaggtttctaactactgaagtggaatgtacagatcagcaaggggaggaatctggaattatccatgtggtaatggactagagtagacaatatgggtaggaaccaatgtttaatataattactaatggttacatttagaaatatttacaggtatgtgcctatacacaggttcagttcagttcagtcgctcagtcgtgtccgactctttgcaaccccatgaatcgcagtacgccaggcctccctgttcatcaccatctcccggagttcactcagactcatgtccatcgagtcagtgatgccatccagccatctcatcctctctcgtccccttctcctcctgcccccaatccctcccagcatcagaatcttttccaatgagtcaactcttcacatgaggtggccaaagtactggagtttcagctttagcatcattcctttccaaagaaattccaggactgatctccttcagaatggactggttggatctccttgcagtccaagggactctcaagagtcttctccaacaccacagttcaaaagcatcaattcttcggcgctcagccttcttcacagtccaactcttacatccatacatgaccacaggaaaaaccatagccttgactagacggaccttagttggcaaagtaatgtctctgcttttgaatatacacaggctactatacatcaatttatttctttactttgtcagctgagagttactaaaataaacaacaccccagaagcaaggagcatacctaacacccaaatcttagtttctgataccattttccaataaaaggaactagggctccatgaagaaatgggtcaggaaatgcatgagtctggagcatcttatggtgccagaaagtaaagcagtgtttaaaaaaaaaatctgttgatgagggttatgtccaaagggcacaggagccaaataaaaaagcttcaaatagccaaatctggaacaatttgagcaacaaactaatattagattataacccaaagaataaagtaagtacacattaagtacaaagtgatataaattattgaataaattaataaatggccagagggtaatctcccatgcagaattctgaataaattatgtagaaaagctaccctaaaggaggaaagcataattccccactgtatgtgtgggcggtacagtggggtgcatgtagtaatttcctcccaaagactattgtgtggaaaaaagaaaaagaaataactttacagtagagaaacctgacaaacactatctcaaccaggttattcaaagtcaaaatcaacagtgaaaaatcatgataatagtatgtgcataaagtgatgaaaatggaactttacctctttgctttttcttccaaaacaccataactcatctgaatcatgacaaggaaaaaaaaaaaatcacacaaactccaagagaggggccctgcaatatacctgaccagtcctcctcaaactataaaagtcatcaaaaacaaagaaagtctgagaaattgtccagtcaagcttaggagacatgacaattaaatacaatcctgtatgagatcttggaatagaaaaagaatgttaggtaaaaactaaggaaatttgaagattacagtaatgattatgtatcaatgctggatgattaactgtaataaatcaatataatatgtaatttgggcttccctggtggctcagacagtaaagaatccgcctataatgtggcagacccaggttcaatccctgggttgggaagatccactggaggagggtatggcaacccactccagtattcttgcctggagaattctatggagagagaagcctggcgtgcttgcagtccactgggtcacaaagagttggacacgactgagtgactaagtacaatatgtaatttaatgttagttatatgattaataacggtaaaaaatgctagggagtatatttgtaccctgtactatctatctgcttcatattcctgtaaatctaaaactgctccaaaaaataaagtctataatttacttaaaaaaaaaaaggcaaagcaatgacaacatacatattagaaagaaaaataaagcactacttgtttgcagacaagattacatactagaaaacaccaaagactcaatggaaaaaaacactattaatttagtttttaaatatatatatcaaattaaaatacaaaaagtttcagaagccttgaaacttaaaagtaaaaagcagctagaacatataatgggaaaaaatccacttacaacagcaataaaataaaatactaggcataaacttaaaaatgtatgaaaattttttaaaatcctcaaaggcacatatgggtgcttcatggtaaaaaatccacctgccaatgcaagggctcaatccctggctccagatgatcccttggaggaggaaatggcaacccacttcagtattcttgcctggaaaatcacatggacagaggagcctggtgagctacagtccatagggttgcaaagagtcggattcaaccaagcaactgaacatgcaaaaggcatataaagtgagcctaaaataaacttaaaggcgtactgtgtcctcatggagaaggactcatcatcataaagatgtcaattctctctacattaatttatagtttaattacactcaaaaataagaacaagttttttcctgaaactagataataaataaaggtgatacatacagttcaatattaaaaaaaatttttttaatgggcagaagatctaaacagacatttctccaaagacaacatacaggtggccaaaaagcacatgaagatgctcaacatcactaattattagagaaatgcaaaccaaaactataaggaggtgggtcctcacacaaatcagaatagccaccatcataaagtctacaaacaataaatgctggagatggtgtggagaaaagggaaccctccaacactgatggtgggaatgtaaactggtacaaccattagagaaaaaagtgcggaggtgccttaaaaaactgaaaacagagaactaccatatgatccagaaatcccactcctgggcatatacccagagaaaaccataatttgaaaagatacatgcaccccgatgttcactgcagcacaatttacaacagccaagacgtgtttgtgcacacggactcagtagtgtcaactctgagaccccatggactgcagctgccaggctctttcatccatgggatttccaggcaagaatactgaagtgggttgccatttcctcctccaggggatcttcccaatgcagggatggaacctgaggtctcgaacacaagacatcttgtgtctcctgtgttgacaggcatgttctttaccagctgagccaccagagacgccaagacatgaaagcaacctaaacaaagtcacaaagtattaaaaaacaaagccataaccttgatgacaaaggactgtataatcaaagcaatggtacttccagtagtcatgtacagacttaagagttggaccataaagaaggctgagtatggaagaattgatgcttttgaactgtagtgctgaagaagactcttaagagttccttggactgcaaagagattaaaccagtcaatcctaaaagaaatcaactctgaaatttactggaaggactgatgctgaagctccaatactttggccacctgatgctaagagccgactcactggaagagaccctgatgctggaaaagactgaaggcaaaaggagaagggggcagcagaggatgaaatggttagatagcgaaccaattcaacaccaattcactaatttgaacaaaccccagaagataatgaaggatagggaagcctggcgtgcttggggtcgcaaagagtctgacatgacttagtgattgaataataacaaatatataagatagataactaataagaagctgctatagcacaggcaacttagtactctgtagtggcctataatgggaaaagaatctaaaaaacaaaaaagagtggatatacgtatatgtatgactgattcactttgctgtacacctgaaatgaacacaacattgtaaatacactccaataaaatttttttaatatgtcaggtgatataattcatagttaataaagtttatataaaaattaagccagtctcaaaaccctgaagaaaaaagaccaacaagggaagaccttattgatgttaaagcagatatgacagggtcaggggtgaagagtgggggtgaggcaggtcatgaagtctctgtgattaaaacagtggaggattttatacacaaatagacattttggaacaaaagagaaattatcaaaataaaaattcagaaaagtcaataaatgatcaaggtagcaccacaagtcagtagggaaaatacgaaattcgtaagtgacaaataactggacagtcatttagaaacaatatgattagatttgcatctcatctgcatacaggttaaatttcaaatggataagaaaacaaaatacaaaaacatgtaagtactagaaaaaaaacacatgcaaatccattacaacctgacactgagaacatccctatatataattcaaaagccagaagaaataaaataaaacctgacaattcaactaagaagaaacacaactttcagaaaggaaaaaatgaaactttccttatttgtagatggcatgatctgtcacatggaaaatcccaaggaatttaccgaaaacaaacgaccaacaaaaaaaacttcccagaacttaagtgagttcagcaatgtcacaggatacaagataaacacacagcagtcaactgcatttctacagtctaacaataaacaagtggaacccaaaattaaaagcacaaaactatttacaatggttccaaaggaaataaatataacaaaacatgtaaggaacctctctgccctaaaaattataaaatgctaatgaaagaattaaaagcaacctaaataagtggaaagatatatggtatttatggattgaaagactcaacatagtaaagataacataagaaaaaaacaacagaattgtaaaattatataaattacaatcccataaatccaatctacattggaaacagcagtatgaactcaagacacttttttttccttaaaaaaaaaaattcctagctatgtcccctaaaacagtctaaaagaaatgacaatccagtaacaaatgtttctagtttccaactgtgaactctaagcaccattccctcatcagggtatgataaacaaaggacactttgccatactgaaaagcaagaaaataaagattaatgagactgtgtcacaggaacacaggagtggccaggctgaaggggctcccatttgccaaggatggaccaatgtggcaccaaaaagaataactacagaaatttttaaaaacacaatgaatacataaaaatctaaggttcataaatgctttaaaaaaaatcagacacctggaggtattatatcaactcattactctgaaaactggtcattaaaaggaattaagcatttatcttgcttttccaataaaactatttcagagcattagggagaactgtatgcaaaaattcaggtagtaaatgtgaaaggaatgtaagaatcagaaaaattcgatatggataaccattgttagaataagctacttcactaaagttatcactggagattaaaaccattaatgaaaggtggatggaaaactttacaataaagggaccaagctatcacccccagactctgtgtctctgaaagtgatacaaggtacacaggtctttccatagaacttctagtttacacaaaagtatgacagaggaactagtcaaatgttactacaaagaagcaactggacaaattcagaaagtaggagccttttcaggataaatgacagatttcttcaacaaatcaatggatgaaaaaaaaaggtaggagactagtcagaatagttaaaattactcttgaaaataattttaaaaagctataacaacaaatacaaagtgtttggatcctgattcagataaactataagaaggcattttctaacaaacagaaaactgaatataggccaggtatcagatattactgaagaactactgctaaatccattaagtaaaatcacagcggcttcccaggtggctctcggggttaacaatctgcctaccaatgcaggagaaaagggtttgatctctgggttgggaaccctcctgggaggaggaaatggcaacccgctccagtattcttgcctggaaaatcccatggacagaggagtctggaagctatactctatggggtcgcaaaaagtcagacaggactgagcacaccagaatatataatatttgtgggtatttttttttgtttagcctcgtcacattcagcaggcctattcaaactaatgaataacctgaacctttcctgagctcagaaaattttttctttcttaaaaaacttctctatttttcctggtatcattctggacttaccaggtagaaggtgctgggctgttatattaggctgtaggctttcctggtggctcagatggtaatgaatcagcctacaatgcaggagacctgggttcgatccctggctcaggaaggttccttggaaaaggaatgtctacccactccagtattcctgcctggagaactccatggacagaggagtctggtaggctatagttcttggaatcgcaaagagtcagatacaattgatcaaataacactttgactttgcataaaaagtcccacaaggaataaaagctgaaatccactctgagtcccacttaatagtcctgcatcctgatcaaaaagcatcactttctcactaagccatgtattgtgaaaatgagaaaatggactttctggatcaaggctaacctgtatgtctcaaattttaactgttttccttatctttttctttaagttctaggcttaaaatcacttgcagtgtgtatgcctgtaactacaaaacaaacaacaacaacaaaaaagatgtgtatgtacagaactatagaaaaattgtcatttttgtaggagcttcattacaaatcttagtatcttgggccaaggtccaaaagaaaagattgttttgtgatttgggggctcaaaaatttttaaagctccctaagtaatctgatttctgtgttgactatctggtgatgtccatgtgtagagtcttctcttgtgttgttggaagagggtgtttgctatgaccagtgtgttttcttggcaaaactctattagcctttgccccgcttcattccgtactccaaggccaaatttgcctgctactccaggtgtgtttcttgacttccagagatcaaactgccaacatccactggatcactgaataagcaagagagtttcagaaaaacatctatttctgctttattaactatgccaaagcctctgactgtgtggatcacaataaactgtgggaaattctgaaagagatgggaagaccagaccacctcacctgcctcttgagaaatctgtatgcaggtcaggaagcaacagttagaactggacatggaacaatagactggttccaaataggaaaaggagtacatcaaggctgtatattgtcaccctgcttatttaacttatatgcagagtacatcatgagaaatgctgggctggtggaaccacaagctggaatcaagactgccaggagaaatatcaataatctcagatatgcagatgataccactcttatggcagaaagtgaaaaagaactaaagagcctcttgatgaaagtgaaagaggagagtgaacaagttggcttaaagctcaacaatcagaaaactaagatcatggcatctggtcccatcacttcatggcaaacagatagcaaaacagtggaaacagtggctgactttacctttttgggctccaaaatcactgcagatggtgactgcagccatgaaattaaaagaggcttactccttggaaagaaagttatgaccaacctagctagacagcatattaaaaaccagagacattactttgttcaacaaaggtccgtctagtcaaggctatggtttttccagtggtcatgtatggatgtgagaggtggactgtgaagaaagctgagcgccaaagaattgatgcttttgaactgtggtgttggagaagactcttgagagtcccttggactgcaaggagatccaaccagtctgtcttaaaggagatcagttctgggtgttcattggaaggactgatgctgaagctgaaactccaatactttggccacctgatgtgaagagctgactcatttgaaaagaccctgatgctgggaaagattcagggagggaggagacggggataacagaggatgagatggttggatggcatcagtgactcaatggacatgggtttaggtggactccaggagttggtgatggacagggaggccttgcatgctgcagttcatggggtcacagagtcggacacaactgagcgactgaattgaattgaacagtcaaaaatttatgttattcatgcatttctgtacgctttccctacagaattttaaccaatttattataatagtctactgtactgcagggtcgtttataatcactctctatgacttctctgggggggaaaaaagtataaattaaacttttaattttggtcaaatttttaaaagttcttctggacacttatgaatacagtatgtaccaaattaatataaatataatatgcacattgacagataagattaaatgtggggtaaaatggtattaaaaatgattttcaaagatactatgagcagtatttttccatttttttacaattaattcatgtatatacaggtgagtatcactatcagaataaagtgaaactcagcatcaagtcaattttgtagatgtatgtactgaaaatttcacttacacaaacacagggaaaaagaaggaatttctgccagtactgttaattttttgactaccttcagaattatatgtcaaaaatcacatgatgagctatcagtaaaaattactgtttaagatctaccaacaaacaggctgatttagatcttctttttattttgtttaaaaagaaagaattgagagccacctattttacaactaaacttttttttgtcattcaccttctgaacttcaatactaacttttacaacagtcctttgtttggcactctgaagattcttacattctatggaacagatgagaagcatgcctcctttgcaaatgagaaataggatatgggacagctagaagtcttcatgtgcaggcaaatcacctgggtttcttgctaaaaatgcagattatgactcagtaggtctaaggtgcgtctgagattctgcgtttctaacagttcagttgctcagtcatgtctgactctttgcgaccccatgaatcgcagcatgccaggcctccctgtccttcaccaactcccggagttcactcagactcacgtccatcaagtcagtgatgccatccagccatctcatccttggtcgtccccttctcctcctgcccccaatccctcccagcatcaatcttttccagtgagtcaactcttcgcatgaggtggccaaagtactggagtttcagctttagcatcagtccttccaaaaaacaagcacctagtaaaggcaatgtggctgggaagtgggccacactttttagtagcaagggcctaaaccacaggcaggttctcaggcttgtcaatttttaggagagaacagacaataataataaaactcaggaaactgaatccttcaaactatttttgccaacgtatcccctggaaagtctacatgtactcccaagaataagcatgccccaatctgaagactgctactcaaaatcagttactcaaaatcaactaaatcagctactcaaaatcaatgaaaattactggcttttaagagtgctttaaaattttttttagttttactgaaatataactgattttcaatgatgtgtttaatttctgttgtacagcatggtgactcagttatacatgtatttcttttcatattcttttccattatcatttttcacaggatattaaatatatagttccctgtgctacacaggaggatcttcttgttaatcaggtgtttaaatttttaaattttaaaccactgactttagtcacatcacttttctacctaaattatttgatgacaccacattttcaaaaaaataaaatgcaaactcaccaacaagaaaatgggcttcccaaggtggtgctaatagtaaagaatccacccaccaatgcagaagatatgatacagtcccacaaaactctacttttttaaaatgtattatttatttaaataaaatttaaaactctgggcaatgtccaaagaacagacattaaaaaataaaaatcaacacaattactacatcccaagataatcactgttaagacttcagttaatttgtttgcagccttttctatatgactaagcatacaaatatgtgtgtatgtataaagataaactggagcaaaccatttgaaaaggctttttaaatctgttttttatatgccattatacctgaaagattttctctatataattaaaaaatattctaaaacttacttttcaatggcagccaaacagtccatcataatcttaaaaaattattctgttaaatctagtaaatctcaggacaatgtccctctatcaataatattagatatttgctagaggattaatttgcaatccataccttatattttaggtaaatataaacataatcactgcccaaaatgccatggaaaagcaagttagaataccataaaaaattcaaaatatcttactaagtctccttgaaaacactgttaggtagttagaataggaaaaagggagtccaaaatggcggtggctatgcccacaaaaacagaacaaaggaaggtccgaggaccggagtgaggacctcaggtagaacaaacagcactcctggctagcccgatttacacagggcaggcccagggggaggagaaaaaacatataaagagaggcgccaaaggacaggggtctctctctctcctcttcatgtcttttgggtcgtcatgccctcaggcctcgaggatgtagtttcctttattttctaaataaaactgagctgtaacactggtccatccgagagctgtaacgctggccagtccgagggctgtaatgctggtccatcgcttccaatttttgttgtgacgagacagaacccaggaaattacacactccccagacagaatgaaatacaatttagagttttgttttcattatacctaaatttctcaacagagagaggaaagcttcttaaatgcatatgtgataagtgaatgcttatgtcttccaatatgcaaaatcataaagaaagtataaataaatagaggagttcactgaaaagtaatggataggataaatgttagctatttggtagggaatataagccagtgactttggaatactatcagaaaagcttccttcagtatacagtatcttttgtaactgatatatgaaacaaacctgaataagaacaaagattgacttaacacttttaaaaatggtgaatctggagggaaatgtgggcaaggacaccagtccatgtgtgtaatatatggaagaagcacctgaccaatgacccagcctgtatcaagtgccctgtacactgtctgggctaagcctacctccaagcatctttctggctctaatatgctacactaacgccacaagctccaaatgtttacctaatttcccaaagagcaattcctaaatacacacaagggtaaatataaatcctgcattcaaagaatttaaagcatgcttaaataaattgtatctgtacacaaaggaagtcacagctcatctacctctttcaggaagtctccctcaagcccatgtaaacaacagatgcttcattctctgaatctcacttctgatttctgtaacatttactgcttttgtcattcatctgaactcagatgaacttttttgctaccttctactgcactattgaatgtatatatagttcatcaccagaaataaataatattaaattaaatgataaatactctctcataacttcaaagaggcatagttgttactcaggagttaagaggcacctaataatttgtttgttccaaaatattcactggaagaaatgatgctgaagctgaaactccaatattttggccacctgatgcgaagaactgactcatctgaaaagaccctgatgctgagaaagattgagggcaggaggagaagggaatgacacaggataagatggttggacggcatcactgacccgatggacagcagtctgagtaaactccgggggttggtgatagacagggaagcctggcgtgctgcagtccacgggggtcacaaagagtcagacacgactgagctactgaactgaactgaaaaatttgtttatggcacagacagccaaaaatgtgaaaagccataattgtgattcaaatatcacaatgtagcaaccacaataaaaaacacaaagtcttctttaacctgtcacccaaagtagcatttgaggttggagaaaatggagatggtgatagatttcaaagacttaacttttatattttgatatgtgaactttacaatcacctgaaatttgaaaagaaattattctgtcaaacttgacatcattttcagctcttttaaaatttatgcctcagtttgtttaagaattcataaaaaagtttcataaatatctcccattcagtattttacacattaacaaactacaaattttaggggaaaaaataccgattttcaattaacatccccatcatgaactacttaccaaagtatgtgtgaatatatgttatgtctccaagtaagaatgtacactgataagtaggtaagtaacttaaaagatgaagacatggagccaatccacacacatgcattctgaacaaaagtaaaagaagataaaggactagatcaactgtgacagaaagttcttagattaacagacttgaagtcaagcactttgctgtctaattccagatggtcattctccttactgggcttcaactcatatgcactaatcagtctgacaaaatttcaataacaacaacaaaaaaatcaaccaacaatagcttggcagttccttaaacagttaaacacagaattaccatatgaccaaaaaattctactcataggcatttacccaaataaaaacataaaaccaacaaaacacttgcacacaaatttttacagcatcattattcataaaagccaaaacagtgggtacaacctaaatgtctatctactaatgaatggagaaaaatgctgtatatccatacaatagaatattacctgtcataaaaagaatgtagtactgatacattctacatgctacaacattaatgaaccttgaaaacaatatgctaagtgaaagaagccaattacaaagaatacatattatataactttatatgaaatgtccacaatctacagagacaggcaaatctatacagaaagtaaattagtggttgcttaaggataagaaagaagcaggtcataacaaagggtatagttttcttttcgagattatgaaaatgttctaaaattgactacagtgatgttatacatatctctgaactactaaaatccactgaattatactttttaagtagctgaatgcatgggatgcaaattaccaatcccaaaacactgttaagtcaactaactttttatatttcatattgaatacttatattcaaggaattggaggaaatgatccttatcctaaaattaatcaaaatattcataatatattctaaaactattaaaagctattagccaaatcaggctctgtaataaactatgctttaaagttctcaaggtctcattggaaaaactgcctataagaattttaaataaccttaacaataaaaaattcttaaaataccaagatagataagaagctttcttttccaagtccttcaaaacgcaacatcttcagcccaagataatcaatttcacttaaaacattctctgaaattgctaaaaattatgaaaaccatgaaaatttctagcacagatttaaagcttattaaaactaattatttaatatttttttaacatagccagtatatgactccatgtagccccagaataaaactctattaaaagaagaaaagtagtcaaggtgtttagttaattaattcatccatgcacttaataaacactatgctggactactggctcagctggttaagaatccacctgcagtgttggagacctggggtttgattcctggcttgggaagatcccctggggaagggaatggctaccttcagtattctggtctggagaattccatggggtcccaaagagttggacacaactgagtgactttcactcacttactcatgctggactacaatgatggcgggggccgaaatttcacagtccttatggagtttgtggtctaactgggggacagctataaatcaaataattatacaaataaatccataattataaactgtatgaagtgatatatgagaagggtatatatctgtaagaacacatttaactacaggggcagagaagggtgcagagttctttggtgggatgggatcagtcatatattcctatgaaagtgacattccagctgatagctgaataataagtaagagttaggttttgggactcttttgatcacactacttaaaagggaagaaaggggacaatgaaaggaaggggaaaggagacatattcaaggatgcttaaaataatttaacgtttctatttatccaaaacaatatgccttaacaacaaatacactgttgccattgttgttgttgtccgactcttttgccaccccatggactggagcccaccaggcttctcagttcatggggacttcccaggcaagaatactgaaatgggttgccatttccttctccaggggatcttcctgacccagagatgaaacctgtatctcctgcattggcaggtgagttcttatttttcttatttatttacttttattgatagatcattataatagggtttttgccatacatcagtatgaataagccacaggtatacacgtgtcccctccatcctgaaccccctcccatctcccttaccaccctgcccctccaggttgtcagagcactggctgtgggtgcctagcaggtggatcctttaccactgaggtgataaccataataaataccagtcagcttgaagaagtgtgaggatatttttaaagtcttaaatactaacaatatttacaactcaaaaaatttacattggacccaagatctttcttttaaataatgctttcacataaatattcccatgaaagttctaaaaaaataaaaggagataaataatacaaaaatcatattttaggaaaggaaataactataactatatactacgaagcaaggcaaaggctatcagagttttgccaagagaacacaaggtcataacaaacatcctctgccaacaacacaagagacgactctacacacggacatcaccagatggtcaataccaaaatcattgatcatattcttcacaaccaaagatggaaaagctttatacattcagcaaagacaagacccgaagctgatggtgactcagatcatgctcactactgcaaaattcaggcttacactgaagaaaggccatttgggtatgacctaaatcaaaccccttatgattacacagtggaagtgatgaacacattcgtgggattggagctagtagacagagtgcctgtagaactatggacagaggttcataacactatgcaggaggtggtgaccaaaaccccccaaaaagaaatgcaagaaggtaaaatggttgtctgaggcagccttacaaataactgaaaaaagaagagaagcaaaacgcaaaggagaaaaagaaagatatacttaactgaatgtagagtttcagagaacagcaagaagagataagacagcctccttaagtgaacaatgcaaagaaatagaggaaaacaatagaatggggaagactagagatctcttcaagaaaactggagataccaagggaacagttcatgcaaagataggcacaacaaaggatagaaatggacggacgtaacagaagcagaacagattaagagaaggtggcaagaatacagagaactatacaaaaacaggtcttcatgaaccagataaccacaatgctatggtcactcatccagagccagacatgcaggagtgtgaagtcaagtgggtcttaggagacattactatgaaaaaactagtggaggtgatggaattccagctgagctatttcaaatcctaaaagatgatgctgttaaagtgctgcattcaatacatcagcaaatttcgtaaagtcagcaggggccacgggactggaaaaggtcagttttcattccaatcccaaagaaaggcaatgccatagaatgttcaaactaccatacaactgcattcatttcacacgctagcaaggtaatgctcaaaacccttcaagctaggcttcaacagtacctaaactgagaactccagatgtacaagctagatttaggaaaggcagaggaaccagagatcaagttgtcaacattggctggatcatggagagtgctaagtaattctagaaaaacatctacttctgcttcactgactatgttaaagtctttgattgtgtggatcacaacaagctgtggaaaattcttgaagagatgggagtaccagacccaccttacttgtctcctgaaaaacctgtatgcaggtcaagaagcaactgttagaactggacatggaataatggactggtttcaaataggaaagaagtatatcaagactgtatattgtcactctgcttacatgcagagtacatcatgtgaaatgccaggctggatgaatcataagctggaatcaagactgctaggagaaatatcaataacctcagatatgcagatgatacgaccctaatggcagacagtgaagaggaagtaaagaacctcttgatgagggtgaaagagtagagtgaaaaggttggcttaaaactcaacattcaaaaaaggaagatgacagcatccagtcccataaaagggggaaaagtggaagcagggacagattttattttcttgggctccaaaatcaccacagacagtgactgcagccatgaaattaaaagatgcttgctccttggaagaaaagctatgacaaacctagacagcatattaaaaagcagagacgttactttgccaacaaagatccatagtcaaagctatggtttttctagtagtcatggatggatgtgagagttggaccataaagactgagcactgaagaattgatgctttcaaatcgtggtgctgaagaagactctgagcatcccttggacagcaaggagacaaaccagtcagtcctaaaggaaaccaaccctgaattttcttcattggaaggactgttgctgaagctgaagctccaatactctggccacctgatgcaaagtgccaactcactgggaaagaccctgatgctggcaaagatggaaggtgggaggagaagagtgtggcagaggatgagatggttggatggcatcaccaacacaatggacatcagtttgagcaaattctgggagaaagtgtgctccttatggggcatgggttgcaatgagtaggacacaacttagctactgaacaacaacgacaaagattaaaatctcaatttctggacctcagaaacaagtaagtctcaaaagagtcagtaagtatttaaaacagctgctaacaagtaatgttatttacagtccctaaattttcccaccagatattaggaataagtagttaccgtatctaaaggcaaaatgatggaaaacattgagcaaaaatatctggggcccaagtgttaggatagtacattaacataaccatgaagaattcagaagcctacaaaatgtatgtctattctgtaagaaccaaacacaaaaagatttctgcttttggttatgacagaatagcccacagcagaccaacattaccttttataaccagaaaagctgtataaaatataaacaaagttcttaaggtatcagagactttctgaggtagttagggtttgaaataacaaagaacttgttaaaagaagccccagattctgtgcagctttccctctcagggcattccagctatttatttaatggcacagaacagggactgagggacttcctgggtggctcagtggttaagactccatgttccaaatgcaggggacctgggttcaatccctcgtcaaggaactaaatcgcccaggccacaactaaaaattccatgagccacaactaagacccagtgcagccaaataaacaataaatttaaaaaaaatttttttaaagataaggagctgagaagccaagaaaggacagctactaaaggggagaaaagtcagcagaggttttggcatcttcaaggaggtaaggggacaaaacttggtaactggatcttgccaagacgtaccagacttgagggattaagatcctatagaaaaggaaggtataaaagaacaaacctgacaatgtgtactgattttcctcttaaagcatttgtcgattcctaaaacgaaaaaagcagaaagctaaaaagccagcagaaaacaactgaaagcaaggagctcctacttttaagagcctcatgctgttgggaaggcaaaagcagaagaagcctgagaagcacccagtctctcagctgttcctggagggctaccaaagttgtacaagctagatgtttacaaaatctgaacccagcctcaagtcagctcaattccaaactgttgaggtgatctgccactattttatctgcctgccagaagatgagtgaaccttttctagagaaacgctagaacagtatatgcaactaactataatttctaattgtatctaaaattctaaatataatgtctggtagtcaatcaaaagttactcccccaaataatggtaataacaaccaccaagataaaaatgtgtgaagacagaaaatagaaagagacctaaaagtgatccagacagtggagttttcagatagactcttaagcaatttggctgatgtcaagaaaacagaccacaatatggagattttcaccagagaattagaatctatttttttaaaagagggaaaatcaaacgaaaagtctagcactaaaaaaaaaaaaaaatctgaaatcaagaataaaataaatgggatcaaaagcttacaagacatgccagaacagaggactagtgaacctggaacacaggtaagtaaagcctatccagaatgagaaacaaggaggaggaaaaaagatttaaaaaacggaaaaaagcataaaggatatatgggacaagacaaaaggtatagaatggattcaaccaaagtcagagaaggaagaaggaaaaaaagggggtagaaagaatatttgagaaaattagtttggaaatttttttctgaactaatgggagtcatactataaattcaagaggtctcagaaaccccaaacagaataaacacaaataaaaccattcttaggtgctaatactacatttctaaaattaaaatctattggagggaattctctggtgtctcagtggtaaagaatccgcttgccagtgcaggggacacggattcaatccctggtccgggaagatcccacacgccatggagccgctaagcccgtgtgccaccactactgagcctgtgctgtagagctcctgagcgcaggagccacgactactgcaccctgcttgcctcacagccggtgctccacgagaagagaagccgctgaagtgaaacgcctgtgcaccgcaactagagcaaagcccaaacagcaacaaaaacccagcgcagccaaaactaaataaatacaatctctcataattccaaagatgagtaactgaataagtgaaatacagcaaagtcagatcaccagcaacagctgaaatgtatcttatcaacatgtagaacatcccgggatcagccttaaaaaaaaaagttaatgcaaataacagagctatttgcctatctgccaaaaaaggaaagaaaaagtaaacataatactaaacctcctagtatttgatcaagataagaagtattgctacatagaaggaaactgacaatgctcagacaacatcttaataaaaatcacaaagatccaatcctaggagtcagctccacagattcaatctccagttcatgatgcatctcaaacttttcctatatcctggtatctttattttcctaaagttctaagatcaccagactgaaaatcagtcttagaacaatcagtgaatagtaaggttcccaagtcaggccggtactaattttaattttagtttagggaaagggaaagaggagtaggaaaaaaagaaagagcatgacagtccccagtctccaggggagtccaaataactccaaactagggattcacaactcctgggtttcagaagcctacaggattgtaacaaattctcaaatttatatgcacagtaatcactgtctatattccaaacaaataataaatctcaaatctatactatttttcaaatgtatatgattaataaactaaaaatccatttaaaagctaaaataaaggaagatgagagagaagaaaaaagaaatgacaagaagcaatgtcacctttgaattatgtaaccactctctagacatctctaaggacctatctgaccaaaaccacattcttaaccccagattactaaggataataccaaagtaaagccagggtacacagaaacagagtttcctacacaaacagcagaaaaataatctgatatctttaatccaacaattcaacatctcagaactcttcataaatgaattcaagatttgattctataaggcaaaatgccttatgactcctaatggccaaagaacaataaaaacaaacaaactcagggagcctaaacattccaaaatagggggtcaatgaaataaaatgccataaaatcattataacaaatgataatgtaaaagaatatttaataacatgaggaaatatttatcacatattaagaaggaaaaagaatacagaacagcaacagagggacaatatcaaaatggaaaatagatacagacataatggaatatctggaatatcgcagggtgattagctatctctgggtggtgggattgagaataatttaaattttgtttttatgagtctgttttgaaaatattcctcccataactcagggtgggtgttttttggcaatcagaaaaacatattcatttttaaatgtaaaattttaaaatagctgaaataggttcatctctcttctaaaatgcaaatcagtgttatcattttatttactaattttatttacttttcttggctgcgctgagtctttgttgctgcgtgagcttttccctaggtgaggtgagcagggacagtgctctaggtgtggcttctcactgcggcggcttctcctgtcgtggagcacaggcactagcgtgtgccggcttcactagttgtggcacatgggctcagcacagttgcagcatgcaggctcgacagttgtggctcccaggatctagagcacaggctcactacttgtggcacacaggcttagttgctccccagcacgtgggattttcctggatcaggaatcaaactcatgtctgattcgttaccacagagccacccgggaagccctgagataggttcatcttttatcctacatacagttttaaataatgtttgattttaatacaaaagactaagattaaaaaaaggttaacatttcaaaatgtatccaattttactacctaataaagtctttcactatacgtaaacgagaaggatcatcccatattaataaaattacttaacatgtacatatactttcaaaggtcctcccaatttttatataatacattaaaacttaaatgtcaaggtaatatagtatatctaaatatctttccctctctccattctaaccttgctgctaagtcgcctcagtcatgtccgaatctgtgcgaccccatagacaacagcccaccaggctccgccgtccctgggattctccaggcaagaaaactggagtgggttgccatttccttctccaaattctaaccttattgcactttttaatctgtattccctattaggaacatattacagccatgtaaaacactgaagcagctttgataacagaagtcaggaagtccaagatcagtcatatctcctaccctttcaactcttagaagtggacaatttatctttatctctctgaaccccagtttccctagctataaaagagaatgataatatttatcatagagtttttctgaagacgaaaccaaggaaacatgctaagtcctaaacatggtgcctgatcattagggggtactcaggggggtgattactataggcacacacaaagagtttttaaatctgagaacttgccaagcctcctgaaaactctgaccttgggcaagttacttgacctatatggacctcagtttcctcgtatgcaaaatagatacaatacctatccaccaggtttgcagttaaggatttggtaaaattatatacaaaaatcatcttgcacacagtaggtgctccataaattgtagtatcactattagcaagaacaatacatatctgagtatagagatcagcagtttataaaatatttttacatataagagtgcctctaagaattaaccatcatttaaacagatgcatttttcttaattcccagagtagttgtaaacttcagaaaaaagtaaaacacaagcaaactttttaaacacactgaaaagtcaaaggctacttcattagtttcaaaataaaactgtgttatctataatgcaatctgctttaacatttttgaagtccaaataaaactaaaagggttagaagaaaaatgttccttactgcctttgaaagaaaaagtttaagtctttagaacaaaaatctaagatctgaatttttctttttttaagaactaaaatgtaagtgcctttaatacaataaccctttcaaatcttctccacctttgtgcaaaagcagaacagctccaaagttaagaccaagcctgactgcctgagttcaaatcctgattctgtacaggagttaaaacttgaccagaggcaaattttaatgtctccatgtctgttgcttcagctgaaaatgaagatttctcacataactgctgtgaggatgaaatgagttaatacacttatgtagtgataagagagcctagcaaaaggaaggcaccttatgttccccattgttgttactgccttattattacccctcaagatgtcttgatcagtgacttataatcaataaatatttgctactctgtagacaatttcattgctagtcgctcaatcatgtccaactgtttgcaaccccatggactgtagtgtccaccaggctcctctgtccatgtaattctcctggcaagaatactagagcgggtagccttgcccttttccagaggattattctctgttggctcagatggtgaagaatccacttgcaatgcaagagaattgggttggacccctgggtcaggaagatcccctgcagaagggaacggctaccaactccagtattcttgcctggagaattccatggacagaggagcccagcaggctatagtccatgcagttgaaaagagtcagacagaactgagtgaacattttcactttttttcagataatttcaacaaaaggctttacttaaaattagactttaacatgactgtcactgccagtaaaggtacagcaattgctgttaagactttagggccaaagtaagtaaaggcgatcccttccttaagcttcctagcatacagagctacaacttagccttacttgccaatagaagttcagagtcatccttatttgcaattagaagttcaggtatggcatacaccaatccagcagacatgaaactctcaaacccaagatccataatactcaactccttcgaagaaaaagttcagattactcccctattgtaatagtttagtgctttaaaataaaaactatactgcataagtcaacagaatatcataaagactaaaaacacaataaatgaaattgtttgaaagtcaaatatgcactaaatactagtttacgaatatatctgagaaaactgcagtcaatttctcctattacaaatgtctgtgttaactccaaatttattatgctgtccacttcaaatctggggccaggataatgagacaaagtcaaagtcaagttgccatcccactaaatccttgcctgcttgaaacatacacttccctttttattcctaactcagataagacttatgatacccaagtctcaccccatgaacagaaatttaaggagtgaaatcctagaagcagtctaacttgaaaccaggaaaatgttcccagagttattagatcaaacaatgccaaaccatttcccaactctatgtgattctaacttgggtacagaaaaatgatgattaccttcagactcaacaatttggtaagccctgaaaatcagaagtcaagtaccgagggacacatttcaactccagctgagggctggaatgtttacctggttcactctcacattaaaagctggatgtcgttatcaatcagggacacagtcacacagcagccaccaacaggacacacagcccccatcaggccacaggccacttggcatccttcactgagccacatcctactaaaggcctgactgacaacccttgacctggagaacaggacaatgggctggcagtcaagagttcgattcttgcagttatagatctattttttagatttttgactgatttgactagagaaatcacatttgagaaagcgtgaagaacttttgaaatacaggtggcaaacttctgagttatgcttcacatatccagtcactttatttgttcagtaacaaaaaacatatgacttgtaagttgttttgctcataaaatcatttccggacttgtaaaataatggtccagggggacagccagcacttttcttcagggtctgcacagatcttaaaacttcacgaagctcgtttttctatcagtacgtattgataaaactggagttcgatttgctccttctctccaagatgagctaaagctaagtaaatactgaaccaaagtactgtcagcatttcagaagcaatctgctacagaaaaacatacggttttcctgcaattccgtttaacacctaagttggggattcagaccgagcgagtgttggaagtcagattcattaaagtcagacttttttgtctgtatttgagcttctgggctggaaaactggtctgtgtcttcataaatctaagctctgagccatcatataatggaactcttctgttcagaacaaccagccggaaaaggtaccctctgcaaatcctacaatgtatgcccacttgcaaagacttcacaacttttcggccgcctgtgacttctacactcctccggagctaatcgcttctaatgaccaccacctccctcccccacgaagaatcactcttcccagccttacacttcgtcccggcagcaaccgactgaaccttctcccccgtctccggagccctcggcgcccttagacatcttcaccagtttgtccgcggtcccaaccctgagagccccgactcctgccttcacgtccctgagctgcccgcccccaagcccttctcaactaccaaacacggccgcagcatcacctggctccccgctgatctacgcgccccggcgccgccacacacctcgcccctttcaccccgaccttgctctcggaatcctaacccctccccgaggcgggggcgggcaagggctcttggcagcagcactgagacttcggaggccgcgcgtccccctcaccaggccccgcctgggcctctcggcgcggctgccctccacggcccccctgcccgagccgtgcttacgccgaacaatagggcagcacgagcccaggactcggcacttactcgggaaggtaggtggaggagaaggagctccacttgtgtagcgcgtagggcagaagccggcactcgggcgccgcagcaacagccccgccagccgccatcttgtcagcaccgaagcggccgccaccgaccgcccgcctagccgagaggagggaaggggcgtggcctgcacttaaaggggccgcggcccgcctgggcggtcagctctccaggtctcgcgtcgtgagcgctgcgtgaagcagtgagacgcacgagggttggctagtcactctggggggtctccgccgctgaaccgtcctgaatgactgactggcggaagctggcactggagggtgagcacctgacgggctctccggtggggcttgcaaaggaatggcttaaatgacttttcttgaaagctgaggtaagggaaaggccaaaaatattgtgaacagaaataaattgtagttatgggccaggatgggaaaatgagaagaatttggagaagggaccgccagtgagactggaaaccacggctcactgcagtttctaaattctttaaggaaacgcactgaaggaaacgagtggcacagctaacggcccttccttctggagttgtcct

SEQ ID NO: 180 - DNA, 11558 bp, Hippotragus leucophaeus
  source 1..11558: mol_type = genomic DNA
gtaacaaaaaatctgggagcttagctcaggaagtttcagggatcctctaattcctcttcttgatcaggaggtcgtgctcctagatgaccttcaggcctgagaccaaaggctcacccacactttgaggtgaagatgagggcgggtagagggtatcccattacaaatgaatttcaagtaaacagcaaataattttttgcactaaaaatatttcatgggacacagttatactaaaatctattcattgcttatctgaaattcaaatgtaactggaaagcctatattttatctggcaatcctacagatgagggatcagcattaaaactaatgattcccctaagatgaaacctgggattaaggaaaaaagaggccacagtgagccgtgacattttgaggagaggaatgaagttggtttctttcacgctaattaagcaatcacaaacgaccccatcagaaatctaaactcgtgattaacatgggactcgagaccaggggggaaaataatgaaaaaggttaagagccagagaagcaatcttcacagaaacggcagccagcagacggagttggtcccaggaaggcaggtaagagcaatgccttttcacctactctttcagaacagaacagggtttggcagattccagtggactcctccagcctccctgatacctggatgtcggcagaattctcctcaatattcacaattctccgacttttaaggatccacaaagtctcctcctaggtcctacctctagactgcccagaagcaaagcagagaaccaggaaaagcagttattcaggctgtaactggctcatgaacagccgtgtctagtcctctgaagaaccacttttcttggctcaggtaggacatttgctgtcctgccactgtttgccaaggctcgaaactgtaggtatagatttacagaaaacaacttaatgcagaattcgttttgtgtctgtcattttgaacagagttcatccccacattattcacctgagatgatcagtaaggtcaagtgtgacttctttacaactgggaagcacaaatgacacatgaaatgccccaaggaaagggttcatggggtgaactctccactcccttttcccacttctattcagctgttttaaacgggctcattaatataactctatggggatcagacctatgcagttcacaagaaaaataaaaggaatgaaaaacacacaatagcaaggagagaagagaaatcattgttggtttttaataagcacactctaataatgaccactaaagttcatgagctttttatttgtttgtatcatagtttaaaatttcatattttggggacagtttcctttgttggaaaatgggcttgaaggatgctgtgctgaggcacatgcccattatatcatcatagccttttatttgtccaaggattgatataaaataatacctctggagagaaataactcctcttattaatctgtcttgagccagggaaagtaagcaatgaattaaaatgctttttgtttatttctctacaagtttatggtatagagtcaaattaattctcaaatcacaactcagtttgaaagttttttccttttgtttgtggtttcttctttgaacttagatttcagttggtagaaaggggttaaaaacctgagcaattcccacttgatatctgtgaaagaaacaagtacgagtccttgcagagagagaaaacagagggtttggatgtccttgtcggtcacctagtgagaatgtctttgtgggtgtttttgagatggtaagaacactctggatgcatgaaatgacacctgtgtgtccctgctgctaggtgtcccgtggcctgaccctacaagatgccaagagaagaggttcacttcttctatggttcccccaggaaagggcacagccactcttatgtcaccgctgaagagtaagttcaaaatcagacccagcggggttacagtttgccgtttgctgacacagcctctggcttccaccagcacatgtcggtccgtaaatctctctagtgtttatttctccagaaataaacctggcaatgaggtaaggagaccctgaggtcctacaaaaggtctcaggtttctctgaggccaaagaggcaaagagggagggaaggcaaaaacctggatcttgccatttttgttgcattcttggctatgaggcctttactgtgggttcccaggctgaaaatcctctgtctgagagcatgatgcctctgtcctcaagccttgcctgtctactccacttgggctcccagaggtggtttgcagatagaacagaggcaagttgccaaaggatagtgaggttgaagggcaggtgcgtccctccacctgctgactgagtccaaggtgaagagggtggtcataacctttgcatcaatgctttaccctaaagaaaggtgttttgtattatgaattatttaaaaataagtatttgcatgattaaacatttctaagtgctaagcaatgtataccaactcaagatgctattctctcctttgaaaaaaaatcttacaacctactgggagagttaggcctgggagtaatttcatcaggtatgagtgctgtgatggggacataagccacaggacatactctgcaaggtgagagtgggcaaggggtggtggcggtaggaggggcccctctctcagtggagattccatcaggacaaatgaggaatctgggttttatttggaccatctcttaagtgatctgctcagaacttcctgcaaacctgctgtcttgggagagacctgttgaattgctttactggagtgaactagcaggggcaagagagatggagaacctgtcaaaggcactgaagaggaattcaggctggagtatttcttcggaagaccctagtgggattctctaatatccctgcatggtcaaatgggatgtggtggtgagatcttctgaaaaaatgtgccaacagcaaaaatatactcttcaggggtacaactgcacatggtattaggtagtatatttttcaggatttgcatgatgactcagcagactctatctctgtgaaaccacagttgagaagttctcagttgaggcggcacaagccacctatggagctcgtgaaaatgcagcttcctaggcactgctgcccaagaggctgactcagtaggtcttggggtcagggacccaggatctgtactttaacatgaatctcaggcaactcccttgcaggaggtatttgggtgacatctgaggagccctgctgggcaacgggttcttatggtacgtctggcacatcccagcatttttggctctcacttcctgtgtgtgagtgcaatgtgactgtggtgtgaggagttcaaacagagctctgtgtgtgtcaagatgcccaagggggtgaccacagacctaggagggagaatgagagcacaggcgtgctgggaatggaatcatctgccttcagtcatgagaacccactgaatgcccttgtaatagctccatttcaggaaggggtgatgcggtcaaaaaggcgctggctgggtacctcaggccagtcgctgtgaatgctggttctgccactctctggctgtgcaaccttgggcattttaccagcctaaagtcttagggatgtcagatgtgaaatgaatgtcatacctacccctgaggattgttgtgacagggccaatagcagggtgctcaccatagtgcttggcagggttgttgtgagaattaaataatctaatgaatacagaatggttatcacggtacccagcttacagcagacattaagtcaaagttaaattctgtttctttttttgtggactgacagctggggaaaatgttttaaactagccctgatggaaagatgactcagtccacagaggggtcagctgccactgcacctgttgcccttgcagcctggccgctggggcccacgacagttagcactgctgctgtggacacacacctgggaggctccgagagatggttctgtctctgtatacgcatgctggaggcccatgggtgcctggtgtggggtggggtggaatactccttggggactgggagatgctgctctgatcgcaaagcccctgtgaagagagaagattgagacacatttcttcacaatctggagcaaggtttccataccaaggtggacttgtctgtctctcgggccagggctgcagggattggcatcctgacagtgattctgggaattctactacttctcagctgctggtactgcagaagacgaagtggttaccgaagcttaaaggtcagtaaagttatcactgctgattctctccagttccaggacctcccttctccttctttctctgaagttctggggagtggaatgacagtctcatgatcacctccagcactgattcatggttctgatgcatctctctctatgctgtacatcttataagtcttcttttgcctctgcccaggcatgaatcccaaccaggaacttggcccatctttctgattccactcacagcaaactcgagggcctgcctatgtagctgattgttttgggggcaagggggaaggcttcgtggtcctcttgtacaattgaacagaagtacatgagacactccaggtcttaccaatccttctggggattcccactggctctgttactccacttagtggcccattcttcttaccctacctcttcacccctttctttccagggttcctgggaattctaagttctctaactctattagcaagcagtccagcatagccaggactcatgtagccatcagtgcaggaaactgttcacccctcagcagcacaaagcaccgccaggtttttaacaggctccttcctcctttgatgctcgatgtggttttattagaatttttgctcctttacccatatgagcaggaagttaacaaatgacaatgtccagtcttggggtaccaggatccttcacaaacaagcaaaatcaacagagtcactaacctgtgaagaccacaggtttcagaaaccttgcttaaaagacaggtagcagtttggaacttaagcatccaaagccattctccacagtgagcaacaggatagaaggagagttgcaatttttctttctcctctctctttattacagatctgaaagcttctggggttgatatatatggggaaaaatttttatctttacaaaagatgttgaaaagtccccttcctcatttagcaacacttcattcagagaaagtggttttgtgatggagaggagggctggtctgggtggagggctagagcctggcagtctgagaagaagttcagtttagttcagttcagtcgctcagtcgtgtccgactctttgtgaccccatgaatcgcagcatgccaggcctccctgtccatcaccaactcctggagttcactcagattcatgtccatcgagtcagtgatgccatccagccatctcatcctctgtcgtccccttctccccctgcccccaatccctaccagcatcagagtcttttccagtgagtcaactcttcgcatgaggtggccaaagtactggagcttcagctttagcatcattccttcaaaatcccagggctgatctccttcagaatggactggttggatctccttgcagtccaagggactctcaagagtcttctccaataccacagttcaaaagcatcaattcttcagcactcagccttcttcacagtccaactctcacatccatacatcaccacaggaaaaaccatagccttgactagacggaccttagtcggcaaagtaatgtctctgcttttgaatatgctatctaggttggtcataacttttcttccaaggagtaagcgtcttttaattttgtggctgcagtcaccatctgcagtgattttggagcccaaaaaaataaagtatgactgtttccactgtttcctcatctatttcccatgaagtgatgggaccggatgccatgattttagttttctgaatgttgagctttaagccaacttttccactctcctctttcactttcatcaagaggctttttagctcctcttcactttctgccataagggtggtgtcatctgcatatctgaggctattgatatttctccccacaatcttgatttcagcttgtgtttcttccagtccagtgtttctcatgatgtactctgcatagaagttaaataagcagggtgaaggggaaggtgaaaatggtagcttcaaattcttctccttgcttgaaagcttgggaagtcccatgtgacccttttcctaatgcccatcttgccatggtgtcccagatataaatcatgaaagggtgaacgtggggagacacaatcaccaagcagcagccctccagtgtggtggcatttatgggaaggagaagttctcgagtctgaataagactccaaccatagcaaagccttgggttgagagggtagggaatataactctttgctctctgctatacacttcatgtgtacctctagaacagggttatgacattgccttgtaatttgttactttttgcttcttccaccccttctctttatcccatttggagctgatgtggagagtattttttattccctttttacttccagagcctagcatgatgcgtggcacacagcaattgtatggcataaggatttggtctcactctgctgttgacttactggtggccttagattttcatttctctgagcctcatttgctctattatacacctagacacagatgacataacatgatgcatgtcactttttatgtaatatatgctttcttctataaataaaaaaattaattctatgtttacatattaaaaagaaaaacaatgattagtcgttcaaggaataaaagctctacaaactcaatatgttggtatccatcccttcagttcagttgctcagtcatgtccgactctttgcaaccccatgaatcgcagcatgccaggcctccctgtccatcaccaattcccggagttcactcaaacttctgtccatcgagtcggtgatgccatccagccatctcatcctctgtcatccccttctcctcctgcccccaatccctcccagcatcaggtcttttccagtgagtcaactctttgcatgaggtggccaaagtattggagtttcagcctcagcctcagtccttccaatgaacacccaggactggtgtcctttaggatggactgcagagtgaaagagttggcttaaagctcaacattcagaaaactaagatcatggcatctggtcccatcacttcatggcaaatagatggggaaacagtggcttactttattttggggggttccaaaatcactgcagatggtcattgcagccatgaaattaaaagacactcactctttggaaggaaagttatgaccaacctagaaagcatattgaaaagcagagacattactttgcaaacaaaggtctgtctagtcaaggctatagtttttccagtagtcatgtatggatgtgagagttggactgtgaagaaagctgagtgccgaagaattgatggtttgaactgtggtattggagaagactcttgagagtcccttggactgcaaggaagactgtccataattgctagcttgatgctacccagacaaaaaagcaacctttctcccctcattctgcttcaacactctcttatcttaaatgtgttcagtgcaagaatgacagtctgagccgtggcctccaacactgaacatttgcctggctgttcaacctgccatcctccactcctccagctctcgaccagtgacttgcagagtttctggaatttttatgagatttaaaaactgtgtttaaattccctggttccatctaatgtttaaaactggagtcatttatttttaaaattaatattaaaatcttgttttgagactttcgtatctactgaaaagccaggctggggaccagcagtctaagaaaagtaggtaaaattatgtaaggtagtgcattaagttctgtatttaattacacagttacctccctgtctctctttggtgattctgttttcattataaaacaaaaacataaatgacgattaatgcgagcttcaggtaccacttttaaccaacttttactaagctttgaaatatgtttatttttccactttcattgaccacagaatggtagaaagtttggttggatgtaaggtctcctaaaatttcttccttgcccaacaattcctcttagacctgaaaaacatcttttgaaaggaaagactgctttttgcagaaatgcgtttctgcaaaaaaatgatttataaggcattggaagttggctttcatatttatgaattttattctttcacttctaagttgaggacatagcacttctgattcttggggaaaaattaaaaaggtctcctgacagctcagtttacactcacatctttcagtgtcatgtttctcaatgtaagtcaggggctcctgcactcaaataacctagggttcttgctaaaatgtagagtctgggaccatctctagtggtgggacctaggaccctgtttgaacacacacacactgaagtttgatcttaatacacagaattggcagtgaactggggaagtgaatcaagctcttaacctatggtaggtgagaatttaaaaaaataaggaataaaatcaataatcaaggtaaagggagagaatgcattaacattaacacaccttgtgctgtgccatgctgtgcttagttgctcaatcatgtctgagtctttgcaacctcaaagactgtagcctgccaggctcctctgtccatggggattctccaggcaagaatactggagtgggttgccatgccctcctccaggggatcttcccaacccaggaatggaacccaggtctcctgcattgcaagcagattctttactctcttagccaccagggaagcccaagaatactggagtggttagcctatccctttcccatgggaacttttcaacccagggattgatccagggtctcctgcatagcaggcagattcttttgctgagctactcaggaagcccattaagcaccttactggaggtatatcactgggagctgtggaggggagcagaacttccttggatcctctcgtcaagattgggatccttgtgcttatatacttccaaaaggtagtgtcaataatgatttcagagtagagtttaggaaaacttctttacagacggcagactctataggtaccagccccaaccatgtctggtctcatccagttgatgatccaaacacttctcctccctgggagacccgtccggatgccattctttcaacccagtaacaccagtaatcaaccgcagtctacaggccagcctgcggaggaggcactgaaccctggcacagccttgctgttccaattccagccgggaccccagagagctgctcatgccctactggtgaatttggttcacagataatgtttgggtctgtaacttaaaaaaacggaattaggtgcaaacatttaaaagtaacattttatgtaaaaatcttaatttctagtttattttttgaaaaaaatcgaaagatctggcaaaacttggcagctatgcagtggtttgtccctttagaagggacacatactccctccttttctgtggccaccccccccgccccgacctcctccttcctctaagggtcagatcgtagcggggtcatgccaggcacaggcaataaggaagtgcgttgcctggagagccctggaccagcagtatcagtatcacttgggaacttgccagaaatgcaaatttatgggcttcaccctatacctactatgtcagaaattctgggtgtgagcccagcaatctgtgtttaacaagccccccaggagacactgctgcattctaaagtttgagaacgactattgtggagaatttaatggtaagaacaactaaaactctgctttttatgatcacaatgtgccagcaatttaaaacaccaccagtaatgaaatactccacttcaaaagaaactgtgcctctgcagtccctgttttggtacgtgtctctgtcttgcacaaactgttgtcattctattctagggatggagagcatcaccccctcaacctatgcaaataaccaaactataagcttttacccaccccttcccccaataattcaaagtgcacagcagcctgaggctgacttgtcattgttgtgatgcgacttggaagctcagcattacaaccacagtatttctatcacaacacaagcattcagtgtttcagatatattgctgtgattatgctgctgctgctgctaagtcgcttcagtagtgtccgactctgtgcgactccatggacggcagcccaccaggctcctccgtccatgggattctccaggcaagagtactggagtggggtgccattgccttctctgtgtcattatggggaaggcagaaatagtgtccctgctatcaagctgttcctatgtttctcctcactgtgaaaccacctcttgcctccctagctctgatctactcctcttgtaatcattctctgagatccagttgtatatttcactcttcttcctttcaaaaatattcattgaccaactaatagatgttaggcacagtatttggtgttttcttgtgctcagtcatgtctgactctttgtgatcccatagactgtagcctgccaggctcctctgtccatgggagttttccagggaagaatactggagtgggttgtcatttcctcctccaagggatcttcccaactccacatcgcctgcactggcaggtggggttctttaccactgagcaacgggggaaggctagttctgagaggtaggtaacattatcttaatattactgatgaaaacactggaattcagagagattaagtgactacctgaggatacactgaggataagtggcagggccaagattaaaactcattcttaaaatgtcagcttctttctccttttctttaatgcactcaattattttttctcacccattgaccttcatgaattcacatttcaggacaaaaacattcatgctggtactcaaagtaccctaacaggaggatgttcacatgagtggcttggtcaacaggacagcaaattgccttttcaagagaacaattgtgaacctgtggtaggttgagatcctgcatcctggtgtttctgtatatgcctacttttaactctaatgaataaaatattgccatttaaaaagcaagggcaatgtgaatatatttaatgctactgactaaaaaatggtttaaatgttaaattttatatggtatattttaccataataaaaagtaaatagtaagattaaaaacaaaggaattcacagaggttttcttaaattgtgtcctctcatatccagagtttcctgggtcaataaagaaacatctacgtgtaaggcccaaaggaagaacttggttctggatacaatgtcctcttgtctcatgttttttagtataattgcctttgtcctgaacatagacataactaacagaggaaaaaagtgcctattattaactgtatagagttgcactgtccaatagttgcactgtagccactagtcacatgcggttattaaaacctgaaatgcagtactttgaattaagacattctggaatacatact

SEQ ID NO: 181 - DNA, 56447 bp, Hippotragus leucophaeus
  source 1..56447: mol_type = genomic DNA
tgaaacggctggatggcatcaccgactcaatggacatgagtttgagcaaactccgggagttggtgatggacagggaggccttacgtgctacagtccatggggtcgcagagtcggacacgactgagcgactgaactgagctcgtagagagggaagcgacggcaggctagaagaaggttcctcagcggctgccctccgctcaacccccgagggcatcctccggtctcttcccgccccgtctacgcgcggatgctgactccgccgactttttcttgactggcgaggtctcgggaccctccccgcggcgtcgatcctggcgctggggcttctctctccaaagtcccccttgcccgccggcgttcccacgcgttagtcggcggctttggggaaggcgccttcctgagcctccaggtcccttctgtgaagccgagtgaacagcagagtaaactgcagagctgggatgggaattaagtcagaaagcgtgcagtccgagggcgagaaatgcccccaggtccctccgcgccgagggcgcaccgcgggggcgcgttacctgcccgactccccaggtgcgggcccggcctgccctccccgccgccgccgccttcctccgccaagctggctgtgggcgaggagcgatggtctctgcccggcgctggcgcctcccgcgcgggcgcccgggtgcctgccccgcccgccgcccgcacccggaggtgctcgccgctcccggagctgggcggggcgggcgcggccctcgtgatccccgcgggcgcccggacctcgccctcccgccgccctgcgccctgcccggcccgatcggcccgcctggcctcagagccccgagccccgacgcccggcccgtcgcctcgctctcgctggcaggactggagggggcaaccccggggtcccggcggccagggccgacacccctgggaacggagtcggtgagttcagggagaaccggggcggtgggcgggtccgcggtgtgaaaacgcccccaacagccccccaggtcccggtccctccagactgatgaggaggacgcgcccagccccctctccatcccaccccccaaccgaaccccaaagccaggcttcacctggagagcctaaccggaggtctgggtccttgggagaccattttgggcaaatcggtggtttccatcagaagtcctgttggcgatggccctgcagacggggctgagcctgcccctccgaggagactaagctgggcaggtcactcgggccgaggctgtttggggagcgactcctaccagagagagagccctggggcgtcctggcatgggaggaggggtcctggattgggggcccctgaaagccccacttgtattggaattttgtttgctgacaggcccccagaccagcccacagggcccgggggacggggctgcaggtgaagggagtcaggtagtggccactggccaccggcccctgcccgagccaaaaagtgaagaacgcttcagctgtggcctgccaggctcctctgtccacggggagctccacgcaggaatactggaggggattgccgtgccctcctccaggggaccttcccgacccaccagggattgaacacttgtctctggggtctcctctttacacgagcaccacctgggaaccctgagccagacctgtgtacaaaggccctccagtctcccaagctcagacacctgtgtcctgcgcaccttaaccacttgttgagaagaaccccagtccattttcagttggcctgggacctttacatttttatgtgttttgatttttttccttcttagttacatatttctttctgaaaggctggagtgataaagcgggtggcgaggcccccactggcccactgggtgcaaaggcagcaatgcccatcgccgtgaagcccagggagacggtcaggcttaaagaccatggcagtggagcagtgacgttggcacctgggttcagccactcacatccatcttttaccacctagccctctgccagccactccactaggcctcagcaagacccagctttctcgggcaagagccctgtacctggatctccagggcctcatgccttagaatccaagtaccatgcataggtccctgcgctccccctatgtccaaactccggacgcagtggtaggtgccccgcaggagtgactgaggactgctccaggcgcacagactagcaggcacggggccttattgattgaggcaggagtgactgaaacattaaggccagctcagggggaggcttgagggttggtgaagaggagccagagccccacaggctactcggaagggtggctttggtgccctcggatggcagcatggtgatggttcatggggccccccgcccctgccatcgggtcagcgttcgggagctgcctgtctcattctttgcagaagcaatctctagaggatgaggccccctcccctgcatccacccaatgacctctccctctaattccgacatcctggcatcacccaaggctggagagggccggaggagtcatggcacagctgcaaacactgagacccgcagaggaaaggggctggtccctactcgtggggccagctggtgcctgaatcaggattggaacccagcccctgaccctcagggcatccttgtcccgcagcatcacctggggctccatccttgctctggagtctgtagccaaggatttcgtgcaagtgtggaaggatgtccgtgtagaagcaaggtttccagcagctccccagggagctgagagagtggagagatggagcaggagggaggcaagcggcagagcctgagctgctggggtgatttcagagcacctgcaggggtggggtgcctccggggtagaaacatgctcatgctgcagctgaggaaggttgaggggttggttgcatgtctgggaagccagccctgcctgcagaagtaaccacacagccccgctctgaggacagcatttgggaagcagccacaaatggttaatgcacagcccccctgcccccagctagcacctgggccttccccctgaatgtgcctgtacctttatcggtaagggtcacccacctgattctgagtcagagcgcattcctgccattgttagcagggcattgaagaggaacttgggcttgctgaaaagtttatcataggcagtgacggctcgttcttgcctttgttcccaggctcagggggcccctccagcccaagttgtgcgtaggaagcacccccacccatatttccccttcatggggtcaaaatatgaactcaaatctttaacagacacagatgagccacggctgaaatgcagtgatctgggttcaggctgcccactttgtaaaaccagttccactgtctctttccaacttactaacttccatgtagtgttctcttttctcccttataacttataaatgacaggggagggctaacagtctcgaagattaacaatgtgattaaatctgagccttgggccaggcacaaattgaaagtattttgttcaggaagctcatgactaggcgttatctacacccaagtggaaccaggggcagatagagcctggggagtctgccctccccagcacgcacaccctgggaggttcccccgggccagggcaggtcagaaccctgtccgctctgtgggtcaggaatgccccgtgttagtagggcatttaggcagacccaggtcaggctctcctcccatgctcccccctggctgtggtggttggagggatacctggtggagaccagggtcttggtgagcaaagtggggagtggtgggagagatgaccgtggctgaaaggctgtcccctccatgaatccagggtccttacgcgtggccgtacctgacagagtatctggtaggaccttctaccacatcccaagggcccccatcaacgtagcagcctgacacaagccagaaaggtgctaacagctcatgtcccaattgccagtgtctttcggtttatgccctttggttgctgaaatcaagcatattctccattctgtttaaggttattttctaaagatagtttttaaaaagctttagcaacctaaatgtccatcaacagagaaatggataaagaaaacgtggtacatgcatacagtggaatattcagttcagttcagccattcagtcatgtccgactctttgcgaccccatggactgcatcacaccaggcctccctgtccatcaccagctcccggagcttgctcaaatgcatgtccattttgtcagcaatgccattcaaccatctcatcctctgttgtccccttctcctcctgccttcagtctttctcagcatcagggtcttttccagtgagtcagttcttcacgtcaggttgccaaagtattggagtttcagctttagcatccatccttccagtgaatattcagggctgatctccttcaggatggactggttggatctccttgcagtccaagggactctcaagagtcttctccaacaccacagttcaaaagcatcagttcttcagtgctcagctttctttatggtccaattctcacatccatacatgactactggaaaaaccatagctttgactagacagacctttgttggttaagtaatggaatattactctgccattaaaacggaaatgccatttgcagcaacatggatggacatggattgtcatactgagcgaagcctgtcagagaaggagaaatatggtatgacattccttacacgtgtaatctaaaaagaaattatacaaatgaatttacaaaacagaagcagactcaaagaaaatgaacctacccttgccctgggaaagaggaggaagggatggatagggagtttgggatggacatgtacacgctgctgtattttaaatggataaccaacaaggacctcctgtagagcaccgggaattctgctcaatgttgtgtggcagcctgggtgggaggggagtttgggggagaagggatgcacgtgtatgtatggctgagtctcggcggttcacctgaaactatcacactgttgattaattggctacaccctaatgaaaaataaaagtgaaaaaaaaaaaaggaaaaaaaactagctagaaccaactgggtccaagatggggaaaaaaaaaaaaactttaaactaccaccgccgcccacccaccatcaccaccaccaccaccaacaaaataaactaacaaaaataattaaaagctttaagcttctgctgcacttcatcagctcactgaatgggaaggctggtcaccgtagtaaagccccgtgtcggggaccacaggctgctgacccctggctgccctgagaacccgcttccctgggaagcatcacctcccagctgcatggcatagcgtccgaggaacggggagggtctgaagtttccagtcactctcccaccaccgcctgctcacccagaagttgggccagagctaaaaacaggcaccggagtaaaagttttcagattatgtctaccccatgaagtaccgacagtccactcttgggttagctacgtgggaaacttgtttttcaagctctgtattacctcattcctggcttcattaagcggagcatcatgaacacacatcagtttccctggtggcttagaccataaaaaatctgcctgcagtgtttgagacctgggtttgatccctgagtcaggaagatcccctggagaggggaatgactacacattccagtattcttgcctggagagtcccatggacagaggcaggctacagtccatgggatgtgggggggtggggcggtcacaagctgttgaacacgactcagagatgaactctcacttaacaactcagggtcacccctggaacctccgagttggtgctgttatgatgccctggttcccctgaagcactgtcccctggccatctctctctgttcacgcctcagcagcttttgcctggcctcactccaggcaatggcagccagcctgggtgtcttccctaccccatccctggcaggcaccctcctctccagaggtgactccctggtccagtatcaccagtccccaggctgcgatcgattttgctgtctgagccaggaagccaggtgccagccttgttagaaagaagcatcaaacagaagagacaggcttgagaggggcggggggtacatcctctgggtgtgaagtctccaggcaggggttctgacccctagtgggccattcatccatgggtcatcagtcactgacccactctaagacaggtaagcttgcatggcaagaaaaatatactggtttccttttgttctatttttctccctcacacctctcaagttaagtttcttgaaatgaagcctgaaattgtgacttttcctttaggagaggagagagaatgctgactactcagctgatagtcacggctttcatctgctctgaaaatagaatttcaaatgaatgttcttcttatgatagaattttctcaacgacagtaaaaaacgaagatgaataaaccccaggcatccatcaaatgactttttgttccattttttaaagacaaacagaaactatgtgctctggggaagcatcaagagtcagtttgggtttaatgttttcacgtccaaaaatctcagttcaagtgtaaagaaaatagtttgattctgacccatcagggcatcctcttaatacaacattcataatgcagtgcttgagtttggaaatattgagagggtcagtgcaaaaaaaaaagaaaaaagaaattatttttcatctattttaaagcatagtttgacagccacgggatctctgtggccactttcattttaagtggtatctgagtgttactcagaaaatgacactcttcataattaacgtcctgtacagcaagcttgctttctagcacagagcaagtgttgtttgcatttgcacagagatcactttcaggaggtcagcgtcagtgaatggagatgctgctcagaattcagaagcagatttgcgtctttggttggtgtttaaggcttcccagtgaaaccagacagactgggtcccttctccgatgttcctgaaaagcgggtttcagtccttcatgaagacttgctgaagtcacacagagattcttgagctttctgttcccaccaggatcccgtcacccagacagaatctgccccccaaccccgtcccactagaacagagctggactgagtgcagcagtcgtggtctctggccaagggtctgcagtccacctcccgcagaccggggcggggcaccaaaatgtatcccccagtgccagggggaggtcgcagtcatcacgatatatggaatgatgctctgctagctgttagcaggtgggcgtgctgggggaggaggaggcaggtggaggacccctcgaggaccttgtcagaacgcagattctgaatcaggagggcccgggcctgggagtctgcatttctcacagtccgggagatgctgctggtccacggagcgcaccctgagtagcaagaaaggtggtaaagttctgcttctcttggtttgtgatggctgggttttccttcctttgtcctcttgatgtgaattgagatcttgagtgttcagaaagggcacagtgtcatctgacttctgactctgagctgtggggactctacacgtggcttcccttattttgactgtgcatgtttccagacacaggtttgcctgttttcaaaaacgacctaacccaggtccagctcctgggaaattggtgttttctgcgttgtctcttcctctgtgactcagccggcacctgcacgggcttcctgggctgacccctgggccttgtgttactccaggtgtgaccttgaggagcagcagagatggggaagacactggatctctccaagctcacggatgaagaggccaagcacgtctgggaggtggttcaacgggacttcgaccttcgaaggaaagaagaggaaagactagagtaagtgtgtgtggcgggacccttgcagtgtggtcccagcatcctctggaggggctggccccttgggggtctctgggcaggcagacgacaataactcagtggaggacactggatgaaagtcacgggctttctgacgtccgttccgccttaattaaaacaaggagctctgagttccctcctgatggtcagacgttccctgaatagttttatttcaacttgatccagcgccagggtgacattctctgctaatgctaagcccacaaccttgcatgaataaaggtgatgaagagggaaggtcttgatgctgatctgtaacacccaggagccaggatcaagggctttcaggacaaaagccccagcagagctggggtgccccatcctcaccgtggaggccccgcaccatcttgcaggccgctcccatgggctgagctaaagcccccttggtgttatatgttcttcctctgctttgcttcttcctccgccaaacctccaaggcttagctgcctcccgggctcctttgttgcctgggggtattttgtgggttggcaggcctattgcaaaggagacattaagtgaagactcaaggcgggtgggaagtggccatgggaaaggcctgaaaggctcctgccgtggttgagggcagagaggaggtcagagctggggtgaggtgcaggcaatcacgaggccgagggtccagcaggacgtggactggctgttctctgtgtggctgcaggccttcaggcgagggagtaagaagacccagattctgctctgcagccggcaggctactgagaagcggtcagatgagctatcaagggggagccagaaagtttgctgaagggctggctgtggggccttgattttaggggcagtgttgaggtcacggatgactccagagtcagggcctgagtaactgtgggtttggaggggttctcacctcacgcggggaagctgagggcggagcaagtatggagggaaccagaacacagatctgtggacactgggtggtctgttagacacgaagtggacggggcggccccacacacaccagatgggagcccaacgagacaggactgtgggagtgtccacctacagaggccgtggctgctgtaatcacgccaaaccccacggcctaaagcaagcacacagctctctgctgagcctggagctcgggagtcaaggtgttgacaagctgtccagtgaaacaagttcagtggagcctagcatcccctggtgacggtggggaggggtctggggcagcaccaggaggcttcttgctgcctctctgcgcagccctcctcccctctgctctgtcctgggctgcaggtcacccccagcgttttcattacgaagcagctttcaccccactggtgtctggagccctgactcccatcagttgctgccacccaggaccagggcccagagccagccttggacatcgtcccggtgctgactggggcaggcgcccgccttgcctcgggtctcctgtctttgcctcagcctgaggctgcgcccggggtcagagccacacgctcttagtgacggagcccgcctggtctttcctgtctggggatcacagcccctccaagcagcccagctgttgtcactcttatttttaatggcagctcagaccctcccattccacgcctttatagaagcacagattgattgagggcgggggatcccagttctccagggagacctctgagggcgtcagcccctccctctgtccaggcagaccccaggtagttttgcagaaattcctgcttcttgcctacagggagcactgcaccctcctgacccccatcactctatttgccatatttcctgtcgtcatttcaggttacaaaggggagacacaccctggtagcctccagttactgctagaaaggaagtctccaaaggatcccactggtgacaccccctctcctgggggcgcctgtggatcaggtcaggtccctggtcagtcatttaaggtcagggtgacatccttgttcagaagtccccgaagccttctgctcagaatttagtgtcttcttggccagacatgtgacagttagggatgagcttgttaaatacaacagcgcaggacgtggtccctggaagtgtccgcatgcagagaggtggtggttgggagaatccacgccagagccaaggcgaggatactgaagccccagaagtgctcctgtgttagctcctcctgtgcgcaccggcccgctggtgatgcgcttggaagagataagccgtggggctgagcgaagggcgttcgcggaaacacggatgtgcttgtctcttgctgggtgttgttggttatccgtgcagcaagaggtgaagccacctctgcctatgacaagccttttccccagtgtccccctgacccctgggagcaagacccaggcatgtggtcatgcggctccatgagactagagcccacgggttcatgttccactcaggtggggctgagacttaggaagggcacagctcagaatacagactatttggcgtttggacactgacattggttctgtagagtgcattagctaaaataccagcagtctgttatgaaactgaagacattttaaaaatcataaacctccttcttcctggcctcatctcaatgttaatctgcatttaaccagtttcaatgttaaccatccatttcctgcaaccacaatatcccagtctctgtagcacactggagtttctgcacggtcccttggggtcctcatggactctcccagttcctgggtctctagtctctgaatcacaactgcctgcatgtaggcactggccctcagctgagcactgagcaggggcctgtaataaacgagcagctcaggggttgttcaggtgagcagggtttttttaattgttattgaaatgtagttgatttacaaggctgtgttagtttcagatgtacagcaatcagatgagtttgtgatgtctttgacacactccaaaagagaggccaaatggatgggccagctcaaaaccttaccaaggtcattgagagaacaaagtcaatagaggggaaaaaactgtgaaaccaagaaccaaacatattcattactttgaaagaactttcccaccctgaatacacatcagatggacacaatgtgtgcgctcaaggtcggtcaccagccgcaaggtcgatttactgagagacgattcacaaaatataccaattaggaaacaatcaaacaaaaacgcattccatttcatatttacagagtgaacagaagtgtgtgttagctgggttgctgttcggtttttctccccaagtgggagcaccccctgtaaaggatactggggcagggcctgggcgaagggtccagcaccctcttccaacgtggtgggagggaccagcactttgacttctgtcaaagtgagtgacctgtgagctggcccaggccctgacccaatgcccagtgcccggtagaccatccccacaacatgaaagcctctgacccctcggccaggcctgacctcctgccgtttgtgggggacacttgcggccctgtggggaagacagatgccagccggtgttgaagggcacaggctggagcatcttggtctgtgttcgctgtgagcctcctaacaagatgtcccgcatagaacccatttgttccagggaccaccaggcctgctggtagacctctcggacagctcccctccaaactgaccaggaggatgtccctggaaggctagctcctgagggaaagaggccgtgtggagcttccaaacagctttccttgcagactgttttgggaatttaaggaggaaggggggccgtatagcctctgctttagccccaagcagatataatgtctccctgaagttggcttatgcgaccagcgactggagagtgtatttactgtgtggagtgtgatgttattctcggcttcccctcagaacacagggctgcactccagaggaccccaaaccccaaaatgcacagaaaccattaggcagctcatcaagccttcactcccctccaagaccccaggccttggcatgacctcgcctgcttcttcacagaagcctcgaggctgccaggcatcgcctcccccatccctgcacttgccgtattcacagccaccctgtcttgcctctccgggtcctcgcctccgagtacctcgcctccgggtcctgtggacctttccgctgctcccagctcctggagctgcctcagctactccctttctgtcctctggcttccgcttggaatgtcagtagggtctagcaccacattgaaacaaagcaaaagcaagaacaaacaaacaaaaacacagaaagcctttcctttggccccagcgccctgccacgtgctggcacatcttgctccctgaacttaaatgatccaagcgctgcacgtccttccatctgcctcctgttccactggtctgtctttgcagctgcgcctcggggcccagtcgaaaccccttctcagcccctagttttccctgaccttggactctgccctcctcaccgatcccgtgtctgtaactgacgtgttccttttcccacaccttcctggcttttctctgtggttactttgaaggcccctcttccttcttctggtgcattaaaggaataagttgcctaagacatgtcttctcaaagtccatgacagcatctgggccccttcagatctttaatctttcacatacccataggacacagaattcctacactgtttaaactgcttcagaccaggaaaaaaaaaaaatgttcattaggctcactctgatatcctatattagcaaagataaaggaggaaaaatacagctcagttaaatcaccattttaggatgcctaaggctgtaatggaagccactagccgcatgtgtctatttaacttaattgaatacaatttaaaaatcagttcttctgtctcattagtcatatgtcaagttttcagtagccacacacatggatggtggctgccacactggaccaacaaatatggaacatttccatcatcactgaaattgtattggacatcacaggctaaggagacaaaacttatgcttatctcagtactgtggaagaatgtttgatagcacactatttttgatgattttttttaagtaataaaattgaaattaaaggatacttttttaacatgatgaaaaaaatgcttcaaacaatagccatcatgatatattaatgttagaaacaagaatttcttttgttgccacttatcatgaccaattcagcatgttctattagtgctgctgctgctgctgttgctgctaagtcgcttcagtcatatccgactctgtgcgaccccatagacggcagcccaccaggctcccctgtccctgggattctccaggcaagaacactggagtggggtgccattgccttctccatctattagtgctagccagtgcaattagagaaagtaacaaaataagcagtataccagtggacagggaaatccaaaactattacctgcagaagattaaaaactaagatagttacctacaaaaaaaaattttttaagggagaatttagtagtctagctatataagatacaagaatataaaagaaaattgccagggtccagcccccgcgggatccaggggaacccgaaggagaaacggtgctggcaaatgaatgaatgaatgagagaggaatagaggagagaaagaggctgatattccttggttaacacagaaagccaataaagccccgagacaaggagcttgccctgttcacggaggccacaggtgccctcccagtctcccaagggaatgaagacacagaacatcttcccgttcaggtcttagaaacccgggcagataagtgaacgcagggagcctttatgctctaagggatcagcctgaaaaagagagtaagagaaagaaaaaaaagacacgggatgaccaagctttttcgagcaaggccccttactttattttcaaaagggacttttatacctcaacttgtacatagagggaaatgaaagatgcaaggttatacagagtcagcccaaacattccagcagttttgcccttatcgaaaccaggattttttctgcaaacctttcccacaaatgatgttgtgtacattatcttctggccttgaaggcctgtgaacattttatgaccctcttttgataaaggctgctcaaccagaaaacttattttccctcaaagtgttttttctttatatttctaatctatgtcagcctcagaaaatgctaaacagagttacatttctcacagagcaaaggtgcagtgagttacaagaaagaaccaattagctcaaaggtctggtgtggttaaattcaaggctacatttgtttttcttacattccaactatgctaactaatacactcccaggtacacagtggataagagatatgggaacttagcaacaagcactggcccaagaatgaaatcctacaccagcactactctagtaacttttaactctttgaaaggctctgtgttttaggcttcccgggcctctcacagttgggaggctgtgaacaattatatgtgtagctgcaagagtctggatagacctgccaagcaagctagaatgccaacagaggggggtttgaattgaaatattcctctcatgtccaggagacttattagttagagccctaagttgattttctccagagaaaggtggtcggggatagccccctattaatgtcaggagagttggtgaaaggctcaaaatagtaagacagattctggtttgggggtagatgctcgagctggtctagggagcccctcgagtcctgaagccttgcttaacagttctcttccacatgaccttgtcatggatgggatggcccgtgctggctcccggcagaaaaccagtgtcccctttgtagacatcagaggtaaccaattagaatgtacatagaaaaatcctatttataaaaaagaaaaaatgaagtacctaaggaggaaggggaaggtgagttgaattgggagattagctttgatataaacacactcccatgtataaaatcgacagctagtgagatcctgctgaatagcacaggtagctgagttcgatgttctatgataacatacatgggggagtgcgtggggcgtctaagagggaggcgctctgtgtatacatacggctgactcacttcattgcacagcagagaccaacagaacacaaagaactataaagaaattatactccaataaaaaaagaaacatgtcatagccatataaagaatagtgtaaggcatcactaaacaacataccaaaactgtacatggtgacaaatggcatcgcatcctctgtatgggaagaatgctgcaatgacgttggctcttgaggaattagtgtcaaattcctaaggcatttgggagaatatgaaaaaaaaaaacattataggaaatgaagacgtaagacacagcaatttaaataagactaataatcagcagggccgcattccaggagataacaaaaagtatttaatgctgcattaattagcataacatgggcctttcacagatggaagtaatcagtgaaccaacgtgaaagttctaaaatgcgaccaagcgtgggtaacactttccagtacagtggcagcatttcatatcagtgagaaagggaaggattaattaaagctgagtgtcgggacagttgaccatgagtgcaagactgggggagggagtgtgacttaagttcaatttctaattgatatattaaaaatgtaaagcatgaaactatggaagttactggaagaaaatatagataaacatgtacctaatcttgaggtggaaaaccctacatgtgacaagacaggtaaaaatcacagcacaacatatcgataagtattgactaaatatgtacctctgaatttaaaaagacaatgtttaatttttttttaattagaagaaagttataacagaaatggcaatgagttatatctttgacctataaagaaagtcttaaaattggaatgataaagaagtttccaaattagaaaaacacagaaacccccaggtttaaaaaggaaaggggtaaatgagaatgcatgggtgactcatgtcgctgggtgaggacccgaattttcctacatggaacactcttttcaagggcacagcccacaagtcaaatattaggctgtgaaccatccccagaaaggcaaacaggtggtgatgtggatttgtaatctttgcaaacaaacccaaatgcctgagattatccatgaaagatctcctggtgtgaggcatggcttgcaaaccatgacttgctttaaaaataaataaataacgaggaatttgaagtcgccctttgctgggccacttagcaccactgacagacaactccagggctgaaaacacagaagctaaaccaggaagtcagctgccagcaaagcctggagattaactttggtctgagatcacttgcgagatttcggtgaggctccctcccagcagtctgtcgttcacacatcactatataattcctctttatccttttttccatcatttgctcactctgctcagaagagttcaaagaactttgctgctgttcagtcactaagtcgtgtctgactctttgcaagctcatggactgcagcactccaggctcctctgtcccccacatgtcctagagttgctcaaactcatgtgcattgagtcagtgatgccatccaaccatctcatcatctgctgccccttctcctcctgccttcaatctttctcagcatcatggtcctttccaatgagtcagctctttgcactgggtgaccaaaatgttggagcttcagcttcagcatgagtccctcaatggatattcagggtaggtttcctttaggattaactggtttaatctccttgctgtccaagggcctcttaagagtcttctccagcacctcagtttgaaagcatcaactcttccgggctcaaccttatttatggtccaactctcacatccatacaagactgctggaaaaaccactgaacctcagcaagtttccatttccctcattataattcctgacacttatttgtatagtcaggaccttggatcatgtactttcttttgatccttactgcttgaagtttgtcctctttcagcaattctccctgacacttatgtttcatttggttgacgtacttttaatactattgtccctcagttctgtgtcccattggttctttcgcactctttcttaagggtcatactagagatttgattttctcaggaaggacagggggtaggaagttcatacttgaaatctctcagttgggagtaagatctctgcttacacactttcccctctgaaacctggaagaataacaaacccccaaacgtgcccatttcctaatcccccaatctatgagtatgttgggctatgtggcaaaggggaataaaaatttcaggtgcaataaaacctgctagtcaggggcctggatgtggggggacaatcgggttaaccgagtaggtcagtgtgatcacaaggagcctgataaataaaaggaagggggagacaggacagtgtataagtgtcatttattgtgagaaggactcaacctaccactgctgactctgaagatggaagaagagccgtgagccagagaatgcaggtgccttctagaagctggagaaaacaagggaccagaccttcccccagagcctccagggaggctcacactcctgccaacaccttgattttaggtgccatctagaactttcatagctagagaggagaagtcaatgcctggcttcaaagtgccaaaggtcaagctgaccctcttttaggggctaatgcagctgatgcctttaagttgaagccagtgctcatttaccgttgtgaaaatcccaaggccctgaacaactgccagatccactgtgcctgtgttctataaacggagcagcagagcctggatggacagcgcatctgtttacagtatggttcactggatattttaagctcactgatgagacccactgctcagaaaaagattcctttcaaaatattactagtcactgacaatgggaaacatcccccaagagctcttatggagatgaacagtgatattaatagagttttcatactttataacacacatccaccctgcagcccatggttcaaggaggaatgttgactttcaacattcttagtctttaagaaatcttttttcaggaggctgtagctgctgtagatagtgattcctcagatagatctggggaaaacaaatggaaaaccttttggaagagacttgtcattctaaatgctttgaagaacacctgtgattcatgggaagaggtcaaagtatcaacattagcaggtgaaagaagttgattccagccctcacaggtggctttaaggagttcaagacttcaatgcaggaaatcacggcagatgtgatggaagtatcaagaaaactagaatgagaggtgaagcctaagatgtgagggaattgatgcaatctcatggtccaacttaaacagatgaaaagttgcttcttacgaatgagccaagaaagtggtttcttgagataggtctatcctggtgaagatggtgtgaaggttgttaaaatgattttttaaaaaagcatttagaatattcacaaacttggttggcaaagcaaaaacagaatttgagagaattaactccagttttgaaagaagttctactgtgggtaaattgctgtcaaatagcattgcgtgctacaaaaaaatctgtccgtgaaaggaagagtcaatccacagagcagacttcattgtcttattttaagaagctgccaccccggccttcagcaactacttccctgatcagtcagcaaacatcaacacagagctgtccccccaccgtcagacagaacatgactcagaagatggttaacgatttataacgcttaagtgctttaaagtgtgtgcatcgttttttcagccataatgctgttgcatacctactagacctcagtatagtgtaaacttaacttttatttacactgggaaaccaagaaattcctgtgactcactttattgcaatactcactttattgtggtggtctggtccaaacccacagtaactccgaggtgtgcctgaattaccgccagatgtttgcccttctctgccctatcttctctccgcactcctgtctcttcagccctgtcctctgcattcaggagagtaaacgtgtggctcaaaataagtggttctcaagcattttgccctgagggacctgttagattcttaaatttctgaaaactccaaagaggttttgcttccctgggttatatctgtctatacttacccatcaaaaattgaaactgggcatttaaaaagtagttgttcatttatttaaatgaacagtagcccccttataacttaataaaaattttatgaaaaataaattttcccaaaacaaaaacataaatgaggacaatggcattgttctgtgttttttgaaaaccccttccatgtctggcttgattggagatgactgaattctgatatttcctctgcactcagggtgttgtaatgtgttgttgaagaaaattggacttcatacagatgtagtagggaaaagaaggaggagcctttccagatgattatgggtgttgtgttctgacaatacatgaaaactctgtgactggtagtttcttgaagctgtaatgtggaatctgaaaccatgtcaatgaactttcccttccccgtgacattaaaatccgctggtctatgtcgcacgtggaatggttcttctatccgcatgtgctttggtgacacctgtgcagacttccccgatgtcagtacatttcattatacataatcaaagcaatcacattcatcatcattactgctgatctcatcagaaacctctctgtgacagaaaactctgaagctcagggcagcagagacatagaagttttccaaaagccttctctgagcttgaaagcctggattttgtcaccagcaactaataccatcacttgacatactctttaattaattaattagataattttgggctgtgctgggtctttgttgctgcatgcaggctttttccagttgcagtgagcatcggttattcttcactgctgtgtgagagcttctcattacgatggcttctctcgttgtggaactctagggccagtccatcctaaaggaaatcatccctgaatattcattagaaggactgatgttgaagctgaagctccaacaatactttggccacgtgatgtgaagacccgactcattggaaaagactctgatgttgggacacatggagggcatgaggagaagggggtgacagaggatgagatggttggatggcatcaccgacttaatggacatgagtttgagcgagctctggaaaatggtgaaggacagggaagcctgacatgctgcagcccgtggggttgcagagagtccgacacgactgagcgactgaacagggcaggcggcttcagcagctgcagctcacagctcagtagttgtcgcacgtgggcttagtggcctggtggcatgtggggtcttcacggacccgggaagaacccgtgtcccctgcattggcaggcaaggcggattcttaaccactggaccagcaaggaagtcccacttgacatgctttcaatcagagacacttcataagccatgctttcctttcctttctgagagcagaggtacagtctgttcctctggctggatctgttccgagagcccagagctttcacccaccactacttttgcactgccagtgcaggggcccaagagcaggaaagacaaactttagtgttattatgaaaagacttttgacattgtggcccctgtcgaggggtctagggtacccctggcggcccctggaccacactttgagaaccgctattctgaatcactgggcttgacgttctgcccattcccctcctcatcaccagcttcggttcctttccatcttcactttagcccagtcttctccatcccagcggatgtggtctgtggtctgtggtctttctggaccaccatctcagcctggcttctccttacctcctgctcctccccttatgcccactcagcacagcacacaggtggcttcaagccttcctctgtttctggtggtacatctcatccaggcatctgtgttcctaaaggtgaccttgacctgcagcttcatgtcgggcctttgcctactgaagcgtgtgtagtgcagggacatctggtcaaccccatgtttgctgtcggcaggctgtggatgtctctggcccctcagattctccaggttggtggatatgctctgtggctggccagcatctggtgctggaccaacatagggtccccgtcttcctgccctcctgttctccagctgtgaagaagagaagttatgttttaaagagtctaaagcagagtatctttatctgttccccccaaattcaacacctgaaatacatccacctcctctggactctgtgagctcttatttaagaggacctcatgccctgcacttttgcatcctgagatgcccctgcctccctatatcctcatctcttttcccaggaggtctgactctacctgggatggagaatgaggacacttatggagagaagctggacaaggccctgcccagccacggggtggcctctaggttctctggctgaggtagagacagcaagagtggagctgaagactaggcccttccccggccaggtgctccgcggggccaggtgggaagcctgaggcagacgctttctttgccttgtcaaggcagttttatctagactggcagtgaataatcgtttcaggttcctgctacctctagactgtgtttcttggcttgggggccaagagtcttattttgcatctgtcttcatgcctactttagtgcacagccaggagagggaagtcagcgcagcgcagccaaagcctagcttgatcaggaggttccccgagctccgtagaatcactgccttgtcttagacccccaccctgctctggggcgtccccatcagaagccacagtttctgcggagttctctggagacaatggcatctagtgtctggctagtttctgtcgctaagaatggattaatttgatctcatctaaaactaaaaatattacatttggcagacattctctgcagccagaacaagagcagtgtgttcattgttgggggcacattttccagtcagtttcacttggcaagttcaccaggaagctgcgattgaacacttgctggtgtgaagaactagttttcccgggactcttcagtcttattctggaaaaccaacttggggagtcagctcaacctgctccaggaggaaatactgtctgactttgcccttaggactctctgtgtagcctttttagggaggttattcggacaactcagacagtaaagaatctgcctacagtgcaggagacctgggttcgatctctgggttgggaagacccccggagaagggaatggcaactcactccagtatcctcacccagagaatcccagggacagaggagcctggcgggctacagtccatgggtcgcaaagagtcagacacgaccgagggactgagcacatccaggcagcagtgggaccactgtgattctgaaccttaatggctcccttcacctggtctgggttgagcttctcaactctcacaatgagatcccgacctgacctccacttacctagtattgtccccagctcagcaccatttgctcaggccagggaggcagagcgggtgtggccggccgggccctggagaaggcagcatcaccccgacatccggatgaggcttctcgccctctcctgctgctgttccgaccagaccagggcctcctggatttcctgtcttctctaacctcctcctctgtttattcatttggctgtgctgggtctcagtggtagcatgggggatcttcatttgcagcactcggaatctttagttagagcatgtaaactcttagttgcagcctatgggatctaatttttcttaaacaatggaaccgggcaacagatttactctagatgaccgtgtggcctgacaagggtgcacccctccagggtccccccagccccatgtctgctagtttcttggagccaccaaccccacctggtctgagggagcttggaccctgggtcctagtggccatgggtccatgcttgtccagctgcacagggtgcctgggcagagcctgcaggctgtgggctttgcatcagaaaatctctgggctcagggtcagagctggggaatgaacctgggctccaggacctctgtccatcctcctcccgttacactgagtcacgtgagattgtgcgggctgtggtgggtgtccccctccagtgaggctgaatctgtatcgtttgccccctttggcaatgaaagaaagtcatgggcatactgcctgggaaaatgtaacctcatagagagtcacagaagtgctgaaatgcaatttcacatctatgaatgtagcaggtttcgattccagcctacctggatggcacgtgtttgaacccagcctgctggtcttccctggagtgggatggggtggtgctgtggacataaggcctgtctatagcaccattacctgactttggggtcactgttgtctgaatctctgaatttgatagctctgtgtgtgcgtgtgtgcacatttaaagcttgttgcaaaaacaaggggtccaatattttcttgtttccaataaagggggttgaagggcaagattaagaaggaaaactccaagagggagctgctttcagacacggcccacctgaataacacccactgcgcccactgcctgcagccctaccggctccttgagacccccaagaggcaatgcctggactgccacctcttcacttgcagaggctgtggccacccccacccagaggaggaaggctggctctgtgatccctgccacctggccaggtgagtgggatctcgagggcggagggtcctgcagatggggggcttggcctgtcccttccagggactcgtgtgtctgtgtgttgtgtgtgtgtgtgtgtgtgtgtgtgtgtgtgtgcacgcgcgcatgcgtgcaccccccagggcaaggcgtgagcctgagctccgtgtccccgcctgcagggtcgtgaagatgggctcactggagtggtactatgggcacgtaagagcccgcttcaagcgcttcgggagtgcccaggtggtccggtccctctgtgggcggctgcagagagcaggtaaggagtgggcctcctccccaggtgtccgatttggcacctagactctgtattttcagtaaacatttcccgttgagtctgatgataatcaagacttgaagagatgggttataactcaatcagtggctttcctattttggatccaagtatttattccatgaagaacttgaaatccagactggtcttacactcagcgtgtgttcacctgtgtggtccaccttgaggccatttgggtagacgaatatttcagggaaggctctgaggttgcctgaacttgggagttcctcctgaacttgaatggggagaactgagagttattttcaggaagcactagcctgtcagcctgtcccctgagccccaggctctgccattacacctggccaggcatccaggctacgagagctattaggccactgtctgggggctcagcatcttgactgtctctcctgggggaccaaggccagtgccctcgggtctggagcccctgtaggtccagagaaggtgccatgctcctgagattgagggtgtcctcactgtgccccagcctggccatctgccctgggccttctggggaggggccaccttgtgtcttgtgccccttcaagccccaattaatgggaggatgcagaagctgggcgtggccacccccagggcatttgcacacgcactgggcctggcacgggtttcagaggggtctcagcacacccttgtgtgtttttaatggacttgttcatagttttttggcttcccagggtcttagttgtggcacttggggtcttaggcctttgcagcacacggggtcttcagtggcaccatctgaacccttagttgcagcatgagggatctagttccctgaccagagatcgaacccaggcccctgcattgggaacttggagtcagccgactggaccgccagggcagtcccttaggacactgttgaatttagcacagaccacccagaggcaccctcacctgtaaaggctcttagcacctggaggaacagaccaccgccaggctgagggaccttccctgggtgggggctgtgggcgcatgtgttaaaccaaaaccaagacacttttaagagtaaagaggtcctcctgagaaccgcgctgagacagccagcctcactaggggtgccccggggacacggggaggcactgtcaccctattcttgggggggttccccacctcctccctgggctgcttctctgtgacccatatctctatctcggccggagcttatcagtaaatccccgtgctggctcgggcagccagcagccagccagccgaggggtcttcctgcagcaggagtgtggtccagcccccctgcgcagggctcaggcgtgggaaccacaggcaaggtggaaaaagccattctgcggagcatctgagaatctcaagtcccggctcgcggtgggaaaccacacccacatcacaaccctgaggacctgggccttgccccggtgtggggggcgcttgtttctagagacccgagtgggttcaggaatccgccttaggtaaaaagccaggaggattctgacggcccagccagggcccggagctgcgggatccggtaccaccagcaacctcccgtttccgaactgtcaccgctgagggccaggaggtggcgctgcgaggcaaccaaagacccggttccgtcggggggtagggttggggggctgccttctccctgctgacccctatcagtgcagcagacaagggcgcgggaagcgagcgcgaaatgaggaagtcgtgcctttgaaaaaagtattcaaacttacagagaagaaaggatcaaagtgaatgttttgaaacctggcccaggcagggtagcagggcggggggcggggggcggcaccggggtcttccctgcgtgggaggcttcagagggttgggcgcgctccccacgcccccctcttccgcccctgaaacaggatgggaaggcagtgtccgggggcaggaaaggaagcccgacaccggcaggtggctcccggagaatgcctgtccgctcagcgccttttcctccatcataggtttacctgatggagtgcggagcgcaccccatgtccacagtaagtccttcctgctcacagaggtaccaaggtgccctcgacccctgagcaggtgccggggtccagccccggtggatccagggcgattcgaaggtggggacggagtcggcgtccttggaaaatacatatttaattacagatatatagagagagtagaaacggatagtgtagtaggaagattagtggagaaaaagaggctgaataacttggattgcgtggaatagcatccatgctccagacgggaattcagccagaaaaacggggagcaagagagaacgacatggggggtatcagtctttccggaaactgatccgatttctttatttttgggtttgcttatataccttttgttacatatagggatgaatacagagtcacgcgggggtcagcagtcctgacctttatcaaaatcaggtgcttcacatagaaaggtcttagggattttatgatcctttctttctgataaccaaaaaacttatttcttccaagggtgtttttttcttaaaccaggcaccatcctccaaataaagttgcattcctatagggtgagggtgtagtgagttacaatcaagaaaggaatttatttaacccaaggttaacatgattaatcttaaaggttaatacttatttctcctatatgtttaaaggttaatacttatttctcctatatgctagttatattcattataagggcagggaacatggagatttagcagcaaacatcagcccaacaaatgaaaatcctttcaccaatgttccccttaagatctatttagtcttaagatagtgataaagttacatttttacatagcaaggacacagtgatttataacaatgtacagtgatctattacaaaagagaaattcattaactcaaaaagtctagtattgctaaccttaaaaactactattttccttttctatattccaaatacattgattaatatattcccaggtgcctaaggatatggaggcctggcggcaatcattgactcaacaagaagaaaaagccctatgctaattaagactctcaaaatattcaaaaactctccgtgctgtttatggttgagaggtagtaaacaatcgtgtgcgtagtggcaggagtatggataatcctgtcacacaagctagtctgtcagcagagaggtttgacctgaaacacccttgtcccacccaggggagggaattagcagcaattattggcacaacaaatgaaaaacccttcaccaatataattcctaaccaacccactatactaataatttccaactccccaaaagaatttgcctttagtaagtctaaaacatctcgtgcctctcaggttgggaggctgtaaacaatcacatgtggccagacgaacctatacaggcgggctagataaccttcagaagagtccgtaagctgaaacactcttgtcacgcccaggaatttttattgacttggagctacaagttaactccttctctgagagaaatggttatggggaagaacataaaacagactctggttttggggtagatgctcgggaacagggggtttcctgaggcttgatcacgcctttgcgtatgccaagcctccttcctcatgacttttgccacgggcggagttcctcacgctggccccgggtaaggaggggggatgatccccgaggctgccagactgaaccccagaattcacggggtcatcctggtagtgtcaagagaagaacccaggccaggccagggcgaacaggagaaaagaggaaaaaatgagggggaggagggggcaggcctggggacaccggggtcagaaggagagagccggggaggggtgctaggggctgggcctcgccccccaagcccgggccgctgctgagaaggaggtgaatggactgcaggtgaagaggtttgctgggctgagcatgacagctccagggctccttcgcccaccacaccacagtgtcttcagatccctaggaggtggtcagtgaaggcgactgttggtgaaagtgatgcgggctgttggtttcctgctgtgattcagaccagctgtaagcgatgctctgatagggctctggaggccagcaaagggcctggtcaggtagcttcacagcaggtagaggtggggggatgggcggatgggtgggtgggtggatggatggtttgtccccgtctctctccctggtggagtcacgcaggcatccactgcaggtgggcctgagcagatgcccggagacccaagtggagaggaagagccgtctgaagaggatggagaagggggcacagcggcccaggcccagcccctcggcagccaagtaggtcttcccccggccccgcccccttcccccctgaagctggagcctctgttctgatttcccaagaaacctcaggctctgcgtgcctccagtagttaacctggcaggagcccggagacccgcccacctctgccgtgttccgcagtctctgagatggctgggtaccaaatccaggtgtcctctcagctctcagtatcggtatcccggtgggaacccagagcacgcagcagagggcagggcctgcctggacctccagcctggcccatccacccaggagtcctgtcgctcacgggtcctgagggcaccggtgtccccgagtcagcctttgtaactttcagggaagcagccccctcccgctctcctctgtgaactttcttgcttttgtttatagccaaccatgagtcttgtttttattggtttatgcctgttttcacctattttttaagactgttctttattttatttattagctatttttggccctgctggggctttgtggctgcatgttggccttctctagttgcagcgagctgggctttctctctagttgcagtgctttctctctagttgtagtgctttctctctagctgcagcgagtggggctttctctctagctgcagtgctttctctctagctgcagcaagcggggctttctctagctgcagtagcggggctttctctctagttgcagcaagcggggctttctctctagttgcagtgctttctctctggttgcagtgctttctctctggttgcagtgctttctctctagctgcagggctttctggcttcagggctttctctctagctgcagtgctttctctctagttgcagggcttttctctctggttgctcatctttctcaccggaagggcctctgctgttgcaagggcttcctggtggctgaaagggtaaagcgtctgtctacaatgcggaagagctgggttcgatccctgggttgggaagatcccctggagaaggaaatggcaacccactccagtcttcttgcctgaaaaatcccacagacagaggagcatggtgggctacagtccacagagttgcaaagagtcagacacgactgagtgacttcactcactgctgttgcaaagctcgtgctctggggtatgtgggcttcaggaccttcagcacgtgggttcagtagctgtggctcccgggctctagaacgcaggctcagtgattccggtgcttgggtttagttgctccttggcatgtgggatcttcccaccagggatcaaacccgtgtctcctgcattgacaggtggattctgccactgaccaccagggaagccctgttttcccttagtttttaacttatttttggtgataaaggcaggaaagagagcctctggggatctgggcgggacaacagaagaggataggggaggggctgctccctggggagcacaggcatcttcttataaaaataaaactgtacttgtgctatttatttactgggctcctgaaacactctctagtgtctgaaatattccctgcaaatacatttgaagggtggaaaccattatgaaggaaggatttggaactcagctctgctctagcatctagaggtgaaggagctcttgggggcccccttccctacctcctccccgtgctgggcgcccctccttcaccaaggggggagaggtgggagggcccccttagcctgagaaaccccgcctgtccccgaggctgcggcctgggtctgtgacctcagcgcctctgagcagccaggtgcctgtcagaggcccagcggggatttgcccctgctcttccaagaggggctgagggtgcagatcctgtgatgggggtgggctctgggcggccctcggagcctcctcggggtctgctcgggttcgtgtctagcacagaaggcagatgggcctgtggaagcgccctctcccccgatcccctgctgcccagggtcgggaagtctgccccccccaatcaggctgaccctccctcccctctccctggaatcccttcctgctcagaaaaagcgcctcctccccatccacggctgggactttgaggccgactccgacgactccgatccatcctgtggtcacccgccaagcctgtcctcggtctcaggggccacggacggcctgcaggtcagtggactctcttttcgcccctgagttgacctgggggacaggttttcgggccccaggaaaggacagcattctgggggacagtctgatggccctgcgggcatagcagcggaggggggaggcaactggattcggggtacagaagcctcacaccctcctgtcctgagagcctgggtgtgctgctttgagaagaggggtgcagagccgatgagtcgggcgcctgggttgtctaatgaaggcagactccccgtgacgcaggagcgcagggtagaggagtcagtcagtccccaagtcccacaaccctggtctgatccgcagggctcctgtaccttattgcccaagctaggacggtcttgtggtggaaggggctgttggtaatcgcaccaggacacggggcctccacagggctgctggggagagcctggctgtgtggcccctcggctccttggctctgtgcccttggtctgggcgacctgtgtgaggctcctcgcctcccacctcacgtggtaaaggggtgatctctgcctcacgggatcccttccatgagggactggagactgaggctggcgcaccccagccccagagtgacggcgccccagctgaagccctgacatctcagtgccctggcgcgggtggtgccagcccaggacggggtccacccagggtgatctacagacccctgggtgcagggcccaacagggcagagagctgggacccagcacccatcaggtctttggtccatggtcctgctctggtggcaagtccagagccctttgaatgaaagggagttgaattgctgaggtggagaggaggggtgacttgtgtttggtcggtcgaatggtacctgaaaactctcagtccttggactggaaagacccacattccgaggagatgcctgttcctagtgaaacctgccgaccgttcccgtgtgctcaggccctcacagatgacccctgcgcagaggagagcaccccccaggaggccgggatcctagaccaggctggtgccagggcccccgggtgccaccaccgtccagaagagcagagggtcggcctctcacctgctggaccagacgagctctcggagctctgcctgccgggagagtcctgccctgcaggcccaagggtcactgccactcctggtaagtgtgcttgaccatggtcttccacacgggctccgtgtagaggagggggtcactggaacctaccccccctccccatcccgatctgtgctgggacactggctgattgccaggagccccttccttcctgggattgtccagcatgcgcggacctggcagacgccattgtcaccggagctccccggggtgggatgcctccccgtaaccctcagaggtaccagctcatccccctggctggccacacagctcactgccgcctgtgacgggggacgtcgagtgggagtgggatagagacacacaggtgtccctgaaatgactagggtcaccagtcacctggaccaaccttcctgaccgcaggaccaggcagttccaaacctgggaccgaaatagggtgcaggtccgtctgggctgcctgcctgccagctgtgactcgggaggtctgcaagtgctgagaccctgggttcgctcagtttgatcttgttgtcagtggctttgagatgaaatcttaaatcgctctctgtctctgtgccctgtgggagcgggcgccggggtccagggggtcaggtgtccgagtgatgtagacgccgatgagaccacagacagcacgggctgcccgccaccatgtgctcccacctgacctgacctgaccgcattcggggccagctcccgaggaaatgtagttagacagtgtctgccaggaaatgggtcttctttccattctcccttttcattgtattatagggactctaatctcatgatccacccgcccattaagatgctggaggcatttggggggtggggaggggacttttatttccccacaaacaatggataagtgaatctacattgaccgagtctttggatgaagacgtagatcggcacttttcctcccgggttccctcatcacccctagcacgcggatggtgggggcagtgggaggggaggggaagacagactctgtggagctggggcaggtgcctggggggaccggcagttctgagtaccaagcccagctctgctgaccaactcaccatcctatctcatggactctaagacacatctgtcacctcgcctcttaaatcgggagcatcttacagcaagtatgggagattgatcagtagtgccgtctcaataaatgtatcagacaagccacagggtctgatctttagagtatggtgtgtgcctgatcaaaccccttaaccaccaggcctcggtgccctcattgtaaaccagggccagcacctaactcaccacagtgttggggactttaaatgggatggttgtatctgttagctattgccgagtaacaacttatcacaaacggactggcttaaagctacacacgttgacaagcccacagaggccaggtgtctggcagagcttccccaggtcctcagcacaggtctcctgggctgcaaccacagggtcggcagggccagagcctcgtccgagctcagagccccgcccccaggccgtgcagggtgtcggcagagccccgcggcgggtcagacacaagagcagcttgtggacgctgactcctgggacacgggctcctgtgtgtcctcccacgccagctcacctcttccctgccccagcatggctgtgtatggtgtgctccaggccaacttggagggtactttcttgtgaggacttgggggatgttccgccaccagagcccaggaataagcctctgaagccacaccatcagtgacccgtcagtcatcgatgacgagtcggtcatcagtgactagtctggcaggaaagccagcccccagagactaaggtggagagacccaaagtcatgtccacgcgtggaaacttgccgggacccacgtctgccacaccaggcaccacctggcttccaacacttggggcccccagtgagtgccggctggggcaggggcttctgtccccaaagttccccgtgggggaacaaggactctgctcccttcttaccttagttgagggatcttcagccccgtatcatcagtggagtagaatcatgtctccgttatctttgatctctcatttttcttcattggataaaacgcccagtggccttcagtttttcattccacataagccgaccccattcttactccaaagggacgaacatcctcaggaatgggcagctgtcctcccagtacctggccgacgtggacacctcggatgaagaaaacacctggactcagagagtggcctctcaccatcccagacagaaaggctggaccgcctctgacagccaggtaaaggggggcggaaagaatgcattctggtttcttcttcaggtctgaagtctttttaccttaacgtcagttcacctctgagagcttaacgctttcacaacttttaaactacaagatgggcaagcctacataacagagatgcggtaccttcaaaatatattttttattgacatgaaattcacatagcacacaattaaccattttaaagtgaacagtccagggtttccctggtggcgcggtagtgaggaatccacctgccagtgcaggagacatgggttcaatccctggtctgggaggattccacatgctacggagcaactaagcccgtgggccacaaatactgagcctgtgctctggagcccgggaactgcccctagagaaaggcccgtgcagcagtgaagacccagcgcagccaaataaataaataaaatttaaaaataaatgacgcatttagcagaatacacatttacaaaacattttagctaaacatttagcaaaataaacaatctccatctagcagattcacgaggtgatgcaagcacccctctgtcagttccaagccatctttgtcaccacaaaggaaagcttgcatcttcccgcctcacaaacatcggcctgctttctgtctctgtggatttgcctcttctggacatttcacataaatgcgatcgtacaatgtgtgacctttagtttctggcttctttcactgagagcagtgttcttgagattgatggcgttatagcaggtatcaatacttgatcccctataatgaaaatatctattttatactctatcaataaagtattgtgtcttcagggaattccctggatatccaggggttaggactctgaccttccactgcaggggacttgggtttgatcagtggttggggatcttaagatatatatatatttcacaagaggaagaagcaacctgttattccaaagcctttcagttcagttcagtctctcagtcgtgttcgactgtttgaaacccatggactacagcacaccaggcttccctttccatcagtagttggtctggagcttgctcaaattcatgtccatcaagtcggtgatgccgtacaaccatctcatcctctgtcatccccttctcctcctgccttcaatctttcccagcatcagggtcttttccaatgagtcagctctttgcatcaggtgaccaaaggattggagtttcagcttcagcatcagtcctttcaatgattattcaggactgatttcctttaggatggactggttggatctccttgcagtccaagggactctctcaagagtcttctccaacaccaaagttcaaaagcattggttcttcggctctcagcttgctttatagtccaactgtcacatccatacatgaccactggaaaaaccatagccttgactagaacctttgtcggcgaaataatgtttctgctttttaatatgctgtctaggttggtcatagcttttcttccaaggagcaaacgtcttttaatttcatggctgcagtcaccatctgcagtgattttggagccctaaaaaataaagtctctcactatttccattatttctccatctatttgccatgaagtgatgggaccagatgccagaccttcattttctgaatgttgagctttaagccaactttctcactctcctctttcactttcatcaagaggctctttagttcttccctttctgccatgagggtgacatcatctgcatatctgagcttattgatatttctcccagcagtcttgattccagcttgtgcttcatccagcctggcgtcacaggctaccaaatgctccccagggccttggggatgagaagtagggctgcccagcaggtagggcaaagctgagccctctgccctttgctgagccctctgcccccatcggtatccgccccccgccccagcactaacagcaggagatcttcccttcccccgtagggagggtggggcgccggcctgtcctccatccaggctggcctggaatgggcgaggggcctctccagcctcaggccctccgtgactgtgctctggaaggcggcctgtggagctcccgacttgcaggaagagcctttctttgcctggctctttggtgaatcactgtcaggtttgtgttcaaacacctgattaggccaaagcatgagtggagcagaagcgtggtgtgctccagctctgcgtgtctccctctccagagtctgtgccctcagcccagctggccctcgttcctgtaacaccgcctggaggtgtcacccgacccggggccgggcatttctcctgctcccacctccatccctgagaggtgtcgctgaccctttgtcctgagggcagcagggcatgagaggccctgaaaaggcctgcaaggaagagctgtctctctctgccatgcgacccagggtgggtctcacttcctttagggaacagctgcggagatgctgacacaaaggaagcgggctttgattcagaccaggggtcactggcttggcccctgggggtgggggaggatggtggtggagggaaaggccactccaagacagagatctcccccatacagagacctccccaggcagaggcctccccaggcagagacctccccaggcagagacctcctcaggacagagacctcctcaggacagagacctccccaggcagagacctccccaggcagagacctccccaggtagagacctctctgggcagagacctccccaggcagagacctccccaggacagaggcctccccaagcagagacctccccaggacagagacctccccaggacagagacctctccaggacagagacctccccaggacagagacctccccaggcagagacctctctaggcagagacctctctagaagagacctccccaggacagagacctctccaggacagagacctccccaggcagagacctccccaggcagagacctctctagacagagacctcctcaggacagagacctccccaggaagagacctccccagaacagagacgtccccagaacagagacctccccaggcagagacctccacaggacagagacctcctcaggacagagacatccccaggcagagacctccccaggcagagacctccccaggacaggggcctcctcaggacagagacctccccaggaagagacctccccagaacagagacctccccaggcagagacctctctaggcagagacctccacaggacagagacctcctcaggacagagacatccccaggcagagacctccccaggcagagacctccccaggacaggggcctccccaggcagagacctccccaggcagaggcctccccaggcagaggcctccccaggcagagacctccccaggacagaggcctccccaggcagagacctccctgggttacagaacacagctggcagagcagttcccagttcccagggacaatggggtgaagactagaattaaattgtctattttcagcaagtttttagtttagcaacttcagtgactttcaggaaaatacagatcccggtattagccctactgacaccagtcctccttcttgcctccttgaatttcatacttgtaccttgtctctggaattcttctccatttctttctcttgactttatttactctgactaacattttgcttgcagggtgtcctccacatctttatgaacagggagttgggcaggatgaagagcaacctcccaaggtagcagcatccccaagtgtcagtgaagacccagggccaacccttacagggtcttcatggaggagctgctgcagggccctggaggaaggtctctgcctccacccacctctcagagcagctcttctaaaccagatctcatagacatgcccgtgggagggcaagagttctcgagaataatcttttgttggagtccatctgaatggtcctcccatgacctgttgtctgtctctgagtctgtactcatggttgggactttctgggtgaggggtactcagcaaagactttgtataaacaatcattcatgctgagaggaggccgaagatggtgcaatggtaccaaggatggatgctgcaaggccctgagatggtatgccatggcatgtaccccaccccgagtggtgggtggtgaatgctggggacctgagagcttgggctccagacactgactcagtttccccacaaagggcctcaccagcagcaagtggcagtagtttgttttcctccatggctgggtctgtctggactgtatttgtaagttgtttgtttacattttgctgcaaaggagctgaaaacactaggagtttattttgagttgccacccgtgtgtcccaggagcatatgatttacctcgacatggagcttacacggggcagagggactcccacttttgcagaagagagggctaagagcttgttgggttcctgagcgcctgagaggcaagtgtgccctggggggtgggggggtgtctgcacggggccagcggctcttgatcccaggtggaaaagcaggatggtgctctgtgcctcgtgtccgtgccatccaggaggcggatggccgagtcctcgcccagagagcagcgtggagcccgaagctcacctcccggactgaggggcgtggcctccccatcgctccacgctgccctgccccccagcccctctctatcaggaggagaacttcctgattctcatcatgggtgcgcttccttctgtttcactctggaggtgacatttcactgtgcctgtgttgggctctggttggttcagctcttaccctctggccacatgttccatgccggccatgctccctgcacgaggctgtcctctgagcacccctccctgccccaccaggcattgattgttgcttctcagatgacagagagtgcaaccagagctggttccagttgccagcagccatttgaggtgatggcggggcccctcctgcccgaaaccttcatacttaagtttctcagctcatgttcttctccgggcagacttgcccactcaggggccccgctgctgtgaagatcaaactaattacctacgaaacaacgggcaagagtcttcccagcctgccagttccatttccctctttaggcggcccactgacaagatgatggcaggaaagatacatctgctgggctcagaggaaaatggaagaattgatttcctctgtcctggcctgggagctaatagactgtgactcaagattcaagagctggtgactcagggacgaggaagctgtacgctgagtcactttaggtcgttacctgggcgcctcctggcccacggtgacccggggcgctggctgttttgttacatcagcccggcacgatcgattcccaccttcctgtgtggctcatgatcggcggtgatgggtccactgcccatggcagtgacgccgaacatgtcacctctcctgctttagtcatgtcccccaggccctgctgcccactcctgctgcagcttggtacccccagagccctgtggtcagaacacaggccacccagttcccttcccagcccccgtccccagtggtgtgcttggctctcctttcaccgcctgtgatcggacatgcaggtgtcagctgtggatttcctgctgatacagtcatgcttctggcagccagatgacccccaggggccaggcaggggccaggaaggtcccggccaagtaaggagagagctgaagcccctttgttaagggaggttgaggcacccacccaggtctctcttgagatttcctgggttgtgagctcgtggtgtggtgctcagagagccagggttgggggtgggggggtgtcccctgccccatccaggccccccaccatcagctgtacctagagcctgtgcctcagtgggcccagcagaaggtgcaggaaactcagaggcatgcaggcgtgcagccttagtcagttcagttcagtcccatctgactctttgtgaccccatggactgcagcacgccaggcctctctgtccatcaccaactcccagagttgactcaaactcatgtccattgagtcggtgatgccatccaaccatctcatcctctgtcgcccccttctcctcctaccttcaatctttcccaacatcagggtcttttcaaatgagttagcttttcacatcaggtggccaaaggattggagtttcagcttcagcatcagtccttccaatgaatattcaagactgatttccttcaggatagactggttggatctccttgctatccaagggattctcaagagtcttctcaagagttgaaagcatcaactcttcagggctcagccttctttatgatccaactctcacatctgtacatgttggttcccttctattccagcccctgtttatggtgcaatcacaactgcatttataacagagactttaacaattttcaccaaataatcccaccctgaaaattcactttgagaagcacatacacagataagagcctggagcagagattgccagacacaagcactattttcctctgagtttctcagcagctgaggcagataagtagacattctgggttgtatgaatctcatccaagccaggtgacaaacttccctggttctagattcaagaagggacatgtggcgaaggtgctgctcactgtgtcatagaaaacctgcctgcgatgttcacacaagagtcacagatacgctgtggacacgtctcagctccaggcaggcatctgcgactctgactccccttgcaaagccgacaggaggcctgggcacagagcctggcaagcagagagacgccatgaatgccgctgtccttatgcaagttcaggacccacccccaagcccttgggtgatgctagacatgaatgccactgtccttatgcaagttcaggacccactcccgagccctacttcagtatagacatgaagcggacagaggaaaacccagagaacagacgtgtcgactcgctgggcctcagctgaccagttccaaacagtccaggccaagatcttggtttggcactttagcaatgatgctaactaagcccaagggaatggcttggggacccagtttggggacagagagatattcaaaatggtgcctctccaatggtctggatgctgttaggatcttcaggacaccccaccctgcctggttctggaggctggggagggcagcaccttgaccatgctcgtgtggggggtggatgagaccacagctccagccgagttccgggggacagaggacggggtgcctcctggagccctgcctctgagcacggtgattccagatgacccactgagtgagacccacccgcttgtccatttcagcatccaggtggcgacgagcccacagatgctgacgcggaagaggcggccctcaagagaaagctggaggagttgaccagccacatcagtgaccaaggggtctcatccgcagaggaggaagagggcacggatgcaggggctgagatgggcagaagcaagaccatcgaggaccaccctggggccacttgggaggtgaggtccccccgagcagtctcggcaggagacggggaggcagggccagggatcagcagtttgtgactaagccatcagcccagacacaaccgttggtgagccctgagggccccgggtgcccggctgcccgtggagtgcagagagaagcatcgtcactacgggatgtatgtcagtgagagccccgcagcctctccgcctcgtggtcacatttggggcttccctgtcctaggtgcgcacggcagcaggccaaacacccagctggggaaaggacccgctgagtcctggggaccccgagcagcccagcaggaccacggaggcagagctggcggagctggagggccaagtggccgccacaacttgcgaggtgcggcggacagagagccaggtaggcggctggccacgcgatgcccatcccgcacgggagatggagcactgttggcttcacgagaaagaataagtgaacccggagtccccaggctggactgcagcctagaacgtgcatggcctggagacacgcccttctcctcagggacggaagagtgccccagacagatggtggaggccctgaaggctggggaagggccctgaagagctcgcatagcgcagcccacactctcagctccagagcaggaatttgggggtgtctatcagaaccaccctccatccacccccagcaccccagccctggctattccccttcaggtcagcaagagacaggcagtatggaaggaagaggctgacccttcccctccctgtcctgggaggactgtcccgaaggaggcttagattttaggatggccccagggctcaaattctgcccaagggtcaccctgtgtgcttgggtccagggcttgagtttgggggcggggggagggggtcagtggtatgcaaagatcaaaggatggagcaggggcttccagagacaacaaaggagcctgggctgtactctgcctgcccctggggaccctgcagaagaggggttcagccctcagagcgcgggggacccagcccccactgcccattcattcccgcttctgttctctccagcacctgcccttccatccccaaggagaggggtgttgccaggctgggcaggctatggggagcaagccagcctgggaactctgggctcacttattccttctcgaggggcagacagtcctcaacctcccgagtgtggccggtgtcatgtagacacacagatgcagcagtgaacacctcagaccaagcccctgccttcgtggagctcacatccttagtgggaggaggcagagagcaagtccatgaccaaggagctcatctcggttcacgaggagaggagagcccgagggagcactgggacaggccacttagaagggtggtcaggaaggaataacactagaagaaggcgtggggcttcctggtggtccagtggctaagactccgctctcccagtgcagggggcctgggttcgatccctagtcaggggactagctcccacatgctgcaactaagggtcctgcatgccgcaactaggacctgatgcaaccaaataaataagcaaagatttaaaaaaaagaaggcagcgtgtgcagaggccctgcagcagtgtgaacgaggcatgttcagggatggagtgaggtgtgaggggcaggccgattccagagaaccctggggacctcaggaacgatggcgggccttaggaggcatctgaatggagctgacgggccctggttcctgttcccggaagcttcctcttcccactctccccccagtcactaccatcttccttccaaccctcaaggatgagcctccagacaatgtctagaatccctctcctcacccctgggggtgggtgacccttccgatgaccatggaagatgggtgaaaatgaggtccccaggaagtgcccctggtcgcgacacccatcttagggggagtatcacgttagcaaattcgatgaaagtggagcagctgctcttcctggtctgcgacattgagaagggatgtctatctgtcgttcctccaggtttcaaatatcaagtccaggattgcagccttgcaggcagcggggctcacggtgcggccctcaggaaagccccagaggaagtctaacctcccggtgagtggagggacttcggggccctgggggatcgtgcctggagccctgggaggggcacggggtggcctggggcaccgattgcccccaccagccgcctccctcttccctcccctgatgtcagtgacctggatgggattctttttcatctgttactgccaattctaacataaagagcactttactggggggaggcgggctggggggtgccccggacgggcttaacagagctccacttcacagcgggtgcgatcaaggggcagggtggagatccgcccacagcagagacctgggagcggcatcctcctccccgattcaagtcaggaatctccagacagaccacactgtgagggaatctggcagaagaatgacaggtgctcccacgagagccccaggggcagctgccaggacgccccagttgaacctgaacttcacatgtgcaacaagtcatttccttgtatgagtacacgcggtgcactctttgggggcgagcatatactacagcgttcacttatggttgatctgcaaatcagagccagctgggcattccgtattttaatctgctgaacccagagccccagtggtgtgtttggaggactaacaggccatcccagcctttcaggccgagtattagtacatccgttcttagtcctgctcacctgccctgcggctggaggtcagacaggctgtcatgacgcccagacgccttctttgttctccagatctttcttccccggcttgtcaggaaatctggccagagtctgaaggatccaaacgcagaccctatggatgaggccgaggtatgtgttcactgcacccaggctcgacggggtgggagagggtaaacgattggcctgacttttctagcagcaggacaagccggtgggcggtggagctgaaatattcagactttaagaagcctggcgagtctcccaggctggcttcccccagaggcacggcttggggtagggtgtctatcggtggcggtggagatggggggtgtagctgggaaaacccagcaggggaatggaagggtaggacagagggcagggctggggtaggggctggggaggaggtgggcagacccccaggcagggcaacaggctcagggtaacacagagccctggagacactgcaggtcacaggggagtcgtcctgtgcctggaccacgtgctggacgtgtgccccctgcatgctcaccggtcacagggtctggggacagccctgctctgggagccactcatccagcccgtgggagggagcacggggcctccgtgcaggcagcagcacaagggtagacgttgtggagggggcgacacccctcagcctgcccttcaggaagacacgtggggggggcagcgccagtcccagggccccacggagagtgacatctgctccacatcctgccagctcctggagatctcgcgtgaccatctagtcacttctgcttctcatgacagcggcactgggtcgctcttcccagcaaacatggtattttttccatcccttccatctgaggtttacagcacttggtgagccagggcggatgccaccccggttgcagtgatgggagactggcggtcagggaggagaccacacagaccaccgagctagagggtctcaaacaggagccctggccctgaccccagcctctcctcggggccagacctccctgacgtgtcccgggatgcccggccctggaggtgtccacggccaggcccccggtacagccccagagcagctgggctgaatcccaggtggccgggtcggcaggacttcccaggaagtcagtcggttttgctctcgcttccccctgaggaggcaaaacagagaaagacttgtcccagagtagagacttgagtgacaggaaaggcaagggaagggaaggtgtgagtcagcaaccgcgggtgctgggcttgtatcgttgtgtggttcggtcgctcagtcgtgtctgactctctgtccccatggactgcagcacaccaggcttccctgtccatcaccgtctcctggagtttacccagactcatgtccattgagtcagtgatgccatccaaccatctcattctccgtcatccccttctcctcccgccttcagtctttcccagcatcagggtcttttccaatagtcagttcttcacatcaggtggccaaagtattggagtttcagcttcagcatcagtccttccaatgaatattcaggactgatttcctttaggatggactggttggatctccttgcagtccaagggactctcaagagtcttctccaacaccacagactcttgagagtcccttcccaaaatgggcagttctccaaaaggcatacatctcttttatattctggcatttggtaatttattgataacatgcattgtagtacttttaaagttcttcatttgtcagaatttgcttgaatggtgagaaatttgcatttagcttccggtgcccctaacaatcacagcaacacagtgacacccagagacgtgtcgttcttctaggtggaggctgtgccctgtctcgtgaggaggaagctcagcaattaccccaaaagccaaggtaagtcacttggtcccctcattcctaaggcctaagagagtgtgaaaatgaccagtcagggccccaggtttgtaagtaagcctcatgcccagacccacaggacaccccactgtcccctggccacccgcagtgactgttgccgtgagctgatgcctggatccctgggatttgctcctttaagcacataaaggtgaaggatgtggtgtctgtgtcttgtgatatgatttgaacgtacatggtagggcgccagtggtaaagaatcggcctgccagtgcaggaggcacaagagacgcaggttccatccctgggttgggaagatcccctggagaaggaaatggcaagccactccagtatttcttgcctggaaagtgccatggacagaagagcctggggggctacagtccatggggtctcaaggagtcagacatcactgagctcacacatgcgtgcacggtgcccagctccagacctcacacagagcgtgggacacagtttcttgatgtcttggtggtgacaagggcagcagccgtcctgggtggtgcgttcgttctcatgctccttttaaaattttttaggaggcaaagacacttgtttgaggtaagcctgtgagtaataaacaagcccccttctgttttccccaaagacaaagatgatgactccttcagtcgaaagtccatgtaccgtggatccctgacccagagaaaccccaacggcaggaagagagctgccaaccacagctttgcggtgagttttctctgttcactggggcggctttaaaattctgtgacctgtcaggctgacacatgaagtcttcaaagtaaagaattgggataaactcacaagaaaagtaagatcaagaaaagatctaaaggaaagtggaaaacatatctaaaggtaccccggtgtcaggctgattgggggggtcgcctcgccctgggggtctgggcttgggacccaggacagcccgcgaggcagtggggactccccacccagccccgcatgccttgggatccaggacagcatgcaaggcagtggggactccctgcccagccccgcacgccttgggatctggaacagcccgcaaggcagtggggactccccgcccagccccgtgcgccttccctgcatggtaaaggtcgtgcagctgagccacctgtgcggatgctggggtcggtgctgtccccctgcttccctgggagggacctccatgcagaaggagcctggggttcctccccaagcccagggagcatcaggctggcccgggagcggctgtggccttgacgcctgcaggagcgcctctggcaggcctgctcccacaccacggtccctggtgtttccagccgcacgagatcctgggggaagcgccgggttctctgacgcgggtgctgcctgcccgggccccccactgcagtccacacacacacagacacacacacacacacagacacacacacacacacagacacacacacacacacagacacacacacacacacacacacacacggtgctgtcacagcgcgagacagccgacctcgagggaccagactcacgcccacagcccagggatgggcaggaggcctcggtggccaccatcagggtcccaacaccctggatccccgccgctgtccacatccacaccacacctgccggctgcaaccacccagcaacaattctgacttcatcccggttatgcaagtctgagccgatgccttggctgtccgagaagacgaagtgcctgctctgttatttccatggactccatctttaaacagatttctaaggatttcacaacactcactgctgatgcctggggctgggagacgggcaggcaggtggggcctacgggtccgactcagccagcctccccccagcgcagacgaggccgcctgggccgtggccagagcagggccattcactgcaggagactgataacgaaatcaccaacgggggcttgaaaatctaagtgcttccaaatgagaacacaccttcctgtgtttcaccgcttccagttgtcaaaatactttctatcttcacagcccgtttgatgagggctggtgtcatggacccaaattcatagctgaggagactgaggcagagaggggttgaatgaaaaaccggcagggggttgaccgatgccttctgacggaggtccacgggtttgtgtgtgcagctgtgtgccctcctgtgtgtgcgtgtgtgtgtgtgtacatgcccgtgtgtttttatgtgcacacactgatacagctaagtgcgtctttactcgtgtgcacacctgtgtgtctccatgtcccccgtccttgcctgagtttccgtgcctgtgtgcgcctatgtgtacagctgtgtgtctcacacccacttgtgcatacggtgtgtccatgtgcatttgtgcttcacagaaacccgtgatgacccaccagccctaagaggagaggttcgcctgaacgggacacccaccctcttcccctccacctcggtcaccgtgtcccgcctcctgcctgcgctttccactgcacacagcccagtggaagaagacgaagagatgctgaatctgtgatgcccaagggccttgcccactgagatttgcttctgacccgactgtctcaccacgagccctgatcccatccccactgaccccacggtgtctcagtcctcacaggggccacgctgcccacaggctggcccatggccgctccagggggactttcagaactggcatccgtgttgatccagataacttgggctttggcagtgtgctggggtttgtggaaacgatggggctgatcctccttctccaaatgaaagctgcttcaaataggcagctcctaaattcagtgctggaagtgattaaagatgcctgtacatggaagaggatcggttctttgtaacgtgcaggcctccttattcacaaagtgaacggggcgtcactggctcagatggtaaaggatctgcctaccagtgggttgggagggtcctctggaggaggaaatggcacaacccactccagtattcttgcctggagaattccaaggacagaggagcctggcaagccacagtccatgggggtcgcagagagtcagacacaaccgagcgactaactcctcgcttctggcttcttcaccagacaaaacttgcagtaattatagaacaagagaacaaacaaggccagactttgagaagagcctgggggggcagacagacacctgggagggaaggtttgggcgggggtgccagaagccaaggcactccctggggctcaggggtcctggcaagagcagcagagcatctcaaacaggaaaaggctcactgaccacaaggaaagaacaccactgttgcccgtgctcagccgtgtccgacttcgagaccccgtggactgcagcccggcaggctcctctgtgcatgggatttcccaggcaagaacactggggcggattgccatttcctcctgcatttgccccaccagctgccatgacatctccagcttcccaagggcccctcaggcactctgggtcctctgatgactgcccccagaaaccacggggtgggggacatcattctgctctgtcagctgggctgagctctgggctctgcgatgaggggggtagggctggagcggtgccaccgcccgctggtgaaccccggagtaaagtaagcaacagacagtctacagcaggaatgggaaagggctttatctgatccaggctgagggctacagcccgaggcatggcctctcagatccctcagaatccgcgccagagaagcaggctttcagcagtttcgtgtctcacctaaacaaaaaaacattaaacaagtcagggatacatcccttcaaggtttcaaaaacagaacgtgcacagagagtcagcacggccttggcaccggggaggggcatcttagcatcaaaggagggccagccttggggtcccaggacgggaggcatctcatctttattttgaacatggacattcttagttgggcagcttcccaggcgactcagtggtaaagaaccccctcagcccccaacaatgcaggaggcacagagtcacgggttcagtccctgaaccgggacgatcccctggaggaggaaatggcaatccgccccagtgttcttgcctgggaaatcccatgcacagaggagcctgccaggctgcagtccacagggtctcgaagtcggacatgactgagcacgggcaacagtggtgtcctttccttgtggtcagtgagccttttcctgtttgagtttaagcagctgcacaaagcaggtttgatgggccacaaacaggctgttctagtcggtatcaaattcagggtgactcgcatgtaagtggggcttccctgacggctcagttggtaaagaacccacctgaaatgcaggggatcccagttctgggttccatccctgggtcaggaagatctcctggagaagggaacggctacccactccagtattctggcctggagaattccatggactgtagagttcacggagtcggacacgactgagcgactttccctttcccctataagccaacatgacttccccaggcctcagtatgtggacctctctttcatcaacaccaaccctgcactgtagcgaagatgcttggctgaaaggggagagttcgctaccccacacactcacgcacacatacgcgctcacacagacacacaagggcatgctcccccaacggtctgccgaggaagctcctccagctgccctggtctcacggggtctgctcccccgagggcctggtgccgggcagccctccagggagagaaggagaggccccctccacttgggggctggcctcagcagtgcttccagcagcacccctcagcagagccactctgaaccccgctcaccccgcgctcccccgggatccagacggaatccatcccaggggcctcagcttgcagccggggtgtgggccgggcccccctctgcccctcacgctccccctctgcccctcacgctctatggacagcccccctcgcctgtgccccaccccccgacctccactccagacccccagggagcccacctgccccccacaaaaccttcatcaccgggaatgggcagctatgggaggaaagagaagcatgcgtgaccctctgagggccgggaactgctctagaactttcctcaaggtctgatggagtctggggaagggccgcggggcccctgcacatgtccggggggaacagccaggaggggtcccccaagaatgggctcctcaagatgatgctcggggccatgtaaatgacctttgctatgttgctgttcaggcgctcagtcgtgtctgactctttgcaaccccatggactgcagcacgccaggcctccctgtccatcaccaactcccggagtttactcagactcacgtccgtcgagttggtgatgccatccaaccatctcatcctctgttgtccccttctcctcctgccttcaatctttcccagcatcagggtcttttccagtgagtcagctcttttcatcggaggtcaaaggattgaagcttcagcttcagcatcagtccttccaatgaatatcagggttgatttcctttaggatggactggttggtctcctatcattattcagattatgaggcccaagtgaaatggagaacagtgtgtagttattttaaatggcataagtgtacagattttttgacaacttgaggatattatggttaaatggaaataatgagattcaaaaatgcataaatccgatgaacctacccagaatataggtgaaaagcctatgaaaaggaagtacatcatgtgggatcaatgattgacttctctggtgcatgggtgtccttttattcctatttttctgtacgtgctaaattctatccaagtgtatgtaaattgcttttataataaaaataagcctcttcattatttatttcataatagaaatacaggtatttgttttataatcatagcttcccaggtggtgctagtggtaaagaaccctcctgccaatgcaggggacataggagacaggggctcaatccctgggtcaagaagatgccccagagaagggtacagcaaccctccagtattcttgcctagagagtctcatggacagagaagcgtggcgggctacggtccataggatcgcaaagagtcagacacgactgaagcagcttagcatacgttatttattttataatagaaatgtacacgttcgttttataatcataatatgtgtgtgtgttcattgctcagtcgtgtctgattctttgcgaccccatggactgtaacgcaccaggctcctctgtccatgggattttccaggcaagaatatagagtggattgccattcccttcaccagataatcatcataaacttctttcaactgtaattatgacgactctggaaagggctggaataaacataatttttcagtggtagaaacaggacgaaagtggtttgtacgtaataaatgcagctgtgaaaaggcacatgggtgacggaccagccggggaagggttaggagggtgtcgttcagctgtgatggcctctttgggtaactctgcatgggaagcgggacttaaaggaagagggaggtggcgggagggtcacctctgtgtcagccgtcttgtggctcggagcacccagaccagcggtgcctggctctgcagtctacccaaagtgtgcagaaggaaagctaatgtgttttaaaaccactcagcccaaatgaaattatgtaacccaggaaaggacacatcacattggtgatgagagttaaaaaaaaattagaagaaaaaagaaaatgactcttctgatgtggcccagggagggaggctggcggagagggagggagggggtccggtcagctgcttcctcctggcgcataaaaggggtgagcgcgccccacctgggtctccgctcccgtccacggcactcaccagctgctgggaacctcggtgagtagctctcaaggcgctggagagggcgggggtccctgacgctccagcctcctcccctgccacctttccctccccatcagggcagaggtccatcctggcagccgggaccagctctggtggggaccccaccccgtttgtgcgtccaggggccactcctgcctgtcggggccccccgttcactcggctggcacggtggaaatgaaaggtggaaccgtccaggcaactctgctgggaacacagacctggagtctcaccagccaggagacagcaagcccccggctctcaggaggctggaccttgagggtcaggagacaggctccgccagggctctcctacgacgccctcacccagcaggggtcccagccaggggacagcaagcccccggctctcaggaggctggaccttgagggtcaggagacaggctccgccagggctctcctacgacgccctcacccagcaggggtcccagccaggggacagcaagcccccggctctcaggaggctggaccttgagggtcaggagacaggctccgccagggctctcctacgacgccctcacccagcaggggtcccagccaggggacagcaaccagcccagccggtctgggagcacctctttatccctctactttcatgacggcacctccatttcctctaagttggagtcccccccccccccgccgccaacaggtctctaaaaaaggaaggggtgggcgttttaaatctcagttggagagcacgctccttgggaccagggcttcccaggtggctcagatggtaaagaatccacttgcaacacgggagacacaggttcgatccctgggtagggaagatcccccagaggaggaaatggctgcctaccctagccgaaccctaacaataccctccagtattcttgcctggagaatcccagggacagagaagcctggcgggatacagtccacggcattgtaaagagtcagacacgactgagggactaacgctttcactttccgctgggctcagggacaggccggaaagccaaggtcagcagaggagtcttccctgaaacagacaagctctctggtgtcttctgctggttccttaagtgccaagggagtggggagcgggggaaggagccagccctaagaggtgcgggcacctgcggaaggagttgccaggtttgacgggtggacgctgtttcaggctcagcccagccgggtgagaggtggatttctgggtgcctctgtcacccacagctctccccaacctgtacagggctgtcctgctgcgtgagggcagatccccacgggctgctggttgatcttggagactcagcggcttgggtctggggtcacgggggctggtgagcactcctggcagggatggtggatgacgacccttctacagtgcctggctgtcagcaggcagggggcaggatggacctgggctgggggagagaaagagccctgcacccaggtcccccaccctgagtgcggtccgggctcagcaacccccagacccccgcccccgggtcatgtctgaggttgggccaccccctccacctcagcagccacccggctcctcctggcaggtccccaccaacctgctcgcctctgccatcccccccaacaccccgccaaggccaagtgtgcacacccacagtggagcagaggcctcccacactcctggctcccagacacagatggacagacagacagaccgaggcacgtccaagacagcccagctctgcacccacagctcatattccccccggattccttctgatgacagacggtccttgtaaacatggctgagcccaggagaggccaatacacacatgggtcacctcagcgaacgctcactgtgcagagcagagactggggcccccgggggagcgagggatgcgcacagaaccaggcgcacctgctgttccgggctcactgccaccccagcagagcagagaagtgcacactggagcctggctgggtgtgcacacgcgtgtgaccccaggcacacctgtgcatatccatgtccatgtacatgaatgtgtgcacacactcacatccactctgacacacagagtgtgtgaggcgttatccgaggcaccccgctttgcgcacacgcgccctcatgtgcgctcacctttgcccccaggctgcaccctcccgagcggggcctctgcaaggagccagtgggatgaaggcggtgggggcctggctcctctgcctgctgctgctgggcctggccctgcagggggctgccagcagagcccaccagcactccatggagatccgcagtgagtgtccaccccgcccccacccccaggggtcacagcggggacctggccactttctgggctggggcatccttgctaagcatcccggagctggggtttggcctcctgctccccagacccttcccccagatggccccgacagctgctctcaagggtcccgacccagcacacgggggagggtcactcctcaccacacgggtggcctagggctgagtgcacgtcacccatgagaaccgggctgtggggacaggaaaggaaagggagtgtgtcctggtgtgagtctgaaatcctatttcctgaagccaccccagcaccagaaatgggcggacgggcgagcctcctgtgcggggggggtggtcccggcacggcctgggtgacaggcagcggtaagctgagcacacagccggcccggccaccagggctgcatgcaccagggcacaggcctccacgcgctcttctcactctttccagcccccgacatcaaccctgcctggtacgcgggccgagggatccggcctgtgggccgcttcggccggcggagagctgccccggggaacggacccaggcctggcccccggcgcgtgccagcctgcttccccctggaaggcggcgccgagccctcccgagccctcccagggtggctggcggcccagctggtccaggactagcagcaggacccccgcccccccccctccccctcccccagcgaccttccctccagtcctaataaaagcagctggcctgttcacacgtgtctgcgtggcgacagagtgcacggtgctccccctcacgggatgttagcctggaaggaccctcagagcccagcagcccagaggccccaggactcgcccaagggcacccggcactgagcagggggctggggcggccttggccacccacctccagcccgtgccgccccccaagccaccctgaccagttgctcaggctgcgcactgcacgaggccgctgtgcaggggccccagggagggcatcacggcccctcggcctcacctgccccgctctctgctgcagttctttttgcctccctgttggtacttgtggaagagaaagaaacagggggtgcttgtttccagtactcttgggttcgagtatttcaaccccatcctgtgtccctttcaaattgcacgatgtccctgtgtcctgtttc

SEQ ID NO: 182 - DNA, 72424 bp, Hippotragus leucophaeus
  source 1..72424: mol_type = genomic DNA
tttaaaattcgttgtgaacgtagtactcaaaaagctcacttctataatgcatgaatccatttttgctaacttttaccctctgtggcgctgacacgctaaaaatatgccctaatctctgctttgaaggcaaggggtgggggtgggaaggaggaccttttatttcctcggggagtgaagccaataaaacgtatgaatagatccagcccaacctcgtgctctgtgtcccgggggcgggctccgccttccccgagccccatccccagctgcgccctcggattctgccatctggcggctggagtcccggcttcctccttaaagggcagcagcggagcgtctcggggacgcatgcgccccaatttgcgcccggggaattaaagagcgagaagaaaagccccaccgaaacccgcgccccaaacaaaacccaagtggaggaaagcgcgcggctccgcagctcccgcagagcaggcgcctcccgcctcgcccgcgtcgccggccgcggcgggatgcgcacggaccggcccgcgacgccccggccgccactgtccccgcacctggacgccggtcgggtggccgcgccccagccgcgctcgctcgccgccgcggctccccccgagtcgcccggcgccggcggggcacctcgctctccatggggctgagggactggctgaggaccgcgtgctgctgctgcccctgcaagtgcctggaggagcccgccgtgccggagaaggagcctctggtcaggtgggtgcgcgcgccccggccgtaatctggggctccctggctgccgccgggcaccacggactcgggggtacccgtgtgcccctctgagctggggaggtgcgcttgttttaagctcacacggaggcacagactaagccccttggttcctcgaagaagatcctgctccttgggggttgttccttgggtaaagtttttgccagaatgcacaaatccttggaggcgcctgagatccaagaagatgcgtgtgggaaacagcaagagcttcggtgtagttccctgggcagagaactaccggagagaagtttgcacaggggtcctattaaatacaactgtgattgtctgtttcacaggcatatttcagtgaaatgggcgactgtgaatttctttcacccaggaaaaaagttggataccttatcattcaatttgttaggaagagaagacatttacagtgatggagagcaaggagatatttttcacattaaaaaaagtacatatttttctcaaaggatagtggaatgttgattcatgacagattaagctattaagtgtgaggaaattaatgcacgttagcaatgtgctaagtgcctttgtgaagggaccatacaacacggctttgttcagggctgtgattgtaagcaattattttatatcttgactgctgaaatcaaggtttcatttcggcatgacttgggggtaggtagggtagaaacaaaatatttaaaatgaaattaggaattagtagatgaggcaaaattctagggttttctaggcaaaaacatggaagctagtgtttcttatgaaatatgcaactaatatgataaagctttcacaactttctgaaaacacgatttaccttttcttactctatcaagtccaaacactccccttgacttttgagatcttacataaccccttccctcctgtccactcctgttttccggtatattacacactgtgcactctttgacttaatcagacaggcatccttactgctctacaaacaatctaagcttcttattccctccaagcttgtttcaagtggtgacctttattcttcttgccccttcttaaatgctagttttcaagtctccctcaaacagtcagtcgtctttgattttttcgttcttattcatctttctctcctagctagggtttagaacttgctatctgctcctcatggtttagtgagcacatatatacgaaaacatgtatgtcctgtttgttttctgtgtataatatgcacaccatacacaatgtttttgtttgctcctgcaatggtgttcccacttcgattattagattgttgtgggcagggagaaacccagtaatctacccctagtcttaaaatagtggatagcaatctggaatttcaggcttggataataccctcaatttgtcaatattcgtagtaacatgaaataacagccttcagcttggtctcattctcagagccttgggtctttccagtactctgttgggaattgctatttaagataatagttctggttgttttaaaaaatctcaaccctctcctgccttggtttacattgtaagtcagcgaatttgcaagtaatcttaagactttagagtcagttggagcagaatagcatagtgctcgtgagccagattgcctggggttaaattctagcctgggtgacctggcacaagttatgaaactttttgtactttaatttcctcatctgtaaaatgggaatcataatagtatgtacctcagagggatgcagtgtatagatacctgcatgttctttcctgccctaatcattagaaggtctaaattgaaatcttttttagatgtgaaattcagtgctttttaatacattcacagagctgtgcagtcatcaacactcttaactctggacatttttcatcactccaaaaagaagcactatactcattggcagtcacttgctaccttcccttccctgcccactccctgccatcccccaggcccacagtcaaccactgatctactttttgtctttggagatttacttctggacattttgtataaatggaatccttcaatatgtggccttttgcatctgactttcacttagcataatgttttcaagtttcatctatgttgtaggtttatcagcacttaagtcattttatcgttggataatattccagtatatagatgttttacattttatttatcaattgatagatatttgggtgatttccactttttggcttttaaaataatgattctgtgaacattagtgtacaaatttttgtgtggacatatgtttttgattctcttgggtatatacctagaagtggaattgctaggtcacttagtaaattgtacattttaactttctgagttgctgccaggctgttttccaaagtgactggtttgaaatcttgacgtggtgaagtcatatggccagatggtcttaatttttattttattaagaacttcattcttcatgtcatttttttttcatttataaaaaaaagattttatacagacattgcctgccctcaactgaatcctttattccatcataaagcagtggttatcaagctttatttaatccccaaggcaatagtgctggaagagatatggttgaaaggaagacttttgtcatttgtgtgcgtggtcatctgcagtccttttccaaaacagaccagggaacctcattagttcagcaaaactagtttttaatctcagctcctgtgtcaacctgacattgccacttgtggtttttagaaatattcattgatttatttggctgcgttgagtctcagttgtggcacacagacttgggagttgtggcagtgcatgggttttgctgccccgcagcatgtgggattccagttccctgaccaggagcccaactggtgtctcccacaacaaggcaaatttttaaccactggaccaccaggaaagtccctgtgtttttgatcttgccttgtttgctttttctggaattttgtacttaaagggaatggctgccagttgtctggcttgcatgtatattttcccatgagttctttctttgccctttctcttgaagtatgctggggcctcccccgatgataaattcatccccatgttgctgttttctttagctggcatcctctgctttcccttgtgtcgggcacagatgtctttaaagtgcagtcaattgtacccccacctcctccttcacctcccactcatcatgagatctggttccttcccctgcatgattacatgaaaactcttcacttgaaagttacaagagaaagaaagctgctgttcttttcgtggtgtacacggagtgcccctgtgctgaccatccgggcctgatttcccatttcctcattctctggcctctgattttgcattctcttgtctctgtgcctgtgatccatctaatcctgctggtttcccttctggtgttgctgtcaatggcataattgttagctagacatctttttgtttggtctactgcagaagatgagatggttagatagcatcactgactcagtggacattaatttgagcaaactccagttttttccagtaatcatctgtggatgtgagagttggaccacaaagaaggctgaacactgaagaattgatgcttttgaactatggtgctagagaagactcttgagagtcccttgaacagcaaagatcaaaccagtcaatcctaaagattgaaatcaaccctgaatattcattggaagtcctgatgttgaaacggaagctccaatactttggccacctgatgtggagagctgactcattggaatagaccctgatgctgggaaagattgagggcaggaggagaaggggacgacagagggtgggatggttgggtggcatcatcgactcaacggacatgagtttgagcaacctctgggagatagtggacagggaagcctggcttgctgcagttaattagttaataaggtcctaaagaatcagacacgacttagccactgaacagcaatagtgaccagataaaataggtgttattcattccccattttataggtaaggaactcagggcttagagtgtttaaataattagttgacagtcacaactggtaagttggagagtcagaatttgaatccatgtctgtttgacttcagtgtttattccttgcattgcagaaaattcagaaagctaccaaacagtttccaagtttaattgatagtgtttatatcctagacactggtagatgtcactagctttagctcctgcccattgtgactcttttctccttttcgcctttcttctatgtccttccttagtttaattcttctacttgaatgcaggggcaacctgaccttgagagccaagaccagggggagttaagaaacctgagttcttgtcccaactattaattgtctgtgggactttggggaagtcttgtaacttccttgaaccttagtttcttcttctgtccagggaaggcatctgactttaaggtgcagccttgaagagctgttccaggcttgatgtagactgtcttctttctgtggctttatgtcagctgaaattctgtttgacatggaatacaggggcagcaaggttgtgtgtagtcctgggaaggagcctgaaggcctctgatgtgtgaagtgaagtgaagtcgctcagtcgtgcctgactgtttgcgaccccatggacagtagcctgcaccaagctcctctgtcagtgggattttccaggcaagagtactggaatgggttgccatttccttctccagggaatcttcctgacccagggatcgaacccaggtctcccacattgtacacagacgctttaccatctgagccaccatgatgtgtgagtcatgactatgatccagctgccaagttcggcttcatcagcaaatatgtgagtaggcatttctaacagcaggaagcttaaaacaagtctaggcttggagaaaggatccatagcctgatgtgggcttgacaccaggcctctgtgataaaaaagccaaagatttcattcagtctcactatttcctcaccttcaccccaggtttaggaatgaatcatgtaatgtccatcttgtccatcttgtccatcatctgtgtaaagtttgaagttctgaaagtcattcttctccacactgtgtttctcaaggagagttagtaatgatcacaatgacagcaaaatatccatatgcactgaggacaggacgatgatgcaaatgcatcgttttggaatggctggatcgttgtttatttgtttgtaaaacagcaaatgacgctttgacccaagatttcatgttgctaattaaaagaaacagtggggtacctgttattaggttccaggactgctgtgacaaattgccacaaacttgatagctgtatattaaggcatatatgtagaatctagaaaaatggaacagataaatctgtttgcagagtaggaatagagacgtagacatagtaaggagatgtgtggacacagtgggagaaggggagggtgacatcatttgggagattggggatgacatatatacattaccatgtgtaaagcagacagctagtgggaactgttgtatagcacagggagctcagcttgttgctctgtgatgacctagggggtgggatggggagagcatggaagggaggtccaagagggaggggttatatgtatacttatagctgatggcagatggtgactgcagccgtgaaattaaaagacgtttgctccttggaagttatgaccaacctagacagcatattaaaaagcagagatattattttgctgacaaagatctctttagtcaaagctatggtttttccagtaatcgtgtatggatatgagagttggactataaagaaagctgagcaccaaagaatcaatgctttttaactgtggtgttagagaagactcttgagagtcccttggactgcaaggagatcaaaccagtcaatcctaaaggaaatcagtcctgaatagtcattggaaggactgacgccaaagctgaaactccaatactttggccacctgattcgaagaactgactcattgggagagaccctcatgctgggaaagattgaaggcaggaggagaaccggttgacagaggatgagatggttggatggcatcactgactggatggccatgagtttgagcaagctctgggagatagtgaaggacagagaagtctggcatgctgcagtccgtggggttgtgaagagtcggatacaactgagtgactgaacaacagtatatatttgttttgcaaccaataacaggccctgcactctgttctttggtgtctttttttttttagaaaataattttggtgaggctgtatatatctaaagaacccctgtactgcctagaaaggagttaagactttgctgtattgcctctcattatttttttcttaactttaaaaatcttgtgtttgtatatcaaagactgaaaacatacaagcacttatacagtgtaaaatacaactacagggacttccctggtggtccagtggttaagactttgccttccaatggagggcaggggggtgcaggttgaatccctagttggggagctaagatcccacatgcctggtggccaaaaaacgaaaacataaaaaagaagcaatattgaaacaaattcaataatgacttaaaaaatggtccacatgaaaaaaaaagaacaactacaagatggataccgcccaaggcaagagatagctgtgggcaacccacaccgcccccacccttgattatatctagacttgtgtgatggtcatttccttgcttttcttgatagcttttccgcctatgtatgcaccttaaaaatggactttagttttgcctgcttttaaactttatatatgcaggatcaaactgtgtgtgtgcttgactttgtgagcttggtccaagctggggcatgtagtcggtggttctcactgcttgatggtgtattcccactgattcacccattcttttgttagtgggttttatggtgtattccctttggttcacccattctgttggtggacttttgggtggtttcgagtttggggctattactcacggtatagattttaaagtcagcacaaaagggcaaattgttcattcttcagccacattggcctccttctgggtcctcagatacactcttagcgccctccctgcctagcatatcctttcttcacttacccaggaaactccctccctcgattcaagtctctacttaaagttattttatcagaaagatcttccctgaccaccctctttcaaacagtacttttcactctcactctgacccttattcctgaggctgatcaccactagacatgaatatatatgcttactgtccgcttcctctggaagactctgagccccaccttcataaatttaaacagctcaaagatattaagagcttgtctgtgagtccggagagtgggattccagcctcgtttctgccattcggagccctgtgacgctgggaagtcacaagtcattcattcaacaaattgagcatccattaagtgtcaggtcctgttctaagcactccacgtacatcgttgagcaaaagagatacagatgctctcctcagggggcttttattatggttttagggaagcacaacaagcagtaagcatagtattgataaataaatcagaaggtaaacaaatacagtcatccctaggtatctgcagggagttggttccagaaagcaccgtctcctctgcacctcccccaacccagggatgtagaccctgtgaatacggaggtagagtcggggcagaagagcatgcgtgcaattttaaatagattggtcagagtaagcctcgttggagaggggatatttaaacagtgatatgacggaggggagggagcgaggcgtgtggatatggggtgggggtgggcagggagcactatcataggagaatcagcctgtgcaagggcccggagatggccgcctgactggtgggttcagggaacagcaaagagaccagagtagctggcatgtcacgtggggattatggaccacggtgtgacctgggcttatattctatgtcagatgggagcccctggagggttgtgagggaggggtgacaggaattgattgacatattgaaaagatcactttaactgtgttaagaagagcgttggtagaggtagtggttgaaaaaggtgaaagtgagagaaagcgttagtcgctcagtcgtgtccgaccgactctgcgagcccatggactgtagtcctccagacttctcttgtccatgagatttcccaagcaagaatactggcgtggctagccattcccttctccatgggatcttccagacctggaaaaaggtagatcagtgggaaaaaaatggcagggattcttttgtaagatagaggttctttgacctggggagtggtactggtagagatgggcatttgtttaatgtgtggtcaataggattttctattggattagtgttgggggtgagaaaaccaaggatgacttgaagggttttggcctgaggaaggataggtttcccatcttctaggtggggagactgttggtggggagctttggagggaaggtcaggtgcttggtgcaccatgttgaacttgagctatggaccaggcatcctcatggagaagggaagaaggcaggccgtgcaggagtctgggacttgagagcgtgtctgagctggggattcagttacaagtttgagaatcttcctcaggaagacggcatttaaagctgtgagaccaggagttagtgtaaacaaggcagagaccaagggctgagtctaatcttcccgcaccccaatgtttcctcatctgggagacagaaaaatcatgcctcccctgccttcttcacagacttcttgtcagaaccatcttcaggcctttaaagcactgaatttaaagcagtgaatgaaacccatgatgatgtgagactgtttcagccttgggatgggagagacatgaagggtgagagcatgtcagggagcaagaggggcccagaaaagcacccgcagttttcttcttacatattgagaaggtagatacctctgctgttgaaggatgtcatgagaccaggtgtttaaacactgataaaattgccagaatccttgggatgatgtttagacttggggttcagtcatgttcaaacattggattaatactgatgtttctaagcctagagtctcccttagccctgttgatattggaagaaaagaatcccgagaggtttggcctcacaccctagctggggttggggatggaagctgaaactttgctcatcttaccttctgggagaaaagagcagcctttgcttcgcttcatgtgtgacttcagagtcacctctcagatgcctgaagttcataaaatatttaccatcagcagatggcgtccaggggcgaaacggcccctctcactttcctcaaacctttagagatcatttcacaggggagggagggagggagggagagtgaagctccgattcagtgccctcttctccctgctgtctgacctcctgggctctgtcccagaccccagggcctttgcacggagttctctttacacaaatgtcccacagtgctttacaggcttgagtgcacagaggttcccaagcttctgcttaagttgttcgctttaggtttttcttcgctctggactctccaccctaaggattcaaagttttaaaacaaagcagatgctgccttgcctgggtgatggagcaggatgaaaggaatggggagcagggatcttgggaaccaggctggtctgacaggtccttctccatgagttcaagccctcattcacttttaccttgattggtgttttggtgaaattattaacttaatgatttatttagtggtgtgccccacctctctaggccttcaaagaaaccaggtttgtaacttgaatagataagaagaaggtgatgggaatgaggtccaggtgagggagggagccaagcagagtagggggctcctctgcagacaggacagccgcccagatcctgagcttgagagcattactcggatgaaagtcattgctcaccctggggcagaagcccttggttctttcccctgttttatattgtcccctggggagaggatcagtgactaggcaggcagagtctgagactcaggggttgtcaggggagcactgctcctaattagaggatgctggggaggcgctgcctgtctggagacatcctaacaggccagtgttgaccttcctacagagctgccttcaggactctaggttaaggatgggtggtactcttagatgttggctggagtcatatgtgtgtgtctgtgtgtgtgtatgtgtgcgtgcttgtggggtggggagaagagagagaagacagaaatattgattaactgattgtgagagggtaggactgactggccaaggggcttccctggtggcttggtggtaaagaatccacctgccaatacaggagatggggatttgatccctgagttgggaagattgcctggagaataaagtggcagtctgctccagtattcttgtttgggaaatcccatggacagaggagcctggcaggctgcagtccatggggctgcaaagaggcgaacatgacttagctactaaacaacaatgagcgactggccaagaaggcacctgtcataatcttctcaaaacaagccaagaaattgtggcttatgaagccaaaagtggctagattactcaaggtcagatgctgtttatcaccttcccaggttgcatagtggtaaagaatctgcctgccagagcagacacgagagactcaagtttggtccctggatcaggaagattccctggagaagggaatggcaacccactccagtattcttgtctggaaaattccatttgacagaggagccctgtgggctagagtccatggggtcacagagagtcggatacaactgagtgactgagcacacacccattcaagtggatactggctaatgtctaaacctcctgcattagggaacttgtaatgagttatgtttgggatttcctttagtactttggggtcacagctctgtaacttttaaaagtacttgtaaagcagcttctctgtgcccacccccaccaggtgatgtgggttgtgaagaaatactgagtacatcccggtgactcagatggtgaagaatctgcctgcagtgtgggagacccaggttctatctctgggtcgggaagatcccctggagccttctgccagttccttactggcaacctgctccagtattcttgcctgggaaatcccatggacagaggagcctggtgggctacagtccatagttcgcaaagagttggacacgacccagcaacaaacactttcacttttcacctctaccttagagccatggaacctatctttcaacttgttgagacaaacaaatgaaacagatttggggaaaaatgaaagactgagtttctggaatgtaactcaggtttcaggatctgagagggatgtgtactgtcctggtgaaaactgtgcccccggggtttggatgccttgagaagaagtcccaggggaatttgcttcccagggaaatcgggaaccacttcacacctggagtcagtatctgggccactatgtttgaggacccatcccatcccagcccttggatgcactctatgaactctatgactgtggctgcttagagatgccccttcagggaccttgtgctggagggtggggaccatcctgtcctgggagaagtcagacaactgtggagtctcgtccccatctgccgagtgggatagcgtcactgtcaccctgcccccctgagacctcagatggttgtacagagggagggatagagtgtggagggtctggggtaaagtgctgtgcggttttactggccgcaaaattgcttaggcataaagatgttggagttcatgctcttcacgctctgatgctgtccggtgccgcctgctctggagaattcctctttgcccagcgttcttgctccctgggctctcctgctctctgcagcctccttttccattcctctgaggcctcgctttccttcctccttgttcccagaggcttcctctggccccctggcttctgcggtgatgcagatgcatgagcgtttcccccacatctaggtctcctgccctgtcctcggtcctaagcccagatcctgagtgctctctgcgagtcctgcaggtgtgcaggtcagccgtggctcctcccgtcctctgtaaaggcatcaccctcacgcggtcagcactgactcccctcctcccacctccgtgtcacccatctggggtcaatagggcagccatggctgagtctctgatgctgcaggaacccacgcttgctgttcccacctctgtttctcaagcccgcaccctccttcacttgtgccccaaccagtatctcaaaatgtttcgaattaaacgtggacttatttagcagtagaataccacctttcctatgccccaaaggaatcttctctgtaactctcatgaattacaggtttgaaccagctgttctggttgtggttggtttgtggcatcttcctctctctgccgagcagccctgcccatctcctggcccactgctcccttacagtggccccgaggcccccgacactaggaactcaaagaccacggcaggaaagccacacccaccctcttgtgaccgttgattgtgacagcctcctaagccctgttccttctttatcgagagttgttgctctaaaactcagacctgacaaggctcagaatcgcttcgataacttatcaccgttctcagaaccaaagttgaactccttgaactccagcagaccccaaatgtccttttcttcctgtctgtccatttccctccgtgggagcctgtgtggtcagccctgcgtgaacacttgggagttcccccaccctatggacactttcagtttccataccctgtaggtgtccctctgtcaggaacaccattccctttgcttctcttctctggagaaaggctctgtgcttctcaggtctgggttagtatttactccacgtaacctttctttaacttccttctcatcacacataatgtgtctctgtctctctgttcctacaactttctgtttgcacttaaaaagaaaattcacttgcctccttgtaatatagtcacaccagcaacaggggcaatgccgtttatttgtgagttcctggagcatccagcccagtagcagtatacagttgaataaacgaatgcatgaatgaatgaatgagatagacatgcttggtaaagctcgtacaggcaccaaggcatcatttgcctccctgtttgttggctcatcattcttaaaaggagcgagtggtgggtctctctgttcagcttttgcagtgtcaggcagctaagggaaaacggcatttctgacaatcttgtggctgagctgtgtctgactccctgaaagtcgctccttctctataattctgatcactctatccagtctccgcccctgcacttctgaactggagagacttcaagagcacttttcagcatccattcaggtagctggcctcctgtagaccttggctccaagctcccatcccctctctgtcccagttttcatgagcgggctgtggttggctctcccaagcctgacccagacgtcatcactcaagtgctggagtccatccctagctgggagggttcctgtgctgaacaccagtttggagacccaaactttgcttcctgttgcaacatctccttagtgccaacttctgaatatttcatgttggtttaagccttaacattaccttcagcccagttgtccgtttctcttatccttccttcccagatgctgtctgcttatcaggcgtccactgtctgccctcctttgccattcactcctgttacacctgcagatggccaccctgtggctgtggggcattgtagctctgcctcagacgagggcatcactcaccgttcaggtgaaaagccagagcgcttctaccctctcctgctcctggattatgcagggtaatacctatcctgtctcacctgagttgcttcagttccatcttaatgaatccctcaggtccactcttcacccctctgaagcattcttcacactgtagccaggaagattttttttttttaattgtggtaaaagtcacataatataaagcatactgtgttaaccatggtcttccctgatagctcagttaaagaatccgcctgcaatgcatgagaccctggttcaactcctgggtcaggaagatccactgaagaagggataggctacccagtccagtattcttgggcttccgtcttggctcagttggtaaagaatctgcctgcagtgcgggagacctgggtttgatccctgggttggaaagatcccctggagaagagacaggctacccactccagtattcttgcctggagaattccatgggctgtacagtccatggggctgcaacgagttggacacgagcaagcgcctttcactttcatgttaactgtatctgactgtacagttcagtggctctaagtacattcacattgttgtacaactctcaccatcatccatctcccggatttttcaccttccaaaactgaaactctgtccctattaaacactaagacccccttccccttccccacctcctcccactcttggcccttctcatctaccaatgactttttttattaaaaaaaaaaatatatatatatatatatatattatttggctgggctgagtttaagttgcagcatctgagatctagttccctgcccagggatagaacctggatcccttgaattgagagccgggattcttagccagtggaccaccaagaaagtccccagtgtactttctgactctgtgcatttgagtattcgttgttgtcattgttcagtcgctgagttgtgtccgactcttttcaaccccgtcgactgcagcatgctaggcttctctgacctccactgtctcccagagtttgctcatattcatgtccactgagttggtgatgctatctaaccatctcatcctctgccatccccttttccttttgcctttagtctttcccagcatgccagtctcttccaatgagtcagctctccacataaggtggtcaaagtactggagcttcagcttcagcatccgtccttccagtgaatgttcaggattggtttcctttaggattgactggtttgatctccttgcagtccaagggactctcaagagtcttctccaacaccacagttcaaaagcatcaattcttcagtgctcagcattttttatggtccaactctcacatccatacgtgactattggaaagaccaatacactgacctttgttggcaaagtaatatctctgctttttaatatattgtctaggtttgtcatagcttttcttcgaaggagcaagtgtcttttaatttcatggctgtagttaccatccgcagtgattttggagcccaagaaaagaaaatctgtcactgtttccactttttcccctgtatttgccatggagtgatggtatcagatgccacgttcttagtttttttgtataagttagccagaaaaatcttcaaaggtgtaatattgttcatgtcacattacagtcctgcttaaagcccttctgcatcttagctagcccctaggaataagggccacatttctaaagaatgttagaaaacacggcctacagagccaagagtatctggccccagctgtctcctcagcttctctttcactcacgagccaacatcccccttctttccttaccttcaccctgcttcagtccacccctgggcctttgaacctgccatttccttttttggaactctgtttcttgtctttcagcttaaaactcatttaaatcccttttttacaacgcctacctaatgcctacccctactgcctctcacagcagcagagaagctgcttccctggtggctcagaggttaaagcatctgcctctaatgtgggagacctgggttcaatccctgggtcaggaagattcccctggagaaggaaatggcagcccactccagtattcttgcctggagaatcccatggacggaggagcctggtgggctacaatccacggggtcgcaaagattaggacacgactgagcgacctaactagctttgcctgcctctcgcagctccatgagctccccctttggagcacttaccctgcttttaattagactggcgtgtggtcattcgttactctctgtccctccctagactccaaggtccagggacagggaccacgtttgtgttgctcacaattttataagccctgtgagtaacgtggagtcagggacttgtacatattattaacgtcagatgaaggggatgaccccagcatgacccaacctgaccagtcccacagaagttaaccaggtctttgtataagcatggcctaggtatgacactctgccactcagctcctcgtaaacatagatactgcctcgtaaagggtaaatcatgacccaggtgtcagcatgtggctcctgaaatccttactcagcatccagtactgcttattgaaagtattcagatgtgcatgtttattacttaattttcttgttgtaagaaatttgatagataatatcaatacataccattgtactttgaattcactcttatttccttgaattcagaactggtaaaaatttcatctcttcatattaattgtttgcttcttttaatcacatgagaattctattcctcattggaattcctttttttttttttgtcttagctgtcagggtattcatgataatttcatgtttaacatggtaagattacctctgccagctatcctattttagctgtcctctgttgttttaaaagcgattttttaattgttctgttgtgttatgcttcattattaaaaacagtgcagattcttttgcttggaatatatatttatatgttgtgtgtgcatgctaagttgctttagccgtgtctgactctttgcgactctgtggactgcagcccaccaggctcctctgtccatgggattttccaggcaagaatactggagtgggttgccgtgccctcctccaggggatcttcctgatccagggattaaacccctatctatctctcagtctcctgcactggctggcgagttctttaccactagcgtcactgtgctctagagcccgtgctccacaacaggtgaaccctcccgccacaactgttacatgttactgagagagttaacttcagttcagttcagttcagtcactcagtcatgtccgactctttgccatcatggactgcagcacaccaggcttccctgtccatcaccaactcccggagcttgctcaaactcatgtccatcgagtcggtgatgccatccaaccacctcatcctctcttgtccccttctcctcctgccttcaatttttcccagcatcagggtcctttccaatgagtcagttctccacatcaggcagccaaagtattggagcttgagcttcagcatcagtccttccaatgaatattcaggactgatttcctttaggattgactagtttgatcttgcagtccaagggactctcaagagtcttctccaacaccacagttcaaaagcatcaattctttggcactcagctttctttatggtccaactctcacatccatacatgaccactggaaaaaacatagcattgattagacagacctttgttggcaaagtagtgtctctgttttttagtatactgtctaggttggttaaagcttttcttccgaggagcgctaagcattaaggagagttaacaagcaggttgataagaagtccaagcctaaggcccctttaaggaagaggtaaacattctttctttttcacacttttttgccttagacaagtaggcctcataagcagcagtatctcttgttcaaggacctgcctttttttgagctttggatgcatgttatgggagaaaatctgggtaaaaactttcacagccttgagctctgagttaacctgtttcttctggctaatctcatgctgatgtcatcctaggatgtatgttatgggaaacggtctgggcaaaattctcacagccttgaggtatttttttcctgttcttagcagctagcagaaaagtgtataaggccccgctaaactagtgaagcgggtactctttctacccacttctgatgtctatgtcagaagctttctttgtcctgtcattttaaataaaattctgcacacaaagctctgagtgactgagacctgtctttggtcccagagttatttatttctcctttggagaccacgaagccagtggcactgttcactgtaagctatcattacattatgcaatatgtaatatattttaatttatatgttacttacatgtggtgtatatatatatttagttagttattttgggtctttgttgccgcacagcttttctctagctgtggaagtcaggggctactctctggttgtgatgtgtgactcctcttgttgcagagcccatagttgtggctcttgggcctagttgctttgtgacatgtgtatcctcccggaccagagattgaacgtgtcaatccaactgcattgacaggtggattctttaccactgagccaccagggaagcctgatgtatgtattacatgtaatatgtagtacaaagcccttatgcccccttttcttatcccatagtggtagcaacgcatattcttcgtttggagccacgctggcgagggacgatgaaaagaatttgtggagtatgcctcacgacgtgtcccacacagaggcagacgatgacaggatcctgtacaacctgatcgtcgttcgcaatcagcaggccaaagattcagaggtaagcagcttttgagatcttgctatgtgcagatggtaatgcacagcaaaagagagcaatgacagaggaaaacagcttgaaacagagaaaagaatgaagcatgatatgtgtgaaacgaagggcaggtctcttagcagcatctagtcatgaattatagctggtcttcgtatacctgcttaatacacagataagactgatttctaattgttgctttagtgatataaattgcaactgtatggaaagagcaaggcagtgctgctcagaccatgaagatgctttatggtcttaactagcttaaccagtccatgtctaatctttccagttgtttggcaagccacagttcaacattcagactgaaggctggagggtactttgcatcatccccagttttgaattaatgtttttttttttttttgttttatcttcttgaattgtgcttattgatcaaatagtttatctggcgtatttgagatgatttgtgtgataaggcttgaaatcactcttaatggacttttaatcaaaggtattgatacaggaacactagactattgaaaaggagatgacttcataaattaagagaaaacagcagaagggatcatattttattttctctttttttttaaaaagtagtagtatatactataacaatacagtataatgttatattataggtgtctttttccatataatacagcctaagttttctaacctctgtgttcaactgtcagttctgagtagatacctatattagatatgacttttatatgttcctttgtatattatagtaatcgagaagaatagggacatttaaaatgccaggctcttgctttgaagtaaagtaccagagtgtgtgtgtatggggcagttatggcaagggagatctgtttcttatgtaggtttctttatatttttgattattaattgttttttctccaaaacatgctgtagcaggatatgataatcttttttttttttttggccacatggctcgtaggatctcagctccccagcccagagatcagtcccccacccgccgcagtggaagtgaggagttgtaaccactggactgccaaggaagtcccagtaacttttagaagagccacgtgtcccagtccttttattctggtgtgacctggggtaccttagggggatagaggcagacttagaagtgaggaatcacagttgcctctggctcttaaggcctgagggaagggcagctgaagagtccccagtggctttgatgaacatcctttcttggctgtggggtcttgctgaggaccgcttctacaaaatattggtcacagggcttaagtcaaagactaggagaaggaaatggcaaccctctctggtatttttgcctggaaaatcccatagacagaggaactggcgggctgcagaccatggggtcacgaaagagtcagacatgtcttagctactaaagcagcaccaccaacatcctactagtggccacatgcctgctacccccggcgccccttactcccactgcaatcccctcctccactggcaacattcgaaagacatcatacaggctgcttaggccaggaacagccgtcctggctgcccctcccgagcatatggacgggaatgcatgcatgacctagtttttcctttaatgggaagccatttagggtttctgctggtgagaatggaaccagttctttctttcccctttctttccccactctgctcaaagctgtgacggtaatagggaaatgaaacgtatagtactcctctccctctccccccacagggtctcatgccaactaggaaaggggcttgaagggtgtttgcactgggcctggcagctctctcagaggagctccagcttctctgccctgtttacctttgctattgaagaatccgtggaggaggcaatgtgagctgcaaatcgctctgaataagcacagcttccaaagaggccattgtgtcattttgtgctgcgcttgggcctgtgtgaagggccttccagagggcttgcctaagaaggaaagtcaagtttaactctagagaaagaaaccctgcaaccaagacaggccatcggtcaacaacatgaagatgtgatgatgtgatgatgatgatgaaatggtgtggaatgtttattcatagtgcttccttctttttaggtgtaaaatatatatacaaatatattccctggtggctcagatggtaaagagtctgccgggggtgcaggagacatgggttcaatcccttcatcacgaaaatcccctggagaagggaatagctatacactccagtattgttgcctggagaattccatggatagaggagcctggtaggctatagcccatgggattacaaagagtcaaacatgactgaagtgactaacacactatatctatgtatatatatacatatatacacatatataagtgaaagtctctcagtcgtggctgactctttgtgaccccatggactatagagtccatggaattctccaagccagaatactggagtggatagcctttcccttctcagggggttcttcccaatccagggatgaaacccaggtctcctgcattgcatgcctcccgcattgcagttggattctttaccagctgagccaccagggaagccccgtacatataaaggtgtttataaagtatgtatttgaaggtatatgggcttccctggtgcctcagtggtaaggaacctgcctgcactgggaagatcccctggagggcggcatggcaacccactctagtactatcgtctagagaatcccatggacagaggagcctggaaggctgcagtccatagggtcgcatggagttggacacaagtgactaagcagcagcggcatctgcacatacatacatacatacatacgtatatacataatatataaagaaagtgtaagtgttagttgctctctcgtgtccaactctttgcgacccatgcactgtagcctacaaggttcctctgttcatggaattctccaggcaagaatatatgtacatgtggttaaaagaagtttattttctaccaaaagtatgatacgcatattaagaggattgttgttcagttgctaagtcgtgtctgactctttgcaaccctttgaactgcagcacgccaggcttcctgtcctttaccatctcccagagcttgctcaaactcacgtccattgagtcagtgatgccatccaaccatctcatcctctgttgcccccttctcctcttaaccctcaatctttcccagcatcattctctacacagattggatcatatattacatatcattctgtactttgttttttttccatttaataatatattttggacatatttccatttcaccatgtgtagatttcccttattgttttgaggggctctctgttctcttgcattgatttcccatcatttattcagacagtccctgttatttaggttgattcaaggttgattcaggttttttgttgttagaagcagaagcagtgcctcagtgggtatccatatgtacttctgtgatcttctgttgttttttcaggtgtgggattactggatcaaagagtacatgtgtatttaaaatgtaggaattccttagtgcttcctttgtggaagaacctaggaaaaccacgttagggtgcagaactgagtaacactggaaattcacacagtgtttaagaggagcggctgctgatctccagatagctatttgccatgctgagactgtggatctggaagtgccagaactctggatttttaagagaaacgaaagccctaaatttacatataaaatgttcagattattaaatgatagctcacattaaacatgtgtcagctaaacaaaatatgtttatgggctatatacgtaatgtttacaatacagactgctgccactgctgctgagttgcttcagtcatgtctgactcggtgcaaccccatagactgcagcccaccaggctcctctgtcccggcaagaacactggattgggttggcaagaacactggattgggttggcatttccttctccaatgcatgcatgctaagttgcttcagttgtgtctgactctggattgtccaggcaagaacactggattgggttggcatttccttctccaatgcatgcatgctaagttgcttcagttgtgtctgactctgtgtgaccccatggacagcagcccaccaggctcctctgtccaggcaagaacactggattgggttggcatttccttctccaatgcatgcatgctaagttgcttcagttgtgtctgactctgtgtgaccccatggacagcagcccaccaggctcctctgtccacaggattctccagacaagaatacagactactactactcaatattattattaccttgttcaataggattgaaaatgaactaactgtgaatttagaaggtagaagtagaaatctgatggtgggtgtatctatagcttattttctttttcatgcaggataaaattggcacaaattttaataaaatagaggattttagttttttgagagaaaaacaaattccacctactaaggaataaggaaccctagatatttttgcatgaggacgatttagaaactcaagcaaggcattaaggaaaatttaacattgtgttttttccttgagtagcaatagcgtgaaaaacctaggaacgtctgtacttggaattctctgaaaattgaagagtaatttcaaaacagtgtgtgtatcgcctacattcccttactgaatctggagctggtgggagaagggctatgagtatagttaaggctaaatttacagtgttgtcccaaagtggaaaaaaatcagaaaagacgatatataggaggacaaataatgaaccatggcctgaatttaaagttacttgcagtgtcagaaaataaaatagtaacactatttaattctaacacaatccactttcatttacacaagccttcaaaagcttgaagacagcagaactgatacatttacagacttccaagtagtggaaaaattttgctgttgtctttaattttggaaaatattttatgcttaactaagaaataatagggacttccctggcagtccagtgtgttttgaatggaggggggtgtttaaaagaaaagttatgaccaacctagatagcatattcaaaagcagagacattagtttgccaactaaggtccgtctagtcaaggctgtggtttttccagtggtcatgtatggatgtgagagttggactgtgaagaaggctgagcaccgaagaattgatgcttttgaagtgtggtgttggagaagactcttgagagtcccttggactgcaaggagatccaaccagtccattctgaaggagatcagccctgggatttctttggaaggaatgatgctaaagctgaaactccagtactttggccacctcatgcgaagagttgactcattggaaaagactctgatgctgggagggattgggggcatgaggagaaggggacgaccaaggatgagatggctggatggcatcactgactcgatggacatgagtctgagtgaactccgggagctggtgatggacagggaggcctggtgtgctgcgattcatggggtcacaaggagtcggacacgactgagtgactgaactgaactgaactgaactggggaactaacaccccacattccaaaccaccaaaaatttttttaaaaatagtaaacaaccacaaaatcatgtcaataaatcattgtccttatgttcattctcattaacctagctgtatacttcatataacactctgtattctagggggcctaataatggttaatgaaataccattgcaccttatttgttttgtataagtaattctagtcatactgaccgaccctgccctccaagataataatgacaactgtgccaagcactgttcagctgcttgacatacattgtcctctacataacagccgtgagatggatgccattattatttctttttgaatcaacttgttcaaggccacaccattgaaatatggagccaggatctgaatctggactttgtgaatctagagacgtaaaatgtaatgagcaccatgattgaagttgtaagagaggactaggtattgtctgtgattccatgaagatttcaaaatgcacgggcggaatctatccaaagtctatttctgtgactttttgaaaccagtgatgtgaaaagcaggctcacatcagtgggatgagaaatgtgtttggcttggggattgtgaccaaagttcagaaagtggtccctgtcaaaatccacctttcccacattatggatctacacgctggttaagactggttaagtacagctggttaagactccaaccaagtgttttggttttattagttccaagattcttcattgtgtttcttcttagcccttcattgtttagtgttctcttgtcttgttatttggtgtctctttcgatggttcagtaatagatcttttaggagtttgtgcatggctttgagatttttttactctgttcaaaaatacttaacattttttattaagaatgtgagtgctgaaaatcagaccgttctcataaacatgattaaggactattttggttcaaaataggtaatgtttatgtggcacaatcggtgatagaaatgctaggcttgtttttaaatctattcaataattacgtgctcggaaacgtaccttgttctgatgatgagcttctatcattgagtgaagtagtgtttacgcactgcagcagccacgtgaacaccagatgccacgtggctcaagggatcctgtgaaaacttgaaaatctccctctgctgagccccagggagtgggctgtatgttattgttcttcaaaactttacaggcaaaaacataaaatgttcctgtttacaatttgtttgttcttcctgtgtgtcgggactccctgctggcagagtgttgccaggcattgtaaacagttcctataaaacatttaaaagagtgacagatgttcccaggggtttgtttgcaacgtctggattatacgctcagcctgtcatatccctggtaccgaaagaaaggacaaaagagagttaagtggaatgtctggtcggaggatgtgagggggtggagagagggttgagttgattgggtaccagccacattacttggaagcacttggaggcgggatgttctggtggggctctgcatgactccctccaagtcttcacttgctgagtggggcttgctctggtcaggccctctgacttctctacaagtgggtgaacactggctacagttggcgataggactgtaagttttaagtcaagcgtcaaggagcaaaataacagtggaaaatggaagcgattctgtgtaattctgggcttctcaaaaggcctctttgtttaggatgcagatgatccagattgttgaatgtaagcattcttttttttttttttttaaactttttattttgtattagggtatagccgattaatgaacaatgttggtagtttcaggtaaacagtgaagggactcagccatacatacgcatgtatccattctcccccaaactcctctcccatccaggcatgcaagcattctttatttgactttgctagtgactgtttgggttagagggagagagaataaaaacactcattaggatctgagaatcaagtcgtcttaccctctgtgttctaggtaataatatttatgggggttcatgctgggtgctgagcagaagcgcccttcttgatgtgtgtgctccagacaaaaactcaagcctcacagtaaccctatgaagaaggggttttgacacataagatcagagactttgaccatctgtccaaggcattgagagtggtgcagctggatcatagttcagtctgtgtgtatgacctggaagtctctatggacagaaacacttgctgccgtctctctctcgagcttagaaagcgcttcagtggaatctttttggtcaaagacaaagtgaatgggtgttaatcaaatgagtgttgaagtgaagtgaagtgaagtcgctcagtcgtgtccgactctttgcgaccccatggactgtatcccaccaggctcctccgtccatgggattttccaggcaagagtactggagcgggctgccatttccttctccagggcatcttcccgacccaaggatcaagcccaggtctcctgcattgcaggcagatgctttaccatctgagccaccagggaagccaaatgggtgttgacttcctgccaaagtagctgccttgggccgtgcatttgtcaactgtttctcaccctgcaccaactgaatcacagagtggatgatgttggcatttgtttagtatcagcctcgctggtggctcagacagtaaacaatttgcctgcagtgcgtcagacctgggtttgatccctaggtcaggaagatctcctggagaagggaatggcaacccactccagtattcttgcctggagaatcccatggacagaggagcctcgtgggctacagtctgtggggtcacaaagagttggagacgactgagcgactaacaaaacagcaaacctctgttgtgcagtgcatgcaaacagcctctaggtgctgccgcctcgggaacttttcacacctcaggcaccattctgggtacaaaaggtctgttgggctccaccgaagacattgtctgtctgtctgtaatgttcttttctattctttgcccacccccgacttcaaaaatctaagcattttggatattagcattaaggtgatacgtgtttcttagcaagtaggtagcacatcaaaactctgtgtaagccaacagagttgagacagaaaatgaagcaggcaaagggaaaatcattgtagatattcagtaggatgtgaggtggtgaaaggcatgcgttttggaattagacagttggggatgaaaggcatacctctgccatgtcctgagatgacactgaatatttagttatgtgacctcagggagttcttactgtttattgtccaatctgggacacgatcgcaaggtcttaactaagaggacgggggaggatttctctggtggtccagtggttaagactctgcttccagtgcaggaaccgagggtcgatcccaggtcgggaaatttaagatccagcgtgctgcgtgccgtggccaaaaaactttttttaaaaaaaagaaagaagtttcctaatattgaatatgtacaggcatgtgtgcttagtcatgtctgactctttgtgacctcatggaatatagcctaccaggctcctcagtccatgcagttttccaggcaagaatgctgaagtgggttgccattctctactccaggggatcttcccgacccagggatcgaacccgtgtctcttgagtctcctacattggcaggtggattctttaccaccgagccactgagtatgccaggccaaacatagaaatggaaactgctctagttaagctggaatgtatgatcacctttttaaaaagtgtggtaaaatataaataacaaaaattgccattttaaccatatttaaatgtcagttcagtgtcaactaagtacattcacattgttgggcggccatcatcaccaccacccccaggacttttcatcttccaaaactagaactccatatcccttacacgataactcccttctcccctttcgcagcccctgaaacccagctttctactttctgtctctacgaatgagactgtactaggtacctcgtattaagtgaatcatacaatatttgtctttttgtgactggctgacttcacttagcctaagatcctcaaagttcatccatgttgtagcatgtgttagaatttccttcctttttaaaactgaataacattctattgtatgtatagaatacacatggactgtagcctactacactcctccgtccatgggattttccaggcaagagtactggagtggggtgccatttccttctccagaggatcttcctgacccagggattgaacccaggtctcctgcactgtaggcagatgctttaccatctgagccgccacggaagtcctattgtatgtataagccacattttgtttactcattcttctgtcagcaggcgtttgggttgcttccaacttttcgccagtgtgagtaatgctgctgtgaacatggttatacaaatatttgcttgagtccctgatttaaattcttttgggtgcatacccagaagtggaattactggatcataccataattctatgtttaatttttgaggaatcaccatactctttcacagtatctgtaccattttactttctcagtagcaaagcatgagagttctaatttatccacagcctccccaacacttgttagtaagatcacctttcttaacctccacactgatcagtgaaacagctgatgacttcagattgatcagttttcacatccagatagagacagttgcagctgtggaccactcaccaccactgaatattagtattagggttataaacccagaagaaactgatgcctccttctgaacgacttgtccacggaagagaaatagagagatcagaagactgggagagctctttgtatgtgaatttagttctgtttttttcctgagcatccacatgctaatgtgtaatggccaggccctctttctattcctgttccttagattgtccttcctggcctcctttccttggagctccagaaaggtagtagataatacaccttgggagtactgacaggtcagtgtcagagaaaatggacaatgccttggggacctctaggaagatgcagtgcctggaggagaagggcagggagctgtccatctctttccattactagaacttcactgtcgcagtaacaagtggctgcatttttgggtttcctaagttaccgtgcttgtgctggtgaatttccagaagacagaccacatgtttattggtgctcatgggcaggatcatttgatgataagaactgtatctctccgttagttttcctaaaactggcataaagcagaaaccataaagctgcctcagtgcgcttcagtgcagttcagtcactcagtcgtgtctgactctttgtgaccccatggactgcagcactccaggcttccctgtccatcaccaattcccagagcttactcaaacttatgttcatcgagtcagggatgccatccaaccatctcatccgctgtcgtccccttctcctcccttcttcagtctttcccagcatcagggtctcttccagtgagtcagttatttgcatcaggtggccaatgtattggagtttcagtttcagcatcagtccttccaatgaatattcaggactgatttccgttaggatggactggttggatctccttgcagtccaagggactctcaagagtcttctccaacaccacagttcaaaagcatcaattctttggcactcagctttctttatggtccaactctcacatccatacgtgactactagaaaaaccatagctttgactagatgtacctttgttgacaaagtaatgtctctgctttttaatatgctctctgggttgatcatagcttttcttccaagggggaagcgtcttttaatttcatggttgcagtcaccatctgcagtgattttggagccccccaaaataaagtctctcactgtttccattgtttccccatctatttgcatgaagtgatggggccagatgccatgatcttcgttttctgaatgttgagctttaagccaactttttcactctcctctttcactttcatcaagaggctctttagttcttcactttctgccataagggtggtatcatctgcatatctgaggttattgatatttctcctggcagtcttgattccagcttgtgcttcaccagcctggcatttcacatgatgtactctgcatagaagttcaagaagcagggtgacaatatacagccttgacgtactccttttcctatttggaaccagtctgttgttccatgtccagttctaactgttgcttcttgacctgcatacagatttctcaggaggcaggtgaggtagtctagtattcctgtctctggaagaattttccacagttgttgtgatccaactgcctcaagttgtatatttttaagtatatagttcagttcagttcagttcagtcgctcagtcgtgtccgactctttgcgaccccatgaatcgcagcacaccaggcctccctgtccatcaccaactcctggagttctagttataaatttgaaacatgagggattatcagcaaattaagccttcagtgaactacctccgtgatgactttgttttttttccttgaacaaatgagatcatcagaaataccttcctgtgtagagtcagggagactcctccacagaatacctggattttcacagcagatttttgatgtagatgagttattaatttaaaaaaagtgagagaggcttccctggtgttcagtggttaagactctgagctcccaatgcatggggccccgggttcaatccctgatcagggaactacatcccacatgtcacaactaaagatcctgcctgccacaactaagaccccgttcagccaaaaaaatatataaattaaaaaaagaagaagaagaatgtgagagagagaccctaagaggttttctcttcctgacagcatccagaaatgggcttgtgactcagggttcgatgcccttccctctagggaggagaagagctacaggatctgaggattgagggcagatagctacaggattgtctctgttctttattttaaatgggagcaaaaataatcatgtggtaaaataagtctctgggcctagaactttgtacagaagattgtaaaacactttccagctatttccctctttaaaaaacaccagtatatctaatttttcaaggtatctgctatttaggatttgtttcaacaaaattctgcctaatgtgtctaacctatttattggttaattttattaaaaacaatgtgtctaatggtcagttaggcaagcttgatttcaaatgagtactttcagttcttcatatccccgagaatctagtattttctagtcttgatgtttatttagtgttaacaatgcagaaaattcctttatgctcttcttgcatctacttcctctcaactcaatacaaggatgaagtgatttctatttgccatgcagttagaatttctgctttcatcaaagtaaggacctgctttcaatttcacaactgttcttaggtcaacgtgatgggcatgtatgccaggggcctggttgtttgctcatgcaaatctcacaggcttatgataccgtgggtgtgtcacttccgccccagatctaatactcagctttgcaggtctgtgcacttgattttttcagggcacacagagctgtttgaacttagggggcatattattcagagaaacagaagcaggaggatgtgtgcgtatatctgtatctctatatctgtatatttattcctatatctatctatctctacttctctatcttatctatctctatcattctatcatatttacctatttacattttttgttaaggaaatggttcacacaattgtggaggcttggtgagtcagcatctgatgggggaggccggagatttaggggtagttgcaattcaagttcaaaggcagaattccttcctgcagagaggagggtaatctttgttttaatcacaaccttcaagtgattaggtagggcccttccacattgagcttccttcctcagctgataaagaatccgcctgcagtgtgggaggcctgggtttgatccctgggttgggatgatcccctggagaagggaaaggctacccactccagtattctggcctggagaattccatggactgtatagtgcacatggttgcaaagagtcagacatgactgagccaggccacattatagagagtactctgctttactcccagtgtgctaatttaaatattaatctgttacacagaataccttcagagaaacatccagaatatttgaccaaatatctgggcgctgtgactcagccaacttgacacaaagatgaaccatcatagaggattttactaacactaaccaaatttgcaagagactgccatgtaaacccgaatgtatgtaaccatttgatgggccgtaaacctgactaatctgtccagcctctcccatataatgaaataggtaaaggaagctagtgaccacactggaaggtgactggggaagaaggatcagagctcagcggccactgacatcagaggaacacttgctgctctcagtacattacactgtgctcttcctcagtcactaagtcgtgtctgacccttttcaactccacggactgcagcccgacaggctcctaagaggatttcccaggcaagaatactggaatgggttgccgttttcttctccaggccaagccaagtgaagttgcttggttgtgcccaactctttgtgatcccatggactgtagcctaccaggctcctccgtccatggaattttccaggcaagagtactggagtgggttgccatttccttcttccgaggtacttcccagaccagagattgaaccgcctatgtctctttacaactgagtctccagggaagccatccatataccgtgttgacagctgttgtcctccagatgtgataacctagaactttcacccccggtataaagttattcctctgatttggtcaggacacctggccccttgatggtggtggatagaggtttctgaacatcacccccaggtgacttgtagcttcaggaactggacataagcaggggtttgggagggcaggcaatgggatatggaatcaagggagatccagaataatgtaatattagacgaatctgggctgccgtctatggggtcacacagagtcggacacgactgaagtgacttagcagcagcagcagcagactgagagcaggggctatttgtttagtcactaagtcatgtcccagtctttgctaccccacagattgtagccctctaggcttctctgtccatgggattctccaggcaagaatactggagtgggttgccatttccttctccagagagcaagggagatatttcagatattttaaactgaagaggctaggcagatacccaacagagccagcagattagtaatggaaggtaagatctctagacatttcagttccagtgaaataatctatgtagatttattgcagatagaatttaatgcattgccaaggctcagcaagtcctccctatcccattttctcccatggaacctcttgactcttttctcagtccaatagtgatgtcatgtgtgttgcctatggacagctacacttctaaaattgaagacacattcattttcttcatttgttatttaatatataaagctggactgagagcatagaaattgaggaggctgttgagctttgcggaatctccgcctaaatagactgtggtggccttcagcagttatatattttcctcttcgcagaaaggagagagcccaggggaagtggtgacctctgagtggtatcccttgtgatcagaatagctccttgcttcctcatcagtccttttggccccattcattggcttgaaattcttctaaggtggagtagcataagtatcaaatccaagttacatcaactcaccgggcagttctgctgttggcagtccatcctgtacatattcttatactgttaaacaaagatacttgttctttgcagtagtgttttgaaaggtgaacatctgaaataaaaatcttttttggttaaaaaaataatgaggtttaaaacaaaaagaaagcagtgcttgtgatgagccagtctaaagcttgaggcaaaaagaaaggtcagttacactgtattgaaaaatgttattatttgttcattgtgtatttttttatgttatttttaaaaatattgcattaaaatatttatcttgagaaaaaaaaatgaggtaggatttacagatcctggcttggaaagatagttatgatctattgctaagtgggtatgtataatgtgtagaaaaatgttccatttgtataaaagtatatgtatgctaatatataactaacaatttcttcataggaaggtcacctatgaactttttttagctttggtgacctctggggagtagaattgggtggtaaaaaggatactttctcttttaatttcatgatcttctttactgacagcagtacatacgtgtgttttgcttctgtgtacatctgcttggtataaaataattatttcacagcacactttgtggaggatatttccctgggtctttctaatctgtacgagtgtgggtatgttgaagaaaggggaagaagtgggaagaaggagagagggaggaagggagagacaagagagattaaaagagaaaatgagagctagtttaggaggaactggagcacgctttgaggaatcctgccaaaatggactgaatggcagaatgtgcatgaagcagccagttggtatttatctttttaacattctaagattcatctgataaggcaggctctttctctggagcttacctcctctccaaccgcctgtgaattcacatggtaattaacagagccgcggttgtccgctccttccccacccccaccttctccgctacccctcccccgccgcttcttttgattggtcttgcttgtcttagagtaactgaaaatggctcttaattgcacagagcctgccagagccctggatactggtgtgctgggactgcagggtgtgaatgtgctcagctggggaatctcggaaggcttatggggagtcctctgtaagaacagctttctggttttgagtggatgtggggagtgggagctggaggggaggtgggggtggatggcagcacccgcctggttctgttgggggcccagatctgtggcttctccaccctaaaatcccaagtgttctggaaggagatcatgtttttcttgatatgaaaccacccttccatttaggtattcagtccctgggtaactgttgttacatcataattagaccgcgtgaccatgctgttcccccccaccctggagggagctgtgccctttgatgggtttgcaatacaagaggcaggtcaggtgccttatgaatgaatacaaactgggtctgccctcttgaaataatcctcctgtttaattagaaatgaggtgaggtaaagtcactcccaagcttgtttaccacattgctgttgtcattgttattattaagtaacttggagcctagacctagagattatcatactaagtaagacatatagagacagacaaataccatatgatactactcatatgtggaatctaatttttaaaaaagatacaaatgaactcatttacaaaacagaagcagatttataaatgttgaaaaaaaacttaatgggtaccaagcaggaaatgttgaggggtgtgtggataaatcaggagtttgggatgaacacaccagcactgctgtgtataaggtagatgaccgaagggccctactgtatagcacagggaactctacccagaattatgtgataacctatgtgagaaaagaatttaaaaagtgatgactatttgcacatgtgtaactgaatcactttacagtacaccggaaactaacagaacattgtaaatcaattacactccaataacattaaaatattttttgaaaattaaatgtgtctgtgtgtgttagttgctcagtcatgtctgactgtgtgtcaccccatgaactggcccacaaggctcttctgtccatgggattctccaggcaagagtactggagtggatcagtcagttcagtcgcccagtcgtgtccaactctttgcgaccccatggactgcagcacgccaggcctccctgtccattaccaattcctggagtccacccaaatccatgtccatcgagtcgatgatgccatccaaccatctcatcctctgtcatccgctcctcctcccaccttcagtctttcccagcatcagggtcttttcaaatgagtcagctcttcgcatcaggtgatcaaagtgttggagttcagcttcaacatcaatccttccaatgaacattcaggactgatttcctttaggatggactggttggatctccttgcagtccaagggactctcaagagtcttctccaagactatagctcaaaagcatcaattctttagcactcagctttctttatagtccaactctcacaaccatgcatgaccactggaaaaaccatagccatgactagatggagttttgtttgcaaagaaatgtctctgtattttaatatgctatttctcatttccactgtataattgttagggatttgatttaagtcataactggactgggtaggtaagcataaacaaagatttaagaagaaaaatccactgaaactggcttcaagttattattcttagttttgagtaagcatagacaaaaccttaaaaaagtaaataacttgtaactagtttcagtggacctgagccaggtttacctggttccttctcctatggatgtggtttgcggtaggaggccacatgcagtgagcagtgtgtgtttgggccccgcgtcgtctgtgctggctgtggatccaagaaccagaagatcctgtgctccagctgcttccccaggcccagatgctgggcagtcatcagggaggggccaggcaggaggaaggcctcacagacccaccaggatactttttgtttcatggtgcagttgaacgcaccttagtctctcagagtttactttttactcttacttgtgtttgccagccttggcgagtttaccaggaggttttgaaaccatgtacaagtggtcaaaatgtccctggggttgagtttgttgttaaacacaggacatgcttcagggacaggagtttttatctgttaactctttgccagcagttacttaaagcttggtggattccaatgagagctatgggtgggagtgtcaacagcttgtaagaagagatagaccctcagaccaaggactggtcagggtgtctgctcttccagcccagccttggcaatgtgcgaagataagttttaaaacaccctcttgtcgtcttacactgcagagagtatcatctgtctaaagtcagtgcagtttctgtatttcttccttctgggaaatgactgtaggccatgctcttcagccatcacccatttgcctctaggcagaagcctggagggggaagggtgatggagtgtgaggaaaaaggtgatgtgcaaacaggagactgcttgaagtaagactgagctacccagggatgtatttgtcacccccaagatgggcaacctttgagtgcagaactattctgcctgcctttctggggccccattgacttctcgacctccgctgcccctgccaggattcttctcatggtgccctctggctgcgccccttttgttggctcctcatcaagcctggtccccctacccccagttatcccaccactaacatttttttttctcccatctttccacccaattcaacatccttttactctctgtaggctcagctcaactggaaatttaaaaagaaacaagtaccaggtcaaagctagaggaattcagtgaagagtatgaatgacttgaagggagaaatgtgtgaccccaaactcatcatcactggtgaaatgtgaggaagagcggaggtttgctgagcagagaggtccctcagtgtagtggtttcttgctgggcgtccagatgtattcatgcctggcgtcactgtggcttttggtcctgagctggggttggagcaacctcatcaccttggaaacactgccagaagcctgtgagattcctggggtagggacagaatcctgtctgagggccctgagggtggaggccagggcactggatgagccagtctacttcttaaacccaaaggattttgtggggcctaagggctgaattgttgaaaggagtggactttggcatggactggcagtcagcatcaagcacagcaagcatcagccttgagctggacaagaatgcggacagtgagctgggggtgcctggctatgctagccatctgactgaggtcgggtaaggcggggacatttgaacactgtctcccttcgagctggcagatcctctgctgatgtggaaacactggctgccgttcacactactcaccctgcctgttcttctgccctagtttggaaaggtcttttcttcctctctagtttctcctgctcccagctcttcttccagccatggaaagcagagggcagggctttgtaatgtgtcccagtaggtaaacaagcagaacctgatttttttggtccatccttctctgcattttgcttgctcatattttcacccctgtctgggcttgtatttaaagtgaatgtctcggctgatgcgggctaagatttagtcactgagaggaactggctcaagcccacatgtatctaggtttctcattgctgaatgtttctgaactctcagcattttcatcgatgcttcagttctcacctttgtattttgatccatgacatgctatttatcttttacttgctttaaagtgacattcgggggatagaaagcatcttcaaacatatttgggcttccctggtggctcagacagtaaagagtctgcctgtaatgcagaaggcccagattcaatccctgggtggggaagattccctggagaagggaatggcaacccactccagtattcttgcctggagaattccacggacagagaagcctggcagactacagtccatggggtcgctgtgagtcagacacaactgaatgactaacacgttgaacataaagcactagaaggtacatgctgaagtgtttcagagggatgagtctctattgggtggagagtagtttgcactattgcttcttcttttttttctttacagtgacttagtttcttccttccttcttttcttttttaaaagtgtttatttatttgactgcacctggtctttgttgcctcacgcatggcctttgatctttgttgaggcacatgacatctttaactgtggcgtgtgaactctcagctgtgatatgtgggacctagtcccctgcccagggattgaactcaggcctctggaattgggagtgtggcgtcttagccattggatctccagggaagtctggcactatgtgtcacctttttaacctatcgtggcagtgtgcagtgtgcttctggcacatgtcgccttccttgcaagttcatcagtcatattggattagggctcactttaatgacttcattttaacttgatcacttttgtaaagacactgtttcccaataaagtcacactctgaggcactgggggttaggactcgtcatacaaattttgtggggacacagttcaacccgttcagttcagttcagttcgtgtccgactctgtgaccccatgaattgcagcacgctaggcctcccagtccatcaccaactcctggagttccctcagactcaggtccatcgagtcagtgatgccatccagtcatctcatcctctgtcgtccccttctcctcctgcccccaatccctcccagcatcagagtcttttccaatgagtcaactctttgcatgaggtggccaaagtactggagtttcagctttagcatcattccttccaaagaaatcccagggctgatctccttcagaatggactggttggatctccttgcagtccaagggactctcaagagtcttctccaacaccacagttcaaaagcatcaattcttcggcactcagcctttttcacagtccaactctcacatccatacatgaccacaggaaaacccatagccttgactagacggacctttgttggcaaagtaatgtctctgcttttgaatatactgtctaggttggtcatacgttttcttccaaggagtaagcgtcttttaatctcatggctgcggtcaccatctgcagtgattttggagcccaaaaaataaagtctgacactgtttccactgtttccccatctatttcccctgaagtgatgggaccggatgccatgatcttcattttctgaatgttgagctttaagtcaacttttttgctctcctctttcactttcatcaagaggctttttagttcctcttcactttctgccataagggtggtgtcatctgcatatctgaggttattgatatttctcccagcaatcttgattccagcttgtgtttcttccagtccagcgtttctcatgatgtactctgcatagaagttaaagaagcagggtgaaaatatacagccttgatgtactccttttcctatttggaaccagtctgttgtccatgtccagttctaactgttgcttcctgacctgcatacagatttctcaagaggcaggtcaggtggtctggtattcccatctctctcagaattttgcacagtttcttgtgatccacacagtcaaaggctttggcatagtcaataaagcagaaatagatgtttttctggaactctcttgctttttccatgatccagcagatgttggcaatttgatctctggttcctctgccttttctaaaaccagcttgaacatcaggaagttcacggttcacgtattgctgaagcctggcttggagaattttgagcattactttactagcatgtgagatgagtgcaattgtgcggtagtttgagcatgtgaaaagaagagaggtgaaaagcaaaggagaaaaggaaagatacaagcatctgaatgcagagttccagagaatagcaagaagagataagaaagccttcttcagcgatcaatacaaaaaaatagaggaaaagaacagaatgggaaagactagagatctcttcaagaaaattagagataccaagggaacatttcatgcaaagatgggctcgataaaggaaagaaatggtatggacctaacagaagcagaagatattaggaagaagtggcaagaatacacagaagaactgtacaaaaaagatcttcacgacccagataatcatgatggtgtgatcacttatctagagccagacatcctggaatgtgaagtcaagtgggccttagaaagcatcactatgaacaaagctaatggaagtgatggaattccagttgagctgtttcaaatcctgaaagacgatgctgtgaaagtgctgcactcaatatgccagcacatttgcaaaactcagcagtggccacaggactggaaaaggtcagttttcgttccaataccaaagaatggcaatgccaaagttcaacccgtaatggggaccagaaatagttactttgtttggtcatcagatgtagaccctgtggctatagcagtgtttaaagagtctgccctcagggagcttacattctattaaaaggacactgacaacaaataacgtaggttttgcttgctccttagaaggaaagctataacagacctagatagtgtattaaaaagcagagacatcactttgcctacaaaggtccgtatagtcaaagccattgtctttccattagtcatgtatggatgtgagagttggaccataaagaaagctgaacaccaaatagtcgatgcttttgaattggggtgtttggagaaggttcttgagagtctcttggaaagcaaggagatcaaaccagtcaatcctaaagattaaaattaaccctgaatattcattggaaggactgatgctgaagctgaaactccaatattttggccacctgatggaaagaactgacttattggaaaagaccctgatgcagggaaagattgaaggcaggaggagaaggcagcgacagtgaatgagacggttggatgacatcacagacttactagacatgagtttgagcaaactccaggagatagtgaacggcgtgctgcagtccttggggtcacaaagagttggacagaacttagtgactgagcaacaacacaaggttatatagcggtggaaaaaatttcccttcttcccttctttggctggactgataattaaattgatataagacagattaacaggagaaaaatgaacttaattatgtatatatgagattcccataaagataggaagactcaaagggcagccacataattgaagtttatgtaacatcctgagtgaagaaaaggggtgtaggagtctgggggttcaacgttggaggaaagccattcatgggaaggcagaggagatgtttgaaaaacatgtctccttgttatgcagataagtttcctagataaaaaataattatgggtacaggccccctttccaatataaatttaggtggctgaagggaaattaaaaaacttttcttaaatctgatgggttttgattgcctttaccctcaaatattgggttggccaaaaagttcatttaagttttcctggaacatcttatggaaaaaccttgaacttcttggccaacccaataatccttatgccaaagagatatgttttagggtaacaaaaccttctcccctttcagttgtgataaatgtttggaagaaaaataagataatatgagggaacagaaagtgactttgggctcagtgcagagacctgattgggctgggaactgagccttgtaaagggcattccaggcagagggaacagcacgtgcagaggctcagaggcaggagtgagcaggtgtgtctggggacagcggggaggccagggtggctgcggcagggggagccaggggaggatctgtgctgcgtgaccctgagcagactggcaaggaccagacccctcaggcctggtaggcaccatgagggttttgaattctaagaggggtagggagtgctttcgaattaatcaaataggaaatgctcatttgttcctttgcaagatctgttcttctctggccccagttacttctaatctgggcaacttgtattccctgggagtcctgagcaggcctggccttccactgtgcctctcctctgcattgcgagatacatctccgcaggaatcctggtctctgcacataccctgagcagagacactgtctgccgtttgtctggactgtcttgtcagggtgttttacagtgaacagccttgggaggtagaggtctccttctggagcaaagggtgggtgggtctatcccattataaaaggtcaggttccctgagtttagggttccttccctgtaatgtagcctactgcacgtgtaggcatcctttagctctcttctcactactgggtgggattgggcatgaagaatgctgatctcctgctggattctttgtttctgaccctggagtcttgtgtcttttgcctgcgctcatgaaactgtggagggagaccatattagtttctaagcttgtgagtcaaatctcagatgcttcacaattctcaacacccttaaaatagttctcatgttggcatcatgactgagagcttgaccatgggtcaatgctttggttgtatgtgtgtggtttttaaactttttttctgttatttttggaactcttcacacttccctcttccatgaaacttgtcagaaaacagatctaattgaaactgccctggcctgaggaaaggcaagaacttagagggcgaggtgaggacatggtctcagaagtttctgtgcttaaaggcctgatggagcactgatacagcttttaacgcaagagacgttaagtgctgtcatcctgggtatctgtgttttaaggattcagacctcctttgagtgagatgtgtgcactgtgggaatgggggtgggagtgtttctgagagtaagtcaggaggactggattcctccatgccacatgtctctctctacagtctagacaagctgtggtccatgggccaaattccagttttattggaacacggacactcccacttgtttatatgtgttttctggatgctttggtgcttcagtgacaaagatgagtaattgtgatggagaccttgtgttctgtcagttcagttcagttcagtcactcagttgggtccgacttttccaatgagtcagctcttcgcatcaggtggccaaagtattggcgtttcagcttcagcatcagtccttccaatgaatattcgggactgatttcctttaggactgactgctttgatctccttgcagtccaagggactctcaagagccttttccaacaccccagttcaaaagcttcaattctttggcactcagctgtctctatggtccaactctgacatccatacatgactacttgaaaaaccattaaatatgtcttgtaaacatatgaaatatgttttgtaaaacatgtgttgtgaaatatgaaaagctattaaatgtgtcttgtaaaccctaaaatatttagttatctggcttgatgccatccaagctttgcttgtggtttggtgctcagcagaagctctgatactttggccacctgatgcaaagagccaactcattggaaaagaccctgatgctggaaaagattgaaggccaaaggagaagagggcagaagaggatgagatggttagatagcatctctgactcaatggacatgaatttgagcaaactctgggaaatagtgaaggagagggaagcctggcctgctgcagtcgtggtgtcacagagtaggagacgacttagcaaccaaacaacaacatacttggctcaaatgcttgtgtggcagatttaatttttcaaacaacaaggacacataaccaaccccccttgaggagggctccccacatccactgcttgatgatgctttggaagaagacatcctctttggaacctgagagaccttttcagccttttcatttatggctgcaaaacagctttcaattcctgatgctttttcttttgaaaaatgcctgtacatttatgtatcatgttagattagtcaacattttaaaaaacaccttagcatttctaaacatgttaattttaccatggatgggtggcgctgttttaacatgctgagagttttaaatgcagagggattgttttaggggctttgtttgaattaattaaagcctgccatgttgataaggtaacaggcaggtgactgacaaggcagagttctggaaaattggaaatgactgccgagtttaggattcatgaaggcagcttcctaattggcttgacaaagggtcatctgtgtgtctgtgacagccagggaagactggagtaattataaaccatgtgttaaccagtgtgtttccaggcagttacaagactgcttccacttaacccattattttgccttgaggcggaggcattacgtcatgcttgggcctttgtcagagtcacctccaaacactggagcggggggagtggcatcttcgggttctgctgaagatggtagaggagtaaaacctggacagcaggcgagatactggaattgtaaggaaaaatgttttacaaggcttgactctaaatagtaacttccgattgttataggaaccctgtggtcattgacaggtgacagagcaagcatttttcgccccttttgaagggtctgtgtgaccccgcggtgtgcccgtgggggtataacatgctggagatgttcttcgagtgattggccagtggttcagtttataggtccatgtcttgaaaaggacatagatcacttagagcaggtctggagtagacaatgaaagtacagaacagttagaaagtagcagtcaagtgaggggagaggaggggtgaacgcagattgctaaatcagattcacccggatcatagattttacccagcatcaaactttccctgagagctcagttggtaaagaatctgcctgtgatgcatgagacccaggttcgatctctgggtcaggaagatcccctggagaagggaatggctacccactccagtattcttgcctgggaaatcccatagacagaggagcctggcgggctacagttcatggggtcacaaagagtcggacacaactgagcgactaaaccaccacctcttccaggcttagtagcactttcaatgacacagacaattgagaggctcaggagaagcagagaaaagtctgggacactgaaaatgtctcccagggccccctccaccccacaggacatgtacccctgactctgaatactaggcgaggttcacagggttacctcacacagtgcaaagcgtttataaattatgaaagagctctggtgtgtgccccctcgttattctgtagaatatgtgacattctccagggactatacctcaaagatatttgatgtcttgagtccaagtcatcctatggccagagacatcctgctaagggtattctatagtcaaaccttcttcctagcaagtattgatagtctagttacctggaagttcccttgataagaaaatcagatagatttacctgccgccttgggcttcccaggtggtgtccgtggtaaagaacccaccttccaatgcagcgagttcagtccctggatcaggaagatccctggaggagggcatggcaacccactccagtattcttgcctggagaatccccatgggcagaggagcctggcacgaaacagtccatgatatcagttcagtagtgtccaactctgtgaccccatgaactgtagcctgccaggctcctctgtccatgggattctccaggcaagaatattggagtgggtagccattcccttctccaggggatcttcctgatcctgggttcgaacccgtgtctcctgtggcttgtgaactgcaggcaggatctttactgctgagcacctggggaagcccatagggttgtgtagagtcaggaatgactgaagcaacagaggacacatgcacacccctgccttctttcctttttggggaggcttacccacgcctaccctcaacacacacacatacatagatagccagtaaatggaccagaggccagctgtttaactcctgaaggtgtaaagaagtggaattattcagagttaagcagaaataaaagcaatttggcagctttcaaataaaggaaggtcaattataatttgggttcctggtaataaagcatggaaaaagagtaattacagaaaggtttatcactataaagagaagtattttcattaaaaaaatatagaaaacgttcagatttggggggttgttagtttttcaaagcaaatgacaacttcctcctttctctccttcccctctgctgtctctctgcctggctctgctgagttttgcatgtaccggccacccacttccgggttagcgtcttgtccttgctccttcccctttttccttctcctctttgaagctggcagagatcctggaattcagagtaaatgcccacagaagcaacagtgttttcatctaaatattgtaacatgtacaggaacttgcagacttattgacaggcttttcagttcagcatcaggtgacctaaggtctgtgcattgcaatccagaacatggtaaatactttaaaaaataaattcgacttacagtaatacccatagctagatttttctatttttgaagcagttagatacttggttaggttaataaaggaaatcattaaaattaataaaaatcaataaaaataatccttgggaattttaaagtttctattctgaatataaaagcagtgcatgatcattatggaaaatttggaacatatagggataaaaatcacttatacataatcttatccttagattaaacactattatactactttattgcattttcttttgctttttttgagacaaaatgtacatatatatagacatgcacagacatgtatgtagttattctcctctgtccctggaattctccaggcaagaatattttccattcccttctccagaagggagaatatatatatattatgtatatacactatacataatgttacatatatacataatattatatatagtgtatatattatgtctgcacactatacatacatatatgtattatatattatgcatatacactattatatatattgtgtgtatatatatgtatataaagtatatatactaatgtgaatatatacactattgtttcaaaaatatgttatgataaatatatatagtctgctttaacactgatcactaatgtatcatttaagtctttcttcatccatcatcttttaattaaggctttaaagcacattatttgcattgaccttttttgcatttgagattatttccttaggctagattcttcaaactgtaattcatagattaaagattttatccatttttatatactctgatatatactgccaagtagttttcactatctgtgagaaaaagtaacaccagtttcataactctcaatcttaatacaaaagagcgcctttcaccacatccttcccagcactggatgttctcattttcttttatttttaatagctaatttggctaaataaagtgaagaggaactaaaaagcctgttgatgaaagtgaaacaggagagtgaaaaagttggcttaaagctcaacattcagaaaacgaagatcgtggcatccgatcccatcacttcatgggaaatagatgcggaaacagtggaaacagtgtcagacttttattttttgggctccaaaatcactgcagatggtgaccacagccatgaaattaaaagacactccttggaagaaaagttaagatcaacttagacagcatatgcaaaagcagagacattactttgccaactaaggtccgtctagtcaaggctatggtttttcctgtggtcatgcatggatgtgagttggactgtgaagaaggctgagtgccagagaattgatgcttttgaagtgtggtgttggagaagactcttgagagtcccttggactgcaaggagatccaaccagtccattctgaaggagatgagccctgggatttctttggaaggaatgatgctgaagctgaaactccagtactttggccacctaatgcgacgagttgactcattggaaaagactctgatgctgggagggattgggggcaggaggagaaggggacgacagaggatgagatggctggatggcatcacagactcgatggacgcgagtctgagtgaactccgggagttggtgatggacaggcaggcctggcatgctgcgattcatggggtcgcaaagaatctgacacgactgagcaactgaactgaactgaactgaagggttcataagagctggttagttgatcagttgtgtccaactctttgtgaccccatggactgtagcccgccaggctcctctgtccatgggattctccaggcaagaatactggggtgggttgccattcccttctccaggggatcttcccaacccagagctcgaacctgggtcccttgcattgcaggcagattctttaccctctgagccaccagggaagcccttatacaatttggctagacaacaagacaggatttattgtttcgttgagaattcttgaagggtagataattacttcctaattgatcctttcatgaattatctatccatggcttctgttctttagtatgaatgttctttctgtattcatcccttgctatactgtatcaatggagaaggaaatggcaacccactccagtatttcatgggaagacccatgaacagaggagcctggcgggctacagtccatggagttgcaaagagtcagacacagctgagtgactaaacaccatacttgtatcaaatgctttttccactatattacttgcctttttaatattattattttttctccatgactaagtttcaggtttttatttagttaaattatatatttttctgttgtcttggaggtctttcagagtagtatgacatttgcccaggtataggaatcagtttaatgagattatggtacaaaagcatttttagacagtggaagacacactaccaatgataggggcagtgacttccccccgactgtcacctggaaagaacctgcagttcttatggacccacataggaacattttctggtaaggtctggataaagaggtttccttttgcaagctgccactcttcagcatgtatttacatttacggcatctttccgtttggatgagcctcactgcaggtgctgactcgccaaggcatggtcagcagctgccatactgcacagcccagggctagaggctgagggtggggggctgacctttgagatgccgtctagactttgcatgtagacagtccatggttacatctagacttgtctacgtaatttgaaaatgctgccttccttgaaggtacacacttaaagtaattggctgtttatgtcttgccagaaattcaaggccccctttccactccatgcacaggaattgacttattatcctatgcctttagtgacaacggctgattgtctctttcttgccattgtctgagcagcagaaccaagaatgggttccagtgagttgattaggagttacagtgtcacaggaaaacaccgaggcccagttctttgcactggctgttggccagattgcctcctgagtggggtccttctaccattgctaaaactgtgtgtaggctggaaccctgcaaatttgacaggactgacttgaaatctctttgcttaacagccccatccgtggctttgctggcatccatccacagccggagctgcaagctatccctcggcttaatctggttaaaaccagataaagaattaggtcagtggccactggctgcaaggcagtctgtttccagaactccagcggaactgcggaatataaataagcagggagagctggcaaagcatgacttggtacttgcatttgacttgttctgggtcagacttctatccctggttctaggtcttaacacaagagctcgcagagggcagtggatcaatgttagcaaccaggggtggtggttgttcagtagctcagtcgtgtctgaccctttgtgaccacacagactgcagtacaccaggctcccttgtctttcaccatctcctggagtttgctcagactcatgtccattgagtcaatgatgccatccaaccacctcaggatgtacttttccgtggtgcctcaggcaggaactgcaggatgctgtttggggtttgaggctctgcctggtagatcgggtcaaacagccagaccttggacaagtttcactgtatttcttttaagtattgaacagaggtccccaacctttttggtaccaaggactgatttcatgggaaacaatttttccaaagaccagggatgggggatggtttggggatgattcaagtgcattacatctattgtgcactttatttctaatctaatgccacctctgatctgacaggaggtactgctttgcagcctggaggttggggactcctgttaaatagagcatctggggtgggggtctcagagcctagcagtcagtgcagcaagcttacccaactaaggcccagccttctctgggattcagagaaaaggcaagtagatggctctggaaggtcagtaggaaggagttgttcagtcactcagtcatgtctgaccctttgtgaccccatggactgcagcgtgctaggctcccctgtcctccttcactatctcccagagtttgctcagagatgcaaacctgtaagtcagaggcttgttcctttttttttttttttttttaatatgagctttatttttttaaatattattttgatgcagaccattttaaaagtttaaattttattgaatttattacaatattgcttctgttcaattttctgtttgtttgttttggccacaaggcacgtgggggtcttagctcccagaccagggattgaacctgcacaccctgccttggaaagtgggttcttaacttctggaatgccagggaagtccccagaggcttgttcttatctccctggattggtgggtctgaggagactgggggagagagaacctcatcagagtttgaccttcccaactgaaaaggctcgtttccataggccttagttactgaccgataggtcttctgtgaagcgcatgttccagagtagcgagatgtctgggctgaagcagtaatgaaactatacacttcagattgggacctgaacccaggctcacctcagtggggacttgagcccaagtcttctaacttctctcctttggaagggactggaattcagccgcgtgtgagatggaacttgaacccacaatcctggcttagaaggggacttgaacccacagtctcccagttgaaacagtctgggacttccctggtggtccagggttgactccatactcccaatgcaggggatctgggtttgatccctgatcagggaactagatttggcaactaagagttgactaaagatcctgcaggctgcaaaataagacccgatgcagccaaataaatactaaaaaaagaaagaaagaaagaaaggaaaccccacgtctgatcacaggccttaacgaaacaggttctttatgtctcagcacagaaggaattcagcaagaggccaagtgataggcaagaagtagatttattattaatggtatagaatgcttgtgaaagacacaaatgggcaggcaggagggctctgccctgagagctaagtgggaaagcaggttcattcaaggagagacaccctccacagacagagtgtgggccatctcagaagtcaagaggccatgaggtgtggggttggttagtttttatgggctgggtaatttcataggctaatgagtggggggagtatcccaactattttggggcaggggcagagatttccaggaatcgggccagtgcctactttaatggttggctgtggaactgtcatggtgctggtgggtgtgtcatttagcatatgctaatatattataatgagcatataatgaggctcaaggtctactggaagttgaatcttttgccatcttgggcctgttaggttctaaccagttcatgttgtatcctaaacaatgatgtcattcttttaaaaaaaataattttatttatttattttggctcttgtgggtcttcgtcactgcaagggctttgctctagttgcggtgaggggagagctagctactcttcattgaggtgtgcgggcttctcattgcagaggcttctcttgttgtggggcacgggctctagggcatgccagcgtcagtagttgtggcacacggactccatgctgcagttcccgggctctagagcacaggcttaatagctgcggcacacggcttagttgttttgaggaatgtgggatcttcccagaacaggaatcaaacctgtgtctcctgcattggcaggaggattctttaccactgagccaccagggaagcccccctatgtcattcatttcaagtttgtgccctgtccccttccctcctgcctccatcaggccaagccttgttggagctgttggagggccctccaaattctggagcctccaaggactgcagcgccagggccccaggcactggctcctccttggcctccactccctaccgccacctcctgcagtgttcatctggtctgtggtttctcctctaacactccgactctctcatctgatctgtgccactcgggccgaggtggaagcagaatgctgatgagtggagcagcagtctaggaacagtggaatacagtcctgtctttgctgctcacacaccatggggtggagggagggtggagagaatgggcttttatagtcccgacgttgggtgcctctcttgggtgggtggccttgactctgtccagaccaagctctgagcttcctctgcttaatctcctctttcctcctttccccgccggccccttgcactgggacccggttgctgggcagcgaggggtgtgtggagagcagggcagggcctgtctgtcctctggatctgagtggcctgccagagccgcttcgggaatgaacgtccctgcattatgctccctttctttctctgtgttccagtttccaccttggtgacagggaagggccatggagtgagctaaatttgggcctaattggtgaagcttaggatactgggagaagcctgggttaaggagtcaaagagacttgggttgaaattttagtttcctacttaacagctgtgaggttgcagctgagttgtttaacttcctagggtctcacttaacacacgtctagaaaaggatccataaatccagctcatcaggttctctaaggaaaacaaggacacatgtggagtgatcaggacagggcctgcctcacagtctagcctcaatgtctattgttatagagatatatgtgaaaaatacttgtcaaatgtcagctgcttgatcagcatagagcaggagaggtgaatgggttattttgttttatttcatctttcttgaatttattctgcttccccaaaatatggagatcaaaatatcttgattatataaacctgccttgttcagaatccacatggaggagaactcacgtggctttttctgataaaatttagtgctgctttccagattcaaagcaggcactcagtcatcagcagaaggtggcctttctgtgagttgtcattttcgtttgagttcagccggcccactgggacgcctgctgtgtgcaaaggactgtgtatggcatggatgaatccagattcttgtaaccacaaagctcacaatctagtagcaaaagagatgttacaacatgtgtgctcagttgcattgaactctttgtaaccccatggactatagcccaccagactcctctgtgtgcagaggactgtgtgcagagaattccatggacagaggagttctctgtccatggaattctccgggcaaggatactagagcggattaccatttccttctcttggagatcttcctgattcagggctcgaacccatgtctcttgtgtctcctgcattggcaggcggattctttactgctgagccacctgggaaacccctatatgacaatattttgacagtaaataactctacagcagttcccataaaggggctgaagaatttcaaaagaagcagcagttcctttgagctggtaagaaaggcaaagacttctcaaggtggtggcatttggctgtgcctggaagttcagttcagttcagttgctcagtcatgtctgactctttgcgaccccatgaacttcagcacgccaggcttccctgtccatcaccaactcccggagtccacccaaacccatgtccattgagttggtgatgccatccaaccatcttatcctctgttgtcccctctcctcctgccctcaatctttcccagcgtcagggtcttttccaatgagtcagctcttcacatcaggtggccaaagtattggagtttcagcttcaacatcactctttccaatgaatacccaggactgatctcctttaggatgagctggttggatctccttgcagtccaagggactctaaagagtcttctccaacaccacagttcaaaagcatcaattctttggcactcagctttctttatagtccaactcccacatctacacatgaccaatggaaaaaccatagccttgactagacagacctttgttgaccaagtaatgtctctgcttttgaatatgctatctaggttgctcataactttccttccaaggagtaagcgtcttttaatttcatggctgcagtcaccatctgcagtgattttggagcccagaaaaataacgtcagccactgtttccccatctatttcccatgaagtgatgggactggatgccgtgatcttcattttctgaatgttgagctttaagccaactttttcactctcctctttcactttcatcaagaggcattttagttctcttcaatttctgccataagggtggtgtcatctgcttatctgaggttattgatatttctcccggcaatcttgcttccagcttgtgcttcttccagcccagcatttctcatgatgttctctgcatggaagttaaataagcaggccttgacgtactccttttcctatttggaaccagtctgttgttccatgtccagttctaactgttgcttcctgacctgcatacagatttctcaagaggcagtcaagtggtctggtgttcccatctctttcagaattttccacagtttattttgatccacacagtcaaaggctttggcataatcgataaagtggaaatagatgtttttctggaactctcttcctttttccatgatccagcagatgttggcaatttgatctctggttcctctgccttttctaaaaccagcttgaacatcaggaagttcatggttcatgtattgctgaagcctggcttggagaattttgagcattactttactagcgtgtgagatgagtgccattgtgcggtagtttgagcattctttggcattgcctttctttgggattggaatgaaaactgaccttttccattcctgtggccactgctgagtttttccaaatttgctggcatattgagtgcagcatttttacagcatcatcctgcaagagggggtaagatttagatgacagtggaatgagggcaggagtgaatgtggtcagaggctgacagggtcaagatggagagctgtgtctgggacggacactgctttttcagtaagtggtacccactggagtcctctgtgagagagatgactccatctgacctttaggaagatagctggttgggaggagactggagtagttagcttctggaagcagagggacctctactggagctgtttaggccaatgaaggctgaggcagtggggacagataatagaggaatcttgtgacagaggcagaaggaccaggactggatgactgatttggatgtgatgcgaaggtgggctggaaggggagtgagcggtagacggccacattgggagtgtcagagggcctgcgctggcttggtggaggctgctgggggggggcgggggtcagactgggctctatccagtggccgggtcagccacccatccatgtggaggcatctggcagaaaggggtcgatggaaacctggacctgaggcttgggctcagggcaccagaggaggcctgggagtcagcggccgggaagtggtgacagcagaggccgggcgttagaggagatcatccaggcaggtagaaaggacaagacccaatacagagccttgggagaggaccgcacaggaagaggccgaggaggaagagcacctgcgcagggagggaggagagtgaggaagtggagccggaggaggcactttagaggcaacgggtctgaacccccgacctcctgctggctggtccaggcaggaaccagacctttctactgccgtacagggggactcatgtccaccctaccccaccaggtgtcctgaagggcgcttagtagatgcttattgcttctttcccgtagagacctggggaggcatgggaagaagtagggaggggggcatatcagcatccgatgctttaggaaaggacactcctgttgggttactcctgagctgaggaggtgggggatggaccttggcacttgccgtggggagcaggtctgagaagctgatggccaggcgttgatgaataaggggatgaggaggaagagagaaggctctgaaaactccctttgaagccacgtggccgagaagggagggtgtggagaaccacgtggcattagaggaagcagggtaaagggaaggacgtcctggcagtgcatcattgaaaccctctgacctctcaggaagagggagctagttcctggcagaactccacttcttggcatctggggttgaagcttttggtgtttattcagagatgccagctgatgcactctggaaggaagaagtctgtcatgtgagccagggaaactgtggttggtcttgtgagcccgttggggccccggccggctttctgaattagatgtcctgtgacccagtcatctcgaaagcctgggaggagagggccgccggctttctggggacttttccaagagaagggagacagtatgaccggtctccttctgaaatgagtgatggagcttcaaggggaagagcaaaggaagtacccagtaggtaggtgagtctaagaaacttggggcctttctcagttccaaagcctagtttcagcaaagtgtgggcagtttatcagctttctctgccttgcatacaagcacagcccgatcccagacattgaccttttctcctctgtcctcggaatctcagaccttggcttctgccacctctcatggcccaccccgtctgcatcttgaagggagtggttttacctttgtcttactcctcagagatgacagtagccaggtggacaggagggtgtgggaggggggtaggtgagggggttgaggtccctccacctgctctgaggaggggaggtggaacggaagtccccaaaggaaggactcccaggaagtcaacccttgagaaggatattgcatggctgcattcttgcctaaagcctggtaatactttgcttttagaaaagttttttttcctcccatgattttaattgtgttttcttagttcctccttcagtttgacctctgttctaatcatctgctcttttgtctttacctcccttcttcccttgcttatcagcaactcctccccaccgccaccccaccccccgccactttcttgtttcaagagacaggatggacagtggctatgcgtgttggccctgcagccagactgcctgagtcagaaatcccagctccttacctactggggtgtacacctgggcaagtacttcatctccctgagcctcagtttcctcatttttcaaatgttatgataatatccatctcattgagacttccctggtagcccagtagctaaagcttttcattcccaatgcagggggccagggttttgatctctggtccaggaactaaatcccagacgctgcaactaagagtttgcgtgccatagctaaagatcctgctgcaaataagagggaaataaataaataaaaatattttagaaaatccatctcttgcatgtcatattatgggaattgactaaataaatacatatagagagcttagagtagtacctgggagtaagtactctgtcagtattatctatctatgtctgtctactctctgtctgactcttttttttgtaaatggcttcaaatccttttctaatttttccaggtgacacagaaggaatatattatgttgaaagagcctacggaagttatatttctagaaatgataaattatatagtgtattttcactgtgctgtgtgcttagtcgttcagtcgtgtctgactctttgcgaccccatggattgtagtccaccaggctcctttgtccatggggatcctcgaggcgagaatactggagtgggttgccgtgcttgcctccaaggatctcccaaacccagggatcgaacccaggtctgctgcattgtaggtggattctttactgtctgagctaccagggaagcccctaaagtacagcaactatcacatggagctccagtgatggagagcccattcccttagaaaagcttcatcctgggtggaaaggtccatctaatttcgctctttctctggcttccactaacgcaaacaagtcttactggaacaaggaataaataaagttattagttcttgttattaggagcaaataaaaatgcacccaactcttaggttgaaaaaagtcagcatagccaaaggaccagacgcagggacgtgtcttttgcatgaactgctgttaataaattttaacgtgtagattttatatcataggccttatttgttacaggtttcaagccttgattcttacattccctgtgttagtcatctctgctacttttgtgacctttgacccccacgcaatacctgatgagaatgatggctaagctcacaaaccaagccctttcctgtgtcactaaaaaccttcctccaggctgacgtcaacagctttgaatgctcttcagtagctggaagactaccctagtctgtgttatccacttcacatttctctgtgaaaagcaagcatgagagaatctgttagaggcttgttaaaatacagatattccctcacccccatatatcacatatctttttcttacttatctacttgcagaatgaaagaaaatgaaatgggagaagcagtcaatatatatatatttaaaatatcttttggaaactccatttcgaatagaaagtagcataagatgatacgaattggtgaaagttgaaaggaaagagatagcagttacagtgttcaaagaattcattttatcaaaaagctatcacttgcaagtaaaagtatttgactacgctgcaccttgtaagttccttgagttagacgtttaatatttgcaatataatgttattatagccacagttgtatggagtcttcttttaatgtggatgttgaagtgggaattcccgtaggaatgtacacagtgtatgatacatgtgggtacttggggcaatatagctcttccatctttctctctctctcattgcaagggaggaggacaagtggggacacagtctcactagcatttgcacagatcactatctgttccctggggctggcacattgcagccccgaataaaatttgggttccagtagcaacaaagaaagacaaaatacagaccctggggtaactgtcacaagcagatgcttgatgtttgcttctccaagacctgttttccccttctctcatcaatctatcaagtttgtcgcaaatttcctttggagaaaaaagttacattctcagttctaagagtggacactgattcaggtcagttcagtcattcagtcgtgtccgactctttgtgaccccatggactgcagcacgccaggcctccctgttcttcaccaattcccagagcttgctcaaactcatgtccactgagtcagtaatgccatccaaccatctcatcctctgttatccccttctcctcctgccttcagtctttcccagcaccaaggtcttttccaatgggttagttctttgcatcaggtggccaaagtataggagtttcaacttcagcatcagtccttccagtgaatattcaggactgattttgacgggtttgacctccttgctgtccaagggactctgaagagtcttctccagcaccacggctcaaacaggacactgattggcttaagctaataaacaaccctgtctagatattagaaccaataagggactatttttaaatatctgtgcatgggacccacctctcagagcaacaaagtcagaatcctttgaaggggtgcttggcttgaaatccagtaacataagccaatcagcatactccatcggctcaaggttgggtacgtaacccaactcaagccgagtcgatgcagcaagttttcattttatgccctctgttctctttgaatttttatttctttgtgattatattaattatatttgtatagttaaaaataaattaatctcttttgaagttgcttctaaaagtataagatgattttaaagtatatgtcatctattgttagagtacatttctttagatgtacaaatctccattttaggaagaagtaagaagtatattttaactgtgccatgtatccacaacctcacaataatacagaataggtgtgaataaaatgttttaattttatgtatgagaaaatgacccctggagcttaaatcggagctcaaggtcaggaccagctcatgggatggagaagctgcaggagagctggctccggactgtggaagccgattgttctttgttctgcttttcgtgtttgacctcagccttcttatctagcagctctaatctgatctggccaacaactagagaggagaaaatcctcaaggattcggctaagtatcttcagttgctctttttcaatcagatgtttttcagtttgacttggttcccagatatcttatgaaattaaatttgcatgatttctttgattatacctctgctaatgtactcattgtttaactttcaggccccggcgacacaatggccacattgcagtacttcagaaattatgaataaacaaagattgtttagaagataagggtgttaacttttgatgtctagtagatttgagtgtcaagtcatttgtgaagaatatttgacttgttattttcaagtcatttgtctgaagaaaattggggcaatttttaaaatgtagaagaacatcataagacttgtttttctcttaatactaagaaataaatgagttagtttctttagttgtgggtaagattttgttcatcatcgtttcttatttgctacatttagattctgttctttgggatcatatgctaaaaaaaaaattcaaatcctctcttaccatcatttattttttcaaaagccaattctttgttaaaactctgcccaggctacttctggttttagaatgttaagttttgcacaaagctttcaggatgctttcatatatggttatccatgactattctgtcaaaagaagaaatgtagatctatgaaatgctgagtttcattctgttaatcttaataggcacttatcacatgcatccatactcagcagattttaaaatgttgcatcgttgtttctcctttgacagtttattagaggaacagacagtaaaatggaatgagtttgtgtaacattgttagtgtttaagaatagcaaaataaccaatatatggacagcaagaaaagaaagattttaaaaatctgaagcctggattatccaatgatgagtgggtgtctgaaaaagagagatttggctacacttagttcaggacagaagttctgaccatcagcccaaggagcaaaagaaaaattagcagacttttcatcgcaaggtaatgaagccacctagtggtttgttagataatttaaggttatgtgaatgtataaagtgtcttgcgaattgattgagtgggtctctatcaagcatgaataggactctgatcacttatcatttagtctggcaaggagggtcagtttcattgagaagaagcacagtgctgctctgtgtaatcttttatatatttataatcttttttaaaatcagaaaggacttgagttgacttacatgaaactacaatgagagagcacaaactagaagagaaaaaaaaataaagatataaaaagtagttaaaaaacttctgttaattcaaaaatgttttcaagattctgtccattttccatgataggactctacgttttcaggaaagcatggaaactgatcagttataaaacttcagtgttcagaacagtgaaataatttttgggaaaagcaaaatcctacctgatgtcaagaacagagaaatgtttcttctaaaggtcctcactgatgaggtactgcctcatgccatgtataatgtcctcagtccttgtaatagaaatcaatcccgaggcttggaatattgtttcgcagctgtgcctgcactgctctggaggagaatgtgcaccaagctctattttcagggcttgcctgaaagcatttgatcctcataataagcctgagaggaaggcaatattattatcccatgctgcaggttaggccagtgacatgctgtcactttatgaacctgcccaaagttaagctcttaatgagtagtggaactggaattcaaaccctctgtgctcttttccaagatgctgtgtgtgctgcatggcacatccagtgaaaatggcaatgctgcactgaatacttagacagtctgtagggccttgggtaggagtgctttaacatggtgctgaggacacggtgaggactgcgcatttctgagctgacccagtttacgttgccctccagtgtcacaggcttcaccctgactccagccaccgcaaactcatgcgtatgcgtgtgcatacatacctttgagcaaaagcagaggaccaggcaagagcactcagagtcaccacttcccgactagtaaaaccagctggaattcatgaacttttaaaaagttttattttattggagtacagttgatgtacagtgttgtgttaatctctgctgtacagcaaagcagttcattcattatgtatatatattctttttcatacttgtttctattatggtttatcacaaaatattgaatatagttccctgtgctatacagtaagaccttgttcatccattctatatataccagtttgcatctgctaagcccaaactcctaatccatcccttcccactcccctccccttggcaaccaccagtctcttctctttgtccacagttccgtttctgtttcatagataggttcatttgtgccgtattttagattccacatacaagtgatacgggagagtatttctctttctgacttatttcacttagtgtggtcatctctgggtccctccatgttgctgcagatggcattatttcattctcttttatggctgagtagtagtctgttgtgtatatgtaccacatcgtctttatccattcctctgtcgatggccaattagtttgtttccatgttttggctattgtgagtagtgctgctgtgaatataggggtgcatgtatctttctgaactatagttttgtgaaattcatgaccttctgatggctttgtaccttcagatacaagatttaaaaagcaatcgtaaccaaatatgctctattttgctagtttttccttcttagagtgatatctataaatgtttgggaatggcagctaaattgatttctcttaaccagtcatgaaagttgattagggatgagcaaggcaagcctggcatcactgaaatgttttcagttacaggagtcaaaataccatataatctgagtctcagattgagcatttagaatgctgtattttaagctgtactttaggataattgtgtgattaatttcttgggaagcagaaaaggtatactctataaaatgaatttttcataaggctcctttaaaacaaatttccatggtggttaaaagaaatccgtagctcagtaaagattctgctgctgctgcagctaagtcacttcagtcatgtccgactctgtgcaatcccatacggtagcccaccaggctgccgagtctctggaattctcaaagcaagaacactggagtgggttgccatttccttctctgcagtaaaattctaacatttctgaaagatttaagttctgtttgaggagctgaagctcaatactttggccacctgatgagcagagctggtttattagaaaagaccctgatgctgggaaagattgacagcagcagaagaaggggatgacagaagatgagatggttggatggcaccaccgactcaatggacatgagtttgagcaagctccaggaggtggtgaaggacagggctgcctggcatccatggggttgcaaagagtcggacacgacagagtgactgaacaacaacaaagatgacctacgacccgtaaggttgaagtattcaaaaagataagcttttcatagctctgctgagcacttgaaaatttgtcctgtcttgggaatacaagtgatagagagcagtgctgaaatacggtaaaggaaacattggctggaaatcaagaaactcggggttcccagctccacagtattctgataacaaaggaagatacaaattctttgggtgtcattttttctcagacacttctgagtcagacctggattcaaataccaattccagtacctattgctgctgctgctgctgctgctaagtcacttcagtcgtgtccaactctgtgcgaccccatagacggcagccacccaggctcccccgtccctgggattctccaggcaagaacactggagtgggttgccatttccttctccaatgcatgaaagtgaaaagtgaaagtgaagtcgctcagttgtgtcctactcttagcaaccccatggactgcagcccaccaggctcctccgtccatgggatttttcaggcaagagtactggagtggggtgccattgccttctctggtacctattagctggatgatattatattagctaggtaaactttctgggtgtcagtttatttatctataaaaagtctttagtaatactgtgtgcatgtattttatatataaaagcatgcaggtattttatatataaaaggttttataccttcaatctttataacatccttaaatggaatattcactgttgttatccctactttataggtgctatcactgtagctgggagattagataatgtgaagaggttaattaggatagtttctgagatgtgttccgtcacctggtacatagctgatatcccagacatggaggtgatgtattcctgctgacttcatctcacccagcttcttttctctttttgggatataccttgaagattagtgaagaggagaactgcatgcattaacaacttaactttgggaattagatagagatttaagccaaagtgtaaaaataaaactgaactttaatttttcctacaggagtggcaaaaactcaattatgatatctacaccctgcgacagattcgaagggaagtgagaagtagatggaaacgcattttagaagatttaggtgagtctaaaagtgattataaaatggcaaaaataaccagttgtggttattcctctttactttctcagcctgttttttataaaaggaatgtcagtaactgactgattaaggctactgtgtactgattgtttttccaatgccgtcctctctgtatccagcataaacatctcatgtttctcttatcatcagcctttgtcttgaggacatattttgccatgtgttaccccatctgtcttcagtatcaagtagcacagggcagtgaaatcatatgggatattcattcaatcaagatcattgaatttgggggcattgtacattgattgatttaaatggagtgattggccaattactcatagctttataagatagagcagattgggagaaatattatttgtaagagagacagaaaatacctgtggtattagagtagctattgggcatcgatttttcttaattctgccagggttgtaattcagtaaatatgaccctcacattataaagcttgttttcatgttcagaaaaaatgaatttatcagttttgaggttctcagtcctcctttgaaagagaacattacaccttggcattataactttgcaaatgtgggtaccaagttgctatcccctgttgcttatattatgctcatattaaatctatgagtcttttagacctttgtacaagtaatttagccagccaacgatattgccctgggggagggaacctgggcttggaggagtctggacctgaagatgaccattttgcaggttgagggggcaagtaggaattctggggacaggggaggaggtgaagagtagggaatgggaggagggtttccaaactgacaaagtgggtggcaggccattagtgggtgagtagcagaggcttaacttggagggaaaagttaacaaagaaaatttgatatgaagaaaccgcaaaagcattttaactaagacctgaccaacctcactgaactgcagggcagcaaaaggagtggtgccttgggcttcagctttctcgtatttgctccaaagccatcgacgggtcccctcaccccttgcaggtctgttgtctccttgtgactgcttcacatgagggtttaatttctttacacaggttttcaaagagaagcagactctttgttgtcagtgacaaaactgagcaccatcagtgattctaaaaacacaaggaaggctcgggaaatactgttgagactggctgaagagaccagtattttcccaaccagttgggagctctcggagagatatctctttgttatggtaagtgtccgtctgcttattttttggtaatttttaaaaattaatttttattagagtagagttgcttttgtccttttggagggtgtctcagatggaaaagaatccgcctgcaatccagaagatttcagagaccagattctatccctgggtttgggaagatcccctggagaagggaatgacaacccactccagtattcttgcctggaaaatcccatgggcagaggagcttggcaggctatagtccatagggttgcacagagtcagacacgactgaagcaacttctctcacacatagctgctttaaaatgttgtgttggtagaacactgagtagagtttcctgagctatacagtaggttcttattggttaacctattttatgaataatatcaatagtgtatatatgtcagtctcagcttgccagttcttcccactcactcccctttccctctcgttggtgtccatacacttactttgtatatttttgtctctgttttgcaaataagaccatctgtaccattttttagattccacatctatgcatgcgtatgtaatatttgtttctctctttctgacttccttccctctgagtgacagtctctgggtccatccacatctctgcaaatgatccagttttgttcccttcatggctgagtaatcttccattgtatagatgtactgcaccttctttatccattcctctgttgatggacatttaggttcctgattttgctttgaatttttgcttctctattagtccataaacttactcatcattctaaccccatggacttcgccgtggcatgaggtgtgggagatggtgctggcctcttatgccctggtgttcagtagccagcccatcataatcacttggaaggctttaaaaattcaggtttctggaatatacttagaccagttgacacttgggttgtagttcaagaatctgtatttttcagccagttttgttgggcagtcagctttttgagccattttggggtcaaagagatgtgagaaatagtgggtatatagcctaagattgagaaatgatttgaaaggactctaagagcgggggaatggttcctggagaatgtaagtgattaaggagtgtctctaaatttgttgagaaaaatttaataagtgttctactcactcattgttatttttagatggatgtgatttttaggtgaatttttgccacagacatgactttgtttccattttgacagcacttttgtttttaattttttggcaggaccgtctcattgcacttgatgctgcggaagagttctttaaaattgccagtcgaacttatcccaagaaggctggggtcccatgtgtggcagatggccagaaagaactgtgctactttccttttccaagtccttaaaggagaagctacgaggcagaatgagaattcttccactggacctcaacagccaaccaaagttgggcaaatgggtgcaaacaagaatgagcaagaagagagctagctaagagaaaaaggattgtgaatcctactaaaacctaagagtttggatagctggtcatcatgaaactatataaatgttgaggttgcattgaaacatcctggtgatcttgcatcggagagttggtcagtgggctgttttatcatgggtgattagattctgttgcccccattttggttttggttgtataatgagctctgaccactgatcctattgggagaatgggatattccagttaataagattactggagccatcattgagcctaaatatggattaccaattattaaataactgttatataatataggctaacaccaaaacactaccaggcatgatgtgaccttccttgattttggagcacctacataaccttggaggtgtttagagcatcaattggagaatatccagaagtttaggtgtaccaaataatagaaatatctaggagtactgctcaggagggagtcctaagtagaatgatcccaagcagaactccatgtaaaaagctctgtcttcagttgtggtacaggcatctcaaattcttaacgttattgagatctggttacctcatttttgcatagtgtccagttctgggccacaagcccctgcctgatattttatcggggatatttgaccttcactgtcttctcttctctttagcctgtttccagcttattgactgagagttacacctgcccaaagtcctctcgtgcatgtttgcaactctgtagccatgctgtattgaagaaagtcatttttgggctttcttccattctgaagatgattttcagaatggagcatttctgtcaataagtttgccacaggttgagcagctcagcttcaaaagttaatagccccttaagcaaggagcttgtcatgaaatcagggttcattgtactgaaaagagcttttcaggtttatcagtagattgctgaaaataatggcaatattattacttttacagattttgcttttctgacttcaagtttaaaagtaacttgtatgtagtctgtgcaggggattgtgacttgaagatttccctaccccaactagctctcttggtagtgaatactttgtttaaaatatttgttagaggagatccatgttatccatttatgagtgcattgcagaccaattaactgacatgtttcaggaaaatttttcgtagttgaataagtaaataaaaagttttatttttaaaaataaataatacatttttattttgttttgtttagttcttaatacctctctcaagttgtttaaaattagcctgcagatattttctctcacttctgtaggctcttgcaagataaacatacagtgagacaaacaaataaaaccaaaaagaaacaataaattaacaaaatacatttgaagatcatactcttttcatctttgtccatggaatttgtgttttgtctttctgccttttttgatgtcaaaatagaggagattgtttgcatctatagagaataaattgtaatgatagtctttatttttggtaatgaataagtaaggttaaaactgtctctatgattataaaaactcatggagttatacaggaaaactttcattgcaaagaattaaaaggtttctatatttacttttcagttgaatgtgtgttatatttctgagaataaagaggaaacagatattctttccttaatccctttaaattaaaggtaaagaggctgagagagatgggctttaggacttctggtcgttctaaagccagtcaaggggccagtctgagctcaagtccattgagaagtacggggcttgagggtgacggaaggaccacttcagaagtcacaaggtgctcttcaggaacaggatccaggggttcatgtgtgtatgcagggcagtttcaggtgatggatggaaaattttatattaatagttatttattttaacatgcaccaaggaagcaagcgggtggggacttccctggtggcttagcgataaagaatctgccttcagtgcaggagacctgggttcg

SEQ ID NO: 183 - DNA, 193736 bp, Hippotragus leucophaeus
  source 1..193736: mol_type = genomic DNA
gggtgtcctggggcgggcttctgggctctgcagcgcgggaggaggcggcggcgacgctggctggcaggcagatgatgctcggggcccgcagccgttgggaggcagcgtgagcccgagagaactcgaagccgccgcggtggcagcagcgccggagcgcagcctcctcccgttcccataatgcacagggaggcggcggcggcagcatcactggccgtctgggtggctgtggcggcgacccggaggaccccgggcacgccgcgcgcgcgccactgctcgcggcgagcccgggagtgatggcgagccccccgccggccgccagctcctgaggcgccccgccccgccctaccccgccccgcccggcgcggcccgccccgcccggccctgccctgccctcctccctgccagcggctgccggggcgcttcctagtcggcgcgggcggccgcccaggagaggtgcggcctccgcacaggcggggggcgtcggcgccccgggtcccgccatggccgcgtccgagctctacacaaaggtaaggcgccccgcgagccgcgcagtggggagggggccgcgccacccgccgcagtcggctgtcaggccaggaaggggccggggcgctggggccccgtgcggccccgcctgcaccatcccctttccgagcctttcaaaatcccggtccctgcccgtgggtcaactgcaggggcgccttcctctttcgggcgttgatggttaaggcggcgggggcagccctgcctcggggtgcctctctggtccctgccacgcttctgggcctggagcagcgcgggtctctaagtggaaagagggcccctatggatttagtagggcgggcctgggtcaggattgctcagctctcagtcttgctttaggaaaaatcctggctggtgggagatgctagatctggtagatctggtagatgctagatctggtcggtctctcccttaggaacacgcgcttaaaataacgtcttgtgttggtatgcggtgccacttgaaccgccagccaacctttctgtgagatttggaatcctgcaaacggtcgccagtcgattttcgcctttagttgccgggtttcagattgcttaccctggggtggaaagcccctggggaagatacgaataaatgcaagctgatttcactgggatggtggatactcatttgtcgctgggaatttgcaatctgcgtgtaatcccttagagccttgttaggctccatgtcttcaccagccgctggggcgagccttctccttctgggtttagttcaagggaagtggcagcctttcctttcttatactgacgccaatattctctggtgctgctgatctctgaatggcatattttggagaacttacccgtcaagacagtgtgtggtgccctttgtgtgtgtagtcatggcattttatactaccactcctgtataggtcagtgtttcgccagctattaattacctctaatgccagttaacagaattgccttaactactcaagtttgcatttgtgtcttgcatttcaagtctacatttatggtcccagaataaatatgacccaagtacacacacacacacagacacacacacagacacacagacacacagacacacacacagacacacacagacacagaccacagacacacacacagacacacagacacacacacacacagacacacacacacagacagagacacacacacacagacagagacacacacacacagacacatagacacacacagacacagacacacagacacacacacacacacacacacacacacacacacacactccggcccctgttcttctagtctgggccttttcacttactgtgtgaccttgggcaaatcacttaatctctctgtactttagtttacacatctgtaaatggagttaatttcacctgccctgcctctcacaaggctgttgtgagtatcaaacttaataacagatgggattgctcttgtaacctgtgaatttctttacaagtataaggtatatttcttcaagcatgaaatgagtttgcatgaaacatttcctgggatctctttgtttccagctgcagatttgaaaactacacaattgaaacttctctaaacctggtcattcttaaggcattgtggattctaacatatgattgaatgcaattggaaattgatctgaatttacttcattaagaaacacttatataaagctaactatgtgccaggtactgttttaagtgctttatacatattaactcatttcttagaggtaagtgctaagaaatatcagtcattttcacaagaagagatagggtctataaatattcctcaattactttgtatagaccccattcttcgctgcctgaggagtccatctttcagctgcctgcctatttgtagcctgcttaacaagactggttggataatacgtttctcttggattttggatctgtattcccatcccccccacacacacccccaaatgattggcaagaaaaaaaatttttaagatcctgggattttttaaattgtaagttttggggctttcatagtagcatcatcacaatcttttaaaattcaccctctagtcattgtaaaaacaaactggtttaggcatcaataaggaagttgagcttaattgtcttctcctaaatatatttgtatctaagaataatctgatcacttggcttgttggcttattctttttgtgagtggaccttagcttaatggcaggcagaactatttattgagctcctcctgaatgccaggtaccctgtggaatgttcaggggttctcacatgaacaagacacagtccttttcctcaaaggactcatagcctgcttcttttatttttggcccaatttgaatctccaagggcataaataacttgctgttgcctcaggagcaggcagacagctggtatgatatttatttgtagatgttagggaacaggttgggacataagaaggtcggaatgattctagagatagaggcttgggtagtgattattagaggaagagggaaatcattagaagtaatagtggataaacacaaggatttttcccttacagagaattatagggaaggaagttctggggtagtctacaaagaaagatgtaatagtgacatgccataattatgatattcaacataaagcagttaaatttgtaaagtgccctttaaaaaaatgtcattcagagcttaaaggcagatttagatgtgtgatacaaatcagctcctattacagtgaaagacaaaagattattcagtttattctttttagctacattgataatagttttgtcacagcaatttagcagggcttcctctttgtgaatttttcaagcagtataaacattttcaaggcaatagcctggttcctaggatacaacatttctggaaactaacattttgattaaaacatgtttgttgttggttaaaataacagctttattgagacaattcacacaccatacaattcaccaatttaaaatgtacagctcagggctttagtataaccccacagttgtgttgatttgcttttagatccacctgacttcttcctgaaagaattacgggtggctgtgacatcttattatatctggttttgaaaatatttgctagtcatgacttgccagtggatatctgaatcatgacatcacttgtaactactttcagcaacttcaaaggattcagcatttgtggaacagggtttattaattagacctgaatggatcaccaacagcaatacaatggcatcccagtcttcctctcatgaggttcccagactccacaggcagcacacaaatgctgcagaataaccaggattacctgaagttcaattaggagtcccatagtttgtcaggatgttgaattttctaacagtacaaaagctatctatacccccaacttgagaagccaagtaaacttccttaggtgaaacacctgttaggccaatagattgtattctgtaatcttcctttcccattatatttcttcatacctaccgaagccacatggactagatattttctgggatagttccaattttgtgttctatgccattgtccctttaaggcatcaatcctggacattctaatatgttggtgttgaaattccatttcgcagactgcctccaacatcttaaagcagaacagaaatcgctgctattgtgccctgatttggggctttgacaagtatattcgcttttctaaagtctcctgtcagtctcctctgtctgtatttcttcctaatgttctttggcctgttaatggttggaaacctctgtagccttttgtttgtccaattcttctcctttactgattgtaatttcacttgacatccagctgacagttctgtctcgatggcctgacttgtacacattttatcttaatatagctatctgtgtgtatgtaagccactcccataatactgttagccccctgagatgctgatcagggttgtttacctcctatagagcctagcataatgtcttccacacagtaggtgctcattaaatatttgttagatgcatgaaagaatattttaacaggagagaaacagaaaataatggcttgggatgattagtccacttgtaggacggaaacagagtataaagaaatggttaaacaagtcagcacattttcaggcatgttgaacagggtgagtaatggagaggagagctgggcaccacggagaccaaggaaactgttggaagaaacagaatggaaagtgatggacatctactagactgaggtataggcagaaggtgtgagagctctctgtgatgaagcagattcaaggtgggaaggagaatagtgtacgttaacaccagtggctctagctttagaaactggcagttaattctcattgtatcatgaagttttgctgactctgtgaaacttgtaagctactcagaaatacttctttaggctgcttgagcaaagcagaatagtcttgatttcctcttgaaatttgttactgtttcttgaagtgtgacagtttgatgtattgcccagtggctaaaaggttaccaaaaagttacaattttaatgagagttgctactgccagataaatagtttatatcttcctggtgctttttgaagtaggggggcattaggatgatctgaatggggttccagggatttaactttagcttccaaaaggttgagatgggatggagggggataacattcctattgagagtgtggaagaggcggcaaaattagtcaggagactctagaggcacatggcccactggaggatggattggctttgttcgtccccactttaggtagtttttaacaaagtatgaggtattatcagaagtataaactcctggctgattttcggaataagacctgaccctaggtgaaataccaagtgggcagccccactccactctgacgggcctatcctctcctgtcccacagtggttttcccagactttctccatttgtctacctgggaggtggtcttcttcccttccctctggctcctacctctgtgtctgtctttcgctaatcaactttatttatgtataatttgtatgtaataaaattcattttaagtgcacagtttgagttttgatatgtactcaccatggtcatgtactcaccatcacaaacaagatatagaacatttctgtcactctcagaagttctcaggctcttgggttcttctcttcccctgcttattcaaagcatttactggaattggctcacctgcaggggcagaggaaagagttttttttttttttttttttcaaaaaatgtatattatagttccaccttggagcccagctgatactgataacaatacagagacccacacttcatcgacagtgggagatgggagtagatggaaaggaacttaggtggtttatttaatctttctttcattcctcacctttgctaatggtgtttgcctttgatgcctcgtttccttaggtcatgagtgtgctaaaatgccctttagtcaattctgccctttaacagttctcttgccccatcgaccttagttgtaatgcctgtctgggtttgtactgatagagatttttaacctttacagaaacttatccctggcttcttcacaccttagatagcctccacttctctttaaagcccttttcagttgaaagtctctttaaccagctttcatttgcattaaatgtctccacagaggccttttgccaattgtagaatttagggataatgtgattatgctttaatttcaaaataatagctgcaaatttgattgaaatcaagggagaagtgcatcatccactcctaagtgttcatgaggaacatttatctgcctcctttggcctgaagtgccactgtgttcataaatgtgagcacagggctggactggagatgggacataaaaaaaacaggttttgtctctctattcactcatacaaaaacatacattgtcttggccaggaatcctgtgtctatggttggggttttaacttgataaatatattctgaaggaacttcagaatgggagaaataaaatgatcagggaagtgaagaagcttgacagaataaaaagacagactctttaaaaagatgaaggtaaactgggaaagtggtgaattatttaatatcaagattagaagtttataacatcaaaccccagtttagtagggatacttgctggagcttgaaataaacagtcatttaaaatgaatttctaatctaaccattgttttagacatgtgagacacattgtctcaggttatgatatcagctaagatgtgttagataatagaaagggtctggttaattcatggatcatagttctgacacatagactttccagatctctctttgacagtttattagccagaactgttttagttggaagtgatggaaacccagctcaaagccaaaagggattttattcgcttagatgtcctaaaagcccaggcatggctagcttcaagactcagacatggtctctgggattctctgtcactggctttcatgtcaaactgctatttgacattggtttcatcctcaggacagttcttttctggatgaaaaaagtggtaagtagcacccgcgaaccacatggtatagctctgggcctggaagaagagagcctggtggaggatttctgattgaccttgcttgtgggcatgtgccctctcctgacactgtgctgaggaggtgatgggggaggaaggcagtgagcagcccagtcttgctcatctcagaggccagagggaggataggacgttgtgattgatagtcccactcagacctcgtggggttgctgaaagctgttccccatcagaaggaatggtgctagagagacaaaacaatatccactatgaatcagtcaccgaaagtgccaaagcgcctgagttctatctcctgttctgatttttgagcagatgaatgggagggtttttgactgggaggatattggctatctttcccctagagaataagttccaattaaaagaaaagccgtggcgaatccataacagcaaatgttgataaagcatatgaagggggataagtaggagtatgagagtaatagatgtatactactatatataaagtagataagtagcaagaatttattgcatagcatggaaactatattcagtatacaacctataatgaaaaataatctggaaaaaatataaaattgaatcactttgctgtactcctgaaactaacataatattgtaaatcaactatacttcagtttttttttaaaaaagcatattagaggtagatgatttaaaaattatcttttattcagtcttaattaaaagtaattttgtgtgagtttatataaatcattttctgcatatgtgtgttttaaacaaacactattgtgttagactaattttaaattaggctagactagttagaacctaatttttcatcttaccatactggagtgattacaataagataatcagctatttctttaaggatacactgtcactttaaaatttttttatagcagtacttaaaacaacttttaaacaagtttgatctctctatgctcaagctgaaaaatattttctagtttgctaagcatcatgctcaggttggaagcagaactactagagatattttccataaaatcaagaaaagtacttcttaataataaatttgggtcaaaacctggattaaactttcatcaatttagaatgtgtattcgttaaaatcttattttgaaggtgggaagttaaacccactagagctaatataacccagccttcctgtttatactcattttgttaattctaacaaacatttctcagcttctgcactattctgttttctgggaacatgtcctgtgtgttgtaggatatttagcagcatctctaacctttatctgccagatccagtagcatcccccacccacagttgtgacaaccaatccatgttgtcggcagacattgcctaatgttccccagggagcaatccctgctcccctgcccctgcttgagaaccgctgccctagatcttgagacttagattagggtaggaaaagtgggaaagagttaaaaataaaaatggagattaattggaaaaacttttaaaatttgactttttagtaatacctcttctgcttatagcaatgttgtattatagataattcagagaatatagaaaagcataaaggaaaattttgtaaaaacaagttataccatccagagattatcatttccaaccatcaatttacttctttaagtcttttatgtatttatattggtatttttatgatttttaagcttaatatatattgagataatttttatattataaatatttctttattcaaaaaatctaaagcaaaaatttttagactctgctgtgcagcctgtagaatcttagttccctaagtagggattgaacccatgtccctacattgggagcttggacttttaaccactgggagtcctataacatattcactaaaaatgtttttcgtggctgcataatattccatcacccaggtgaaccataaattgtttaccataatttattttcactgtgggcttccctggtggttttgttggtaaagaacccacctgccagtataggagacatgagttcaaaccctaggttggaaagattccccagaggggaaaatgccacccactcccatattcttatctgagaaatcccatggatcaatgaacctggcaggctacaatccatgggttgaaaagagtctgacatgacttagtgattaaacactaccaccaccaccaccaattttcactgtaaaaagaaatgtactatgatgaacattgttgtacataaatctttgcttggattagtaagctttagtcaatttcagactctacatctctctggaaagggttggcatttatgatttttcagcgtagggtattgatagttattttattttaaaatagcactttttatatatgttgcttcagggctaggatggccagatgtcccatttctgtgagatggcttctgccatccagtacctttattctgtttggaaaaatcctcttagagtagaatatatgtttattgaaaaaaactaatccttttggaaatctgaactatttactttttctgacaattttccttattgttcttattcactgtttctccttgatcttgggtgaatctgggtcagaaagcataatagaattagaaatattttttaaaagataaaaaaaaaaagccatgaagctgctgtcttaaagtataaacaattacattgtaacttgaaaattacctgaatatatgttatttcattgtaaacaacatatccttctaattagagcaaactactacttgtctggagtggtcagaggatgagtttttcttcagtgagccgtgaagaacctgagagaccttctgcacaacacctgggctttccaggtgactcagtggtaacgaatctgcctgccagtgcaggagacgcaagaggtgcaggtttggcctctcggttgggaagatcccctggagtaggaaatggcaacccactctagtattcttgcctggaaaattccacgaacagaggagcctggagggctacagtccatggggttgcaagaggtcagacaccactgagtgactgagcacacacctattttaaagcaattaggatgggacaaaacacaccagtgataaggacatcactgtaaaatggactcttcaaacatagaaggtgtttcagggtctgtgaggcctgctggtattgcttggtataacagcccactttaaggactggtagccacaaatgtggatggaggtcgattgtgtggaaatttaggtattgaagacataggaaacttgagttgaagccttagcatccttgaaagttctttgctcttcttcctccactaaaacatagaaatttgccttatttagttttcattttctttcttctaaaaactgtgaattgcataaatgcatgattccaaggcagtacagttaacaaatcataatggttaatatttactgaggccttactatggaccagactgttcagaggactttgttacaactgttccttccttggcttccacctctcccagtacctgaaactcaggcagtgcatcatagctgtcaaggcatggactctacacttgaattctggtttgaatcttggattcactattcactatctctgtgaccttaacacttctgtgcctcaatttcatcatttttataatggggataacaatatctacttcatgagatggagaagctctatacagtcagcaaaaacaagaccaggagttgactgtggctcatatcatgaactccttattgccaaattcagacttaaattgaagaaagtagggaaaaccactagaccattctggtatgacctaaaccaaatcccttacgattatacagtggaagtgagaaatagattcaagggactagatctgatagagtgcctgatgaactatggacagaggttcgtgacactgtacaggagacagggatcaagactatccccaagaaaaagaaatgcaaaaaagcaaaatggctgtttgaggaggccttataaatagctgtgaaaagaagagaagcaaaagcaaaggagaaaaggaaagatatacccatttgaatgcagagttccaaagaataccaaggagagataagaaagccttcctcagtggtaagtgcaaagcaatagaggaaaacaatacaatgggaaagactagagatctcttcaagaaaattagagatactcttgagagtctcttagactgcaaggcgatccaaccagtccatcctaaaggaaattagtcctgaatattcatcggaaggactgatgttgaagctgaaactccaatactttggccaccggatgcgaagaactgactcttttgaaaagaccctgatgctgggaaagattgaaggcgggaggagaaggggatgacagaggatgagatggttggatggcatcactgactcaatgggcatgagtttcagtaaactcggggagttggtgatggacagggagtcctggcctgctgcagtccatgggatcgcaaaaagtcagagacgactgagcgactgaactgaactaatggacttaaaaacgttagcggttattattgttgctgttcagttacagctatcattctcttttctgtcatgctgctttgtcttcttcataagctcaggtacctcttatttccctttggagaccggggctcctcggctctgtccttgaccttcccttcctcccactgtggcctgattgtctcctgatgagtcaggaccagccctgtgctgatgatttccaaatctgtttctgacctacttgctctccctataaacaacagacaactgccttatggccatctttagaagcatctcaaacctaaggtatttaaaattgaacttgtcatctcctccctcttcgtgccactgtacgctacttaacttctccattctagttttcttatctttaggatgggataatagtaatgcttacttcatagtgtttttttgaggattaaatgagattgttaatgcagagcacttacaggaatccctggtacatatttaagcaattttgagccactctgactgttgttatttgcattctttatgtggtgaatagcatcaacatctaatccaaaactctaaccccaaacttagaaattatcttgactttctccccccacccccaccattcccatcctactctaactgatcagtttccatttcctggtattatttttacctgttttcatcctttttatttctttcctgaatccccagatagtgtcctaagcaatttttggtattacttcctgtgatctgtttttcattgcgctaccagagtgatctttatgtaatgcacatatctgatcctatcactctgtgtcctgaaattcctcagtgatatccccattgaattttgccttgagaataaatttattgatgtagtgcttcctaaactttggtgtccatctgaatcacttgatctcattcaagttgagattctgatgaagatgggggtggggttgggggtggggccaagacaactaacagcttcccgatgatgccagcgttgctggattgaaggccatgcctccagtagtgaggctgtaatgctcagggctcttcctaacttaccttcaccctgggactgcctcttcgctcgtgtttcccttggggcattcaggtcttcacctgaagtcaggagctttccaggtgccttcttgctgctttggagcattccccttgcctggctttatctactctttgtgctttagttcccccagacccagtctggctaagatgcccctgtgtcctgacacctaccacgctgcattacagttgtctatctccttgtatatttctgagcattgtaaggacaagggagatatcttgttttgattacaatttttattgagatataatttatatacaatgcaattcatctatttaaagcatggaattcagtggttctcacctgttttttgacccagcatctagaccaaggcttggtctagtaacaagcccacaattcaaagaatacattaattaaataacattaaagtaccactggcaatttttctctaaatcttcctctccatacctgtatttttggaattgaacattttagcattcatatcatcttacttattcaccagtaactcttcatgaggctttcctggtggctcaacagtaaagaatccacttgcaatgcaggaaattcagttttgattcctgggctgggaagattcccctgaagaatgatggcaacccactctagtatttttgcctgggaaatcctatggacagaagagcctggcaggctgcagtccatggagtcacaaagagtcagacatgacttagcgattaaacaactattaactactcttactgagcttcttcctcctagcccacactcctctttttggcaccagcaatgggatccacttgatttttctcttggttaagttttgatgcattgttataaatcactgtcccttgttctccagtgcttccagttctgttttcagctcatgctgaaaacaagcagtactgacccaaagcacagatctcaacattctgctttcttgctcaagacccgtgcctggtccccaatccaccccctccctctcaaactgcctactattagaatgaacttattccttagcgtgacattcaagattttttctagctctaatctcttatttggtgttttacaacactggagttcttagtctgtcttagttcttatatgtaccaatcatctgaaatactttttaaaatgtaaatttctgggtcttgcctccagaaattgatacagtgattttgagagtcccgagtatctgtttttcacaagtgtgccaaagggattctgatgcaggtggtctgtggaagccctctctcagaagctgaagcaagcttgctgctagaggctgtgttccagctttccttgactctggattttgttcaccatgtttccctcttgtgtgtacgtgtgtgcgctcagttgctcacttgtgtccgactctgcatgggctgtagcccgccaggctcctctgcccatggaatttttcaggcaggaacactggagcgggtctctgtttcctcctccagggacccttctcgcccgggatggagcctgggtcccttgtctcctgattggcgggaagactgtggactggcgcccgtgggaagcacggggtttcctgcttgccatagcgaagctcagtaagagttagtggactcggttatttgttgagtcgtggtgatgagcttttttaaaaagatgacattactgttgacatattttcagccaattcccccccccatggctatccttaatgttttacttttaatagaatatgtgagaagacctggcacatagtagtgacccagtaaatcactttgctgtttttaaaggcaacgggaaaaactgcttcacttatgttaaaacttaattgagagtcttctgtggtgaaagacgttccattacttttactaataataggtgtgaaatagcataagaaatgacttgcaaaattactttgggagcttatttatttatagtttttaaatttttaattaaaactttttatggaagctttttaaaaaatataacaaaaaaagctgtaaaaataatgaatgttcagtgcagaagctttgaaaattcagaaatacaaaagaaaaaattacatgtaatcccactatccttagatgcttttaatatttgatataagtgtagtggggtttttttttttgtgtgtgtgtgtgtgtgtattttctttagcaaaacaattttgtgcagactattttatagcaagattttttttctctaaagagtatgttttagacattttcctctaccaatactgttttgatctccttagagatcaatcctaaaggaaatcaaccctgaatattcattggaaggactgatgctgaatctgaagctccaacactttggccacctgatgtgaagagccgacttattggaaaaaaccctaatgctgggaaaaattgaaggcaggaggagaaggggatgacagaggatgagatggttggatggcatcactgactcaatagacatgagtttgagcaaactccaggagatggtgaaggacagggaagcctggcgtgctacagtccatggagttgcaaagagcaactgaacaacagcaacaataccaatgcatattcttaaatactgtgttttttaatgcttctgactattatgttgcatgaattagtcatgttattcaaccaatcccctatgataagtacgttcaattttttgacaatttaactaaagagaatcaaaagcctttgtgtgttcctttaaaaagaaaccaattgtagttgtcaatgaatcatctgactataattatagaacatcccatttttctacaataaaaatattggtgcaaaaacttgattatcatatcaatgttaagaagattaatccagttagagcttagaaggactaaaaaaaaaaaatgcaagagtatcaaagcactcaggaataaatccttaaatacaactacatatttggtatattagagtgtgtcagccacaacagcctgctagaaggaaattctccagactagagagttagaaagatcaaggttattgatcagtgtgccaggggaatgaagctgtaggttagctccaacctaagaggacagtgggtctcttccttatccaggattttggaaatcatatagtggaagaaggcaatggcatcccactccagtaattttgcctggaggatcccatgggcaggaaagcctggtagactgcagtgcatggagtcgctaagagtcagacatgactgagtgactcactttctcttttcactttcatgcattggagaaggaaatggcaacccactccagtttcttgcctggagaatcccagggacagaggagcctagtgggctgccatctatggagttgcacagagtcggacatgactgaagcaacttagcagcagcagcatagtgggataagttgtgttgaagtcaacacatttctgtacctgcctattcttgttagtcgaggagactatccttgactaattaaagccatttgaaatttgccaagctcctgcatccatatttaatgatgggacagcctggttgctcagaatatgtgggatttagaaataaaaagttgacttaggctaaaggaaaaagagttatatagcagagacagttatttaaaacaaacaaatcacatttactaagtaacttgggaaataatctctgagacacgagatcttgaaaagtctgaaaaggagtcttttgttaatgtatttcaaatagacccccttggtttacaaatactttcttataatttgcttccaactgaaatatgttgggaaactgggcaagggttcttaggggccagcttcttcagaagacattaagtccctttggggcagaagtggtacttctttgggtcctctagttttctgagttggtgtcaagaacaaagccttatcctcaagaaagttggaatactctgtggaccatgcaaagttgcctccttggttattgcccagtggagtcttccaggtccagtttgtcccttggagccagggctcccactatggtgtgtttaataaagtgaaagtaaaagtcactcagtcatgtccaactctttgcaaccccataggctatacagtccatggaattctccaggccagaatactggagtgggtagcctatttcttctccagtggatcttcccgacccagggattgaaccggggtttcctgcattgcaggcagattctttaccagctgagctatcagggaagccccatgtttaataaggatgtgcacaaaacacgcagagtgcaatttaactggttaaagtaaggattggggtgtgtcatctgagtttatgaaaacctacatggtggggtcatttagaaaaacagtaccagtttaaaaaatctgtaagagtccactgtaatctatatcattctgtatattaaacctagattcttaaaataatgtttttcttaaggttaagtatctcccatattcttatttgggctgcatatctgttggttatttttcaggattttctaaggtaactattataggctggtgaaatttaataaatctgaatgggtagaggccgaattaattgttataaaatatatatggataaaatagtgccactacacatgattctagctcgcaaatttcttcttttgggtggcaattaagattttgtaagtctgaaattatatagtttgattttattcagaatgtgatcagtgtatagacacaaagtcacagtcagagcaccagaactacctctgtgcatgcttttcactttagtcaatttaattccttaagtagccagttgtcctttggttttcattcttcactgtcacagcgcagtgacatcagatgcagctggagcttaaagaagaagggtcgtgttaattaattccagtgaaacaaaaactgcctcaaataattaatagaatatagtctcattaaagactttagaactttttttccccaaggactagagaaggagaatggcacagattgttcacttgagaccattttaagctgttgatgcatcttacagttctcatctagtggttctgatttcaacatgaatcattcaggccatgtagttattttctcttgaggctctctctttgccttcagtgacagttttcaagaaagaagttcatgaacttaggctttgtcacaatctaaaaatggcctctattttattgttttatttatagctgtcatattttagtttaaatacacttgacctagcaagcaaacatttgtgtgtacaagtaggctggcaaataccgggtcaggttgcctgctgggttattggagggaagaagaggctatgtatattcccatcattgtttctgtcagctgatcttgctattataaggttttttttttttttttttatcttccaaatagttaaggaaaatgggattattggactgagaaagccagagttagggaaaactgggttgattaataagtaggaagatctttttcccatgtgattaattatctttgttttccaactcaatgttttataatcagtaaaagcttgcattctgtgacctatcctttgaggacactgcctttgagcaaactagaaagtttaatctacttttagttttaataatagttaaaagggggcttccacggtggctcagaggataaagcatctgcctgcagtgtgggagacctgggtttgatccccaggttgggaagatcccctggagaaggaaatggcaacccactccagtactctcccctgcaaaattccacagatggaggagcctggtaggctatggtaggattgcagtgatcctacatgactgaacaacttcacttctcaatagttaaaaggggaataagaggaaattaacacataacatgtagtttacagattttttctttaacagataaaaaaggtctacgttttgttgtgttgttgaaaacatgttcaaaagagaatggacttatagatgcacaggggaagaagagggtaggacaaatagagaaacttgcattgacatatatattctttgctcttgttcagttattaagttgtgtctgactctttgtgatcccgtgcactgtagcacaccaggctttacactatcatgtgtaagatagatcgctagtggaaagctactatataacacagggagctcagcctagcgctctatgacaacctggagggatgggatgagagaagggagggaggcttcagaaggaggggatatatgtataattatgactgattcacattgtatgacagaaaccaacacaacagtgtaaagcaattatcctccaatttaaaaaatttttttaagattttatgtatgttccagagctgcatttttggtagcataataatgaagatataaagaaaaatacatgtaaacatatatacatatcataaaaatgtattttaaaaaaggctgaaaaagatggtttgagactgggagatttgggtatgattgcccacatatgtgttaccatgtgtggggcagacagtgttatgtctgggaagggaaccacctcagtaactcaaggaaccaatgacttgcttacaagtaatattggcccttgtgctgtagagatggtacactcagagtaaatgacacagaggaggggtcagaacaaacagggctaacagaggtatacagctctgtttccacttttgtttgtatgctgtattgggatgtcttgttttgtttgttgctttgttaggttagttgtaatttttatctaagcttctcgaattatttgtctaggttttggaaaggtgtgatatgattgaaacagctctgccactttaggatttgtgtgaatcagatacactatgaaaagtagagaaaagactatttaagtatgtaaacaagagttaagctttataaagctggatgcattgaataacaaatacataaaacgaatgggaaatactgagaacaaataaggtaacagtaacgtgatgtgtttaacagtatggtgtccagtattaggttgagtttctcccagtgtgactgtaggcaaatagtgaaggtactcacgcatagggcagctcagaggctttatatataagtatggatgtaaagccttggcccagcacttgttgcatcatgttgttgttgcccagttgtgtccaacattttgggaccccatggactgcaggacgccaggcctccctgtccctcaccatctcccgaagtttgggcttccctgctggctcagatggtgcatcataatggagtccataatgttaactcttcagctgattttattggcttatgtattttaaatgatttgtaaaaattcatttccttaaaagagaaatcataactctagatagttctctacttaccatattcttaaagcttctcaatggtttcaggcatgagttatatacactagtataattctcccttcattctagatggtgtttgactagaaatactctttcagttatgtctacaattcaacattgtcagcatctgacatagctgtagctttcatcgcagcccctttattaatgtttccttcatcagcattctcaacctttttttttctgccagaaaaaggaacttattctaaaccggggctcttgcaggtcctgcccccagctgaaattaaccaatataactcacactttatgagttatatagatacgtgtcataagcttaaatctcaaaataataatggttaaatttcagaaactagacccaactctatttttcttgccagtgtaaaggattgaaaggcagatattcctttttctaactttcgttatagttagagctagctgtgtggttcagttttggtcaatgtgatataacaagaaatcttctagagggcctctatggggtgggactgggtggaagttgcttttcagataaaaggtacagaagcagaaaaatggtttggctgcatatcttctttctttcattcgtaagtgtggaatatgatgtacgggattgtggcagcaaaattgcagtcgtgagataataaggtggagaatggaaagttaacaagcggaagtggtagagcagaaagataaagagtctgggttctcagtgatatttctgagctctcagaagaactttgaggtagccttccctggacttcttgttcatatattattaaagtcctagtagtttaagctatttagtcagacttttctgttccttgcagctgaaagtattcctaacttaaacaagatatagcaactttaatgtgaataaaattaatataaatttgtgaatttttttcaatttgtacagtgatatttatgcacaaataacatgggaatatgaaagaatccatgaactgaagggtgaattctagtcacgcttttgtcacgcttttgacgttgcaaaatatgagcagtaatgtgaaataaattagccgtagtcataatttataggtattctggccgctttgtgagcctttcccatattacctatgactctgtgaagtcttgctttccttgggcttcgtgacgtgaacatgacagacgcacagactgaaggttcgataagggaagagctgggcatgcgagagcatgaatgggtggaagacgccaggtggaagatgaatgtgtacggaccacaccagccctccagtcttccagccacggttgtccccaggtggtcgtggagttccatgtcctgaattccagtgggggaggaagagaacaagatatttaaaaagcaaagaagcaacagcagcagccactgaaggcctggaagaattcctggcagatactaaaagctccttcaactttgaggttcatttccacttggtctctcaatccttatgtgaagtttatggtgacaccataccaaccatgtgcttaatttgatcctttcagattttctaatggtgttaagatgtttggtaagtttgtccatttggtatgaaactttagaggtaggcaaggaaaggagtacaggtgggaaaatatagagaactcttaaggagaagagtagttagaaaattaagaaaatttgaccgtatcatgagatgaacatgggtggtagcatttttcactgaggaactgctctcacttaaaatttgtcctttgctgagactcccaaggaaatgcctcttttgagcatcttttaaaagttaatcataaaggaagactagttttttgtgtgtgtaattaaagaaaaaaaccaaaatattttttgccagtggcacaaagaaagaattatactttaaatggaggctggcacttgcaaactcctatacatgttcatttgttggtcatcaagcttgacagcctctctgttctctcactgtatgtttgggtcttgactggccttactgatcatgcgtttctgtagatgcagccttgtttctggtacagagtgagtgagtgatagttgctcagtctttccaactctttgtggccccatggactttagcctgccccaggctcctctgtctgtggaattctccaggcaagaatactggagtgggtttgtaaaagcactcactgtgggcagatgctgaagggctgcaactgcagcactgttagatttagatcttatgtatgagtgatacagtgtgatcacaggctccactttccatttcctcctcactctgttcttaacagactcttaagtgcttttgatcttattggagtctgtttgtcttgtgaattttttaaaattcactttttgtttacatatatggatactttcttgactgctattaaaaaggtaattaacatttcataatgatatagatggatgtccaggatgtattaagtaacaaaaaccaaattgtagtctgtatatatgtgtgtgcacatatgcctgtgttctggaagaatttgtactaacctctttaaattattgaaaacagttatttctagaggtatgattatgggagacctttgctttttaatttatctatttctataatatttggatttttaaaatcagcatacttttttgtaatcagaaaaaaataaatattttctgtctctaagtagtggaaatgaagatgtttcatagaaactcttttcaagttaaggaaagtttcttgacagtgtatacatgcgtatatattaatatacatattaaaataatttataatatatctgacatgtttgatgctttcagaactgagaagtctcactccttatactttttaagccttggaatgagcatcttggattaggcatgaactaagaacattttttagggaatagggggaaaagaggaaggctgcctgttcagtgtgacttgaagaattctgagagatgctacagataaaggaaaatccataaagatctcccacagctcaacaacaaacaatctgattttaaaatggccatatgacttgaatagacatttctccagatgtacaaatggctagtaagcccatgaaaagaggttcaatgtcattaatcgttggggaaatacaaatcaaaaccacagtgagatactgcctcacacttgccgggatgcctactctcaaaaaacgaaaaataaaagaacaagtgttggagacgatgtgaagaaactagaacgcttgtacactgttggtgaggatataaaatagtgtgtccactgtggcaggctgtaagacagttgctcaaaaaattagcatagaattgccatccaatccagcaattctgcttatgggtttatacccaaagaattgaaagcagggtctaacagagatatttgtacacctatgtccaaccaccaccaccatattcctggcagcattattcatgatatccaaaatgtgacactccaggtgtccagcaacagatagttgtgtgtatatatataaacacagacacacacaacagaacatcattcagccttaaaaaggaaagaaattctgacacaagttataatgcagatgaaccttgggggtattagaccaaaaataaataaatcagttacaaagtgataaatactatatgattccacttagatgaggtatgaggagtcaaattaatagagacaaagtaaaatggtggttgacagccctgagggaaaggaggaatggagagttactgtttaataggcacagaatttcagttttggaagatgaaaaagttgtgtgaatggatggtagtgatgctatcactgcaatgtgaatgcgcataaccctaccgaactgtgtgcttttaaatggtgaagatggtacattttacattatgtgtgctttaccacacctaaaaataataatagtagtaaataaaactctttaatgctttagaagctattcttttcctactgttcatggggttctcaaggcaagaatactgaagtggcttgccattcccttctccagtggaccacaatctgtcagacctctccaccatgacccgcccatcctgggttgccccacaggcatggcttgggttcattgagttagacaaggctgtggtcctagtgtgattagattgactagttttctgtcagtatggtttcagtgtgtctgccctctgatgccctcttgcaacacttaccatcttctttgggtttctcttaccttggcgtggggtatctcttcacggctgctccagcaaagcacagccgctgttccttaccttggacgaggggtatctccttaccgccgccattcctgacctttaacgtgggatagctcctctaggccctcctgtgcctgcacagccaccgctcctgaactgaactgaactgaataatattcttagatattctctttgcaagttgttcttttatgagcataagtatttatgatgtcttattgtgagcaagtatcagtcctttcttgagtgataatgagacaggtagtgggaggacatattgggatggagctagggttgaaggtaaaagggcaaaagtgaaagtgaaagtgttaattgctcagttgtgtccaactttttcagttcagttcagtcgctcagtcgtgtctggctctttgcgaccccatggattgcagcacgtcaggcctccctgtcaatcaccaactcccggagttcactcaaactcatgtccattgagtgggtgatgccatccaaccatctcatcctctgtcattcccttctcccactttcaatctttcccagcatcagggtcttttccattcagtcagttcttcacatcaggtggccaaagtattggagtttcagcttcaacatctgtccttccaatgaatattcaggatggatttcctgtaggatggactctcaagagtcttctccaacaccacagttcaaaagcatcaattctttagcactcacctttctttatagtccaactctcacatccatacatgaccacaggaaaaaccatagccttgactagacggacctttgttggcaaagtaatgtctctgtttttgaatatgctgtctaggttggtcataactttccttccaaggagtaagcgtctttttcatggctgcagtcaccatctgcagtgattttggagcccccaaaaataaagtctgctactgtttccactgtttctccatctatttgccatgaagtgatgggaccagatgccatgatcttagttttctgaatgttgagttttaagccaactttttcactcactttcatcaacaggctctttagttcctcttcactttctgccataagggtggtgtcatctgcatatctgaggttattgatatttccaactttttgcaaccccattaactgtagcccaccaggctcctctgtccatgagatttcccaggcaagaatactggaatgggttgctgtttccttctcctggagatctttccaacccagggatcaaacccaggtcttctgcattgcaggcatattctttaccatctgagctaccagggaaacccaaaaagggcaaaggaaggaagaaatactttgagccactaaaaataatttaagttgcattacaattttgccttcacctgtcctagccccacaaagccttgatacaacagtatcaaggagatacaatagtatctccggtgtaagtaagaatctaaagtggtattttatctttgatatgctttatagaattttagactgcattcctggaccagcaagtcatttatagagattcatcaaatatttactcatgtttttccattagaagttaaagcagtttatttttttagatagtaatcttggtattgggctgatttttctttattagatatatgctttgacattgaatttttcagccttcctccttttgtaatgtataatttgaaggcttaaatttccctcaaagcacaactttggtgatagtcttctgtttgtttgtttgtttgttttttggttgaatttttattatcattcagttttaaatagttgtatttaccttgagagtttctctctgacccttggatatttagaaatttattgttttatttccaaaaatgtggaaattttctagttatcttctgctattgatttgtagcatagttccactgttgaccgtgaacatatcctgatatctgtgtaagtgctttgaaatttgttgagacttgccatcctaacccccaattccatctgccaccagctgcttttaaggcttttgtttggttttggttatcagcagttgtactatgatcatatccacatatggtatccatatatatgattttcttttcattttttctactatgggttgttaaagctttttcgtatggcgtagtgtttttaatcagttttggaaaatgtttggctggtgtctcttcaactagttctgccctatattctctgtccttctagaactcagctgcatataagttagactgtttcacttcattccttatgtctctgatcttttatctattactttatcttttctatttttggtttaatatgattattttatactgacctatcttttaactcacaaatcctctcttctgctgtgtctaatccacctactgaattcttgattttagttatatttttcagttctaaagcttccacatgtcttttttttttttttttaagagtacaattgctttgcaatgttgtgttagttgctgctgtacagcaaagtgagtcagttatacatatgcatatatccactcctttttaggtttccttcccatttaggtcaccacagatcactgagtagagttccctgtgctatacagtaggttcttgttagttatctattttatacatagaaattatacaggttctacttgccttttaaaaactattcaagctctctggtaaaattgccagctatttgtattttttaaatgtattaatcatttattgaggtataattgacagatagcatttggtactttcaggtatacaacatgatttgatatttgtatgtattgcagaatgatcaccacaataagtctagttaacatccatcaccatacatagttaaaatttttttttcttgtgatgaagacttttaagatttcttagcaactttcacatatgcagtatagtattaactctagtcaccatgctatacattacatcccatggctgatttattttataactggaagtttgtactgtttgacccccttcatctattttgccacttcctacccctctgcctgtggtagctgccagtctgttctctatctgtgagcttggttttcaatcatagttttttgaaaaaagtgtgtgcttgatcactccaatatctgagtcacctgtgtcttctttcttggattttggtcatttagtccttttttctgtcatgcctgctaatttttttattgaatggagcacattctatatgaaaaattatagaggctctggatggcaacttccagaaatgattcaattttcttccggcagccagactgatagccttgcccacttagagactgagttgtttcactgtgtttcaggctttgtaagggcagtcagtttccaggggccatatcttatataggatgttttaaggatctcagctgttgataaaagctggaatgtattcacagacctttatttctaaacctgagctctaatttttgtttcttcacctcttgagttgccagaatttctccttagctgttgagcttaatggttgctttctgcttggtttttcagccactatcccttcacaactctagcttgtgtgcttagttgcttagtcctgtccttgtagaaactgacaaaatactacaaagggaaatcatgagcaattgacaccatttgtttttttctaagatcctgcccctgccccccccccccgcccccagtcttggagttcaaggctgattcaaggtccagctagtttttgtcttgttagaccagtgagactattaagttctaggctaatcctctctgctcagcttccataccccataaagtgaatgggcaaatgacctgagggtaaaaagtagtagtaactgtaggactcacctcagtctatttcccttctttatcagaaatttgcccttaatatcatgattttttggtttctcccaacacttttaatcagctgttttattttcatttgcttttgcattttatccatctttattaattgttctcattgagaatactagtctgatataagttatcatatctagaaccaaaagtcctttgttaagctattttataagtgtatattctaaatacttttgttatggatatgaggaattactcagatggtttgataaaaaaatgttttgagtcattttaaagaaactttctggtaggtaaagtcacagtttatgaaaattttgttttgggtatcttatcaatcattcgaaagatgtatataacccagcatatgtgcatgtgggtgtgaagtaaatcctaaaatagctttctacttttagagacagattagtttttcctaatatttttagaatcttcacatttttgttcattgtatagtgtacaaagtgaagacctaattttgactggtattgacttatgatctatttatgaaaaggttgtttgtatatatatatatatttataaaaaccttatatttatttatttattttgggttgcactgggcctttgttgctatgcatgggctttttctagttgcagcgagcgggggctgctctcattgtggtgtgcaggtttctcattgcgggggcttctcttcttgtggagcaagactccagggcatgagagcttcagcagccgcagcaggtaggatcagaagttaatggtgccagggcttagttgctccatggcatgtggagtttacctggaccagagattaaacctgtgtcccctgctttggcaggtggatttttatctactgcgccaccagggaagtcctatattttttaataatgtttcttagagataaatttggatgatttgtttaaatttttaaaataatcaaaccttagctatacatactacatacatactaattttataattaaaatttctccatactaataattacttctgtcaagcaagtttatttttctattatattagttataactttttctaaaatccattatgaaaaatagggtgtaatttattttttatttggaaaagacagaagaccctggtgaagaattttttaaaaaaattaaaaactacccttcaaagacaaccaatgctaatttttgaatatagtctctgttgtagatactgtgctgtcctgcctagatctgtctttgagaacttcccaacccttgtggctcagctggtaaagaatctgcctgcaatgcaggagacctgggttcaatccctgggttgcaaagatcccctggagaagggaacagctgcccattccagtattgtggcctggagaattccatggactgtatagtccatggggtcacaaagagtcagacacaactgactgactttcactttatatgacttcagttccctcttcccagctgctgtgaggtgcctgggaattttctcagcgtaggagagacattttgcccaaggtcatactcttctaaggcagcctatatctgaagactggttgatgcaggcgttgcctacgttgcaggtcaacttctcctctgtccagtgcttccttcccttcctcctatagcaataggtccaggagcgctccccaaaaactacctgcacactagactccatctcacactgtgcttcctagggaacacaaactctaacagtccctttctagctgttttcattcagtttttaaatatatataatatatattttatatatttatatatattatatatattatttcaaatatgtatgtatacacacacatcatctgtatttctgtgcagttttttcccctatttatgacatgagcatttcccttgttatttaagttaatttttcagattattgtatgaattggacatagtttatttaacctttgctctattgctagcatttgggttatttccataggttgggtattataaataatgctgttatgaatatttgtaaaatacatttttatatgtgttttagaatattttatagaattgattcctaaagatagttactgaatattttaagacactgtgtatataatgctaaactgctttccagaaagactgtaccagcttatacttccatcagtagtatgttaattactgtcaccaagtgtcccatttgtataagtattctctcccttctaaagagaggctattgaatataatttaagcttttctgagtgatggggcaacgagatatcataatagaggtaacaagtaatgcagtggtacaatgaagctctcatagtctactaagctaatatacaggatattttcccattttagggggcctgccgtcttgattatgaggccataaaatctcactttttactattttctaattccctgaatttttccagcttctcttcctttgcagtgcatactcttttgagcatcttcctggattgtgacggaccttctttaatcctcaaccagtttgcttaacttgacatcctttttcaccttagccaccaggggtgactagactagaagtggcaacttcttctatgttgacccttccatatccatttcctgggactttctcagaggagggagtctcaccccctgtggtgagacctgtagactggacactcaggatgcgtgttgggcatctttcaccagtcatgggacccagaaagcagtggttgcagatacacacaaaggggcagagatgagaaacttgagaaggactggttagctgtccaagtcctgtttccagttctgtctaaagcactcttcctactgttaaggcttcatgaagagccctgtatccttaaaatcctccttacctgcctaaattaactcagtcctattaggacagcattacttttccgtctttaaactgacatgaacttggaacagataaaattataaaataaaactagaggaagagtctttgaatgaaaacttgagcaattctccttcaagtaaagcttaataaagcctcagtcttttcttttgaatactcagagccatttatgccttttattcttagtagtattctgtttttttaaaaacagtattctggatagttgaattttagccactttgtaagtcaatttaattttttaaatactttaggccaagatatatttttcattgctctcaggagtgactcatcactggctaacattgggttttctaaatagcatgaggaagacttattatttattggacattgttgagaactatgtaattgtcaacctttaacatttatttaaaagtctctacagtagttggttttcttggtattgaagtgctcaggtagataaattcagcagactcattaatatttgcccaggacttggcatttagataacatattacaagacatacattctacctcttgtttaatcagaataacttgtattttgataacaggtatctggagggaactctaactaaatactggagtgtatttgttacccactgctaagtgttgatcataggctttatggagttgatatgcttttccattggaaggacagatctgtgggttttagtacagggtcaacctagacagcatattaaaaagcagagacattactttgtcaacaaaggtccatctagtcaaagttttggtttttccagtagtcatgtatgatgtgacagttggactataaaacaagctgagcactgaagaactgatgcttttgaactgtggtgttggagaagactcttgagaatcccttggacagcaaggatatccaaccagtccatcctaaaagaaatcagtcctgaatattcattggaaggactgatgttgaagctgaaactccaataccttggccacctgatgcaaagaatttatttgaaaagaccctgatgctggaaatgattgatcgtggtagcagaaggggatgacagaggataagatggttggatggcatcaccgactcaatggacatgagtttgggtaagctctgggagttggtgatggacagggaagcctggcatgctgcagtccatggggtcacaaagagttggacatggctgagcgactgaagtgaagtgaaggagaccctttgcccctgttccatctgtaagtatttttctggtttccagtccagagatttcatcttatgtttcagtcatattggcagttgcataatgtgtaggtggattggtggaaagccatccacaccagtagggaatgttttattgatgatgagtcattgatgatgagtcaaaaatgctctttgtttggaaaccaaggatggcactgctcagtgactaacacctgtttgcttcatataaaagaggaaaaatgtgtgagtctgtattcctggtttgggctggtcctccctgcatcattcttcttcatccattatgggttgagctgtcatagtgtagggctgttagagcaaggggccaggccgtgaagcttgttacactgatagttcatccttgggcttttagttgttttttttcacccttatattattattaaaatcagattgctttgtttcagagtaaaaaagtaaatactcttattcatatttccccctacctcctatatacccgcctaagtaaaccaaaattcagtggtgtctgtggagactgtgtagctgtgagtcagaatgctcagaatgtctggcgtttagaactcgttaccaaggtgatagatgctctgagtctagtgttttcctgagtaccgtattatgtgagtaacatgttttagtgctaaagagcacatttttaaaatggaagcattttccagtctttgttattatgctttgggaaagagtggcttcatgtctattttatggctcagcaattaatgactcaaaatataatacacctgatttgcaaaactataaattaagatcatttgtcagccacttaatctgtagctatagttaagttgctcttaaacttttgctttgatacatagtttgccttggacaaaagactactttttctgtcccttccccccagaaagagacatgttaactgattcttgaataccagggttcacagtctgttcacgtggtctgggacaaccacactccttgaaaagtggtagcagcccaagggttctacaagcttcagttcttatccccacaagcccatatagctctgttgattcacagcctaagcactgcttctgagtttcctcctatgattaaaaacaaacaaggcatttcataatggaaaaatctaacacatgctctaaagtaggaaaaaaccaccaagttcccatgtacccactctccatcttcaacaataggaactctatccccactcacttctgctcttccatattatttcatagaaaatcacagacctactgtcatttcaccccaaatgtttcagtatatgcagaaaggaattatattaggcatggctgttatccattgaaagacttgcttacaagtttgacccttggttagcatctgggaacgtggatttcaggagggttctcattgtcttaactcacagtgatgcactgtgcctaagctttgtgtacaaacagtatcagttttgctcaacacttgctttccttctgggagtctggaatcttggtatgtgctggagagagtgggcctctataatcaacctccagtgaaactgtgggtaggcaatattgtacaagtcgttgctggggggaattaagcacattctctgtgactgcactgggagaagactcttggaagctcaaacttggtttcctgtagacgtcaccccatgtatcttttccttttgctgattttgtttggtattctgttgtaataaatcttagctatgagtacggtgtatactgacccttatgaactgtcctagggtatcactgaatctggagatctcttaacacagcagcactaacacaagcacttaaaaaatatggatatacatgtgataaacatataatctttacaatatctttatatattaatataaataaatatattaatataatatctttatatattaatataactaaattatatctttataatttatttatgaaatattcataacttttaatgacatcaaatgtgaaattaatatttgcacttcctgttgtatcataaactgaatcaaggttctgacactacacttggttggtattactttcagttcagttcaattgctcagtcgtgtctgactctttgagaccccatgaattgcagcacacaaggcttccctgtccatcactaactcccggagttcactcaaactcacgtccattgagtctctcatcctctgtcatccccttctcctcctacctccaatccctcccagcatcagaatcttttccaatgagtcaactcttcgcatcaggtggccaaagtactggagtttcagctttagcatcagtccttccaatgaacacccaggagtgatctcctttagaatggactgattggatctccttgcagtccaagtgactctcaagagtcttctccaacaccacagttcaaaagcatcaattctccgttgctgctttcttcacagtccaactcttacatccatacatgaccactggaaaaaccatagccttgactagacggacctttgttggcaaagtaatgtctctgcttttgaatatcctatctaggttggtcataactttccttccaaggagtaagcgtctttttatttcatggctgcaatcaccatctacaatcattttggagcccccccaaaataaagtcagccactgtttccactgtttccccatctatttgccatgaagtgaagggaccagatgccatgatcttagttttctgaatgttgagctttaagccaacttttccactctcctcttttactttcatcaagaggctctttagttcctcttcactttctgccataagggtggtgtcatctgcatagctgaggttattgatatttctcccggcaatcttgattccagcttgtgtttcttccagcccagcgtttctcatgatgtactctgcatagaagttaaataagcagggtaacaatatacagctttgacatgctccttttcccatttggaaccagtctgttgttccatgtccagttctaactgttgcttcctgacctgcatacaggtttctcaagaggcaagtcaggtggtctgctattcccatctccttcagaattttccacagtttattgtgatccacatagtcaaaggctttggcatagtcaataaagcagaaatagatgtttttctggaactcttttgctttttccatgatccagcggatgttggcaatttgatctctggttcctctgccttttctaaaaccagcttgaacatctggaagttcatggttcacatattgctgaagcctggcttggagaattttgaacattactagtgtgtgagatgagtacaattgtgtggtagtttgagcattctttggcattgcctttctttgggattggaatgaaaactgaccttttccagtcatgtggccactgctgagttttccgaatttgctggcatattgagtgcagcactttcacagcatcatctttgaggatttgaaatagctcaactggtataccatcacctccactagctttgtttgtagtgatgctttctaagtcttaatctacacgttccctttctttccttctctttttcctttttctcttttttaaatttcaaggaaatttatttgttgaagaaactgggtcatttgtcctgtagactcctacaatcagtttcttctgattattgtattgccatagtgtagtttaccgtgttcctctttaagttggtaattggatctagaggctttttgtgtgtttttgaaagcccatgccttcatatgtcttgaggctatgccttaatttctatttgattaatgtctgccaaccactttgaggttcttggattaaaggggttttaacagtaaatatctttgttttcattagcatgagactatatcttctgacacttggatcctgactcattgctctttacagaatccaatcgaaagtgcatgtcgcagtgttcactgcttgtcttagggtactagccgtggcagagttccctgggctaaagctggctttagttatttagggttggtatagtgccatggggaacagatattatgatgtaagtggaaatgtagttttttcttaaagtctatcttactattcttgaagaccctaaaatttaaaatagaaagtgtcagaagccgactaaaatctgtaaacccagcattaaatttgctatttgacagaatcctttagtatctcagtaacaaagttctaattaacattactaagttgttcttacttcaactcagtaggtaggaatagtcggacaacaggatctaatgtaggtttcataggccaactttagcgatgtatttttttttgaaatgaccatgtattagggcatttaataaacatttaaaatacagatgtacactttaatttaaaaatttttaacaatacacacaaagattcccattttaaccatttgtacatatatagttcagtggtattaagtatattcgtattgtgcaactatctttagaacacttttcatcttgcaaaattggatctctgtacacattaaacaagagctcccacttctcctccctccagccccatggcaaccacttttctacttactatctatgaatttggctactctagatgtctcatataagtggaattatacatataagtgaaatatatttctggttttttgtgactgacttatttcacttagcataatatcctcggccatccttacggtagcatgtcagaattttgttcctttccagagctgaataatactgcactatatgtatacattgtagtccccccttatctgtaatttcactttcacagtttcagttacctgtgatcaaccaaagtccaaaaatattacatggaaaatttctgacagcagatttggcaatgatttcttggatatgaaaatgtttcataagttttaaattgcatattgttctgaatagtgtgataaaatctcacaccatcaggctccttcctgctgaggacatgaatcatccctttgtctagcataccccgcctgttagttacttagttagccatcttggttcagatctgcagtcctagtaccttggtgcttgtgttcaagtcccccttctttaataatggcccaaagcacagaagcagtgatgctggcaactcagatagtctcttactgtatcttatttataaattactttatgatagatatgtgtgcataggaaaaaattagtgtatatgcgttcagttcagttgctcagtcatgtccaactctttgtgaccccatgaactgcagcacgccaggcttccctgtccatcataaactcctggagtttacccaaacttatgtccatttagtcggtgatgccatccaaccatctcgttctctgttgtccccttctcttcccgccttcaatctttcacagcatcagggtcttttcaaatgagtcagctcttcacatcaggtggccaaagtactggagtttcagctttagcatcagtccttccaatgaacacccaggactgatctcctttaggatggactttagagtccaagggactctcaagagtcttctccaacaccacagttcaaaagcatcaattctttggcactcagctttctttatggttcaaatctcacatccatacatgactactggaaaaaccatagccctgactagatggacctttgttgacaaagtaatgtctctgctttttaatatactgtctagattggtcataacttctcttccaaggagtaagtgtcttttagtttcatggttgcaatcaccatctgcagtgattttggaggcccccaaaataaagtcatccactgtttccacatctgtttgtcatgaagtgatgggaccagatgccatggtcttagttttctgaatgttgagcttgaagccaactttttcactctcctctttcactttcatcaagaggctctttagttcctcttcactttctgccataagggtggtgtcatctgcatagctgaggttattgatatttctcccggcaatcttgattccagcttgtgtttcttccagcccagcgtttctcatgatgtactctgcatagaagttaaataagcagggtaacaatatacagctttgacatactccttttcccatttggaaccagtctgttgttccatgtccagttctaactgttgcttcctgacctgcatacaggtttctcaggaggcaggtcaggtggtctgctattcccatctccttcagaattttccacagtttattgtgatctacacagtcaaaggctttggcatagtcaataaagcagaaatagatgtttttctggaactctcttgctttttccatgatccagcggatgttggcaatttgatctctggttcctctgccttttctaaaaccagcttgaacatctggaatttcacagttcacgtattgctgaagcctggcttggagaattttgagcattactttactagtgtgtgagatgagtacagttgtgcggtagtttgagtattctttggcattgcctttctttgggattggaatgaaaactgactttttccagtcctgtggccactgctgagttttccaaatttgctggcagatagagtgcagcactttcacagcatcatctttgaggatttgaaatagctcaactggaataccatcacctccactagctttatttgtagtgatgctttctaaggcgcacttgacttcacattccaggatgtctggctctaggtgagtgtatatgaaagtttggtactattcacagttttatgcatcctctgtgggtcttgtaatgtatgtactacattttgtttactttcatctgttaatggatacttggattggttttacctttttatatattatgtataatgctgctctgaacataggtatacaaatatctctaagccagctttcaattcttttgggtatacaccaagaagtgaaattactggattgggtgttgattttatggtgtttttttttttttttaagaactgccaaaaaaaaaaaagaactgccatattgttttccacagcagctgtaccattttacattcccaacaacagtgcgcaaggattccagtttcttcacgtcctctttaacatttgctattttcttttttttttttttttttgagagtagacatcctagtgggcatgaggtagtatctcattgtgattttcatttacatttccctcttttggagaaaaatccattgcccatttttaatcagattggttgtttttgttgttgttattgttgaattgtaggggttccttatatagtctgaatattagccccttgtcagatatatgattggcaaatattttctcccattctctggcttgacttttcactcttggctgcatctcaagacatgtgggatcgaattgaacccacgccccctgcattggaagcacggagtctttaccattgggtcaccatagaagtccttgccttttcactcttgattgtgtactttaatgcaaaaatttttaattttgtggtagtccagtttatttttatttttctcttgctgcctgtggtttttagtgcaagagccaagaaatcattgccaaatctaatgtcaggaagcttttcccatttgttttcttccaaaagttttatagttgtaggttttacatttagatctttggcctgttttgagttagtttttatatgcaatgtaaagttagagtctaacttcattctctgcagttacacttttaaactttggcttagtaatgcatggacatgccatttcaaaggctgggagaggactcttgagtcagctgcttgctgtaggaaacttgccttagttcctcgccccatgggcagtcttactaatctatctcatttttctccaaagtaagatttttgtaagttttaataaagtaagagaaattgttaaataatatttattaattataagtagtgattaatttataacttataggttagattcttaaagctttttcttatgaaaaatttaaatatacagaatataaagagagtagtaaaacaaatttcccagcacagagcttcatcagatatcagcattttgcatatgttgtatcttctctttttcactttcatgcattggagaaggaaatggcaactcactccagtgttcttgcctggagaatcccagggacagaggagcctggtaggaggccatctatggggctgcacagactcggacatgactgaagcgacttagcagcagcagcagcttccctctctcaacattttttgtttctagagtattttaagggaaacctcagtcattgttaccattttgctatcatttttctatgtttaatgtaaacatgcaaagttcaaatcaagcatgtattgtgttatagtgtggtttttctatgtgctttatagtagaatacttgtataatcaatttatattgttttaaaacctaggacttagacccgtctcatggaaacagtgagagactttattttatttttttgagctccaaaatcactgcagatggtgactgtagccatgaaattaaaagatgcatgctccttggaggaaaagctatgaccaacctagacagcatattaaaaagcagagacattactttgtcaacaaaggtccatctagtcagggctatggtttttccagtagtcatgtatgaatgtgagagttggactataaagaaagccgaatgccttagaattgatgcttttgaactgtggtgttggagaaaactcttgtaaatcctttggactgcaaggagaatcaaactagtcaatcctaaagaaaatcagtcttgaatattcattggaaggactggtgcggaagctgaaactccaatactttggccacctgatgcaaagaactgactcactagaaaagaccctgattctgggaaagattgaagacaggaggagaagaggatgacagaggatgagatggttagatggcatcactgactcgatgaacatgagttgagtaagctccaggaatttgtgatggacatggaggcctggtgtgcttcagtccatgggatcgcagagttggacacaactgagcaaatgaactgaggaccagcagcgtacttttgacatttgaaatcacttcacaattttataattttgcatattgctttatggcatttctttgatcatatctgcaactaatatgccactttagcctcgggaacccaaacctcagtagaaacattgctcttttaggaaaatatgaactgctttacagctctccacattagagtgtgatttccaagaactcattatttacagttatcagctacatagatttctaaactgctcatttctaatgagaactcacaggaaagattacaaaaatttgcttctctttttttcaccttctcttctgatgtcttaaatcctggtgaatatcatataacgagttcacccacctgattcattattctttcaacctcttactttttttcttattaaactggagaatttaataggttcaataaagtggaaaactttttgctctagaagtgctgtgtggaagttaagaattcagaaacacatgaccattgaattgagagataattaagggtcttccattgttatagaacccaaagatggactctggataggtcacctcagtaggctgtttgaagcagggctgtatcgaactggggaggagggatgagggggtcaaataaaaaaataggcaaacattgctcaattgtgtctgactctttgtgaccccacggactgtagcccaccaggctcctccaggcaagaatactgcagtgagtagccactcccttctccaggggatcttcccagcccagggatcaaacctgggtctcctgcattgcaggcggattctttaccacttgagccaccagggaggtatttaatatacaagttaattcctttaatcaaaggaataaagaccttatacagagtctgaaaagtcaagaatgatgatcaagaataaagcaaaattgaaaccaacgaaagccctaagtgtgaagcccatttttaacacactcttccatatacacctcagatagttttatgtcatataatacatttcttctctttgagagccaccgtattttgaacatcaaggttaaaaatgcccgtcacagagtcttctgaaaagatagttaagaagcattcattcgtaacacaaatactaattcgttactttcttaagaaagcccacattccccacactgatatttcaaactctgagtgtctgcttcacccatgtgcctaaaggggtgtgtatttgtggggtcacttgcacagagacttgattgtgagcatctaatgactccaggaagcaagacagtgtggcccccactcctcttggcgtttctgtgaatgacaggggcaaggtataatgctgttttatttctttctcttctttttcccttcctgttttagaagaatttcacctaagttataatttgaaaaaaatggcaaaagactttttttccccaactggaaaagcctctcactatttattaatggattcagtctctttaaaaatgtgaagaaaaaaaaaacattaatataaaatgatggcctctctgagatggtgacatttgaactgaggtttgaataagaaagctcctattagcacagtataatgtgtgctaagttgcttcagtcctgtctgcctctttttgaccccatggacagtagcccactaggctcctctgtccatgcaattctccaggcaagaatatgggaatgggttgccatgccctcctccaggggatcttccagactctgggatcaaacctgtctcttgtggctcctacattgcaagcagattttttaccactgagccctagctcagtatcatgtgaagtgaagtgaagtgaagtgaagtcactcagtcatgtctgactctttgctaccccatggactatagcctgacaggctcctccatccatgggattttccaggcatgagtactggagtgggttgccatttccttctccaggggatcttcccgacccagggatcaaacccgggtctcccacattgtaggcagacgctttaccatctcagctgccagggaagccccagtataatgtagaggggtcaaatcctgactgcaccatttaactagacatgctatcttggctagcttgcctcacctcacctcagttcagcctaaaagatttgctgtagtgttttcaaaagaataacattcagagcagacaaataggtttgattgttgtttataggtatgacttaagaagtttaattatttaacattaccataatgttaaaaaaaaagagtggggtgaacctaacagtctttattcttgtcttctctgttaaagttccagtactttttctaccaaaagtgttttgttgtttttgttttaaaagtagtctactcacttcacctgtatagttagtatccatggacaagaatacttaataaatctaaaaaaaaaagagaaaaagattatgccaatttatgttttccttgttatttcattttaatagcattgatcagtacaacccagggtaagaatttctaaaaggagactttgttatgtggagaattcagtatctcatgatctcatcagaggtttcatggagagatcaactgacttcttttaaaacagcttcttaactcatgtgacggaaaacttgacctctccagagtccccttgattccagtagtgattgtgaatctactttactttgttcaaatcccatacccaaaacattttttgacattgaaatgattcatcatctaacaatcctttttcacataacaaatgcatattttactctcttttaaagattagtgttctatcatttacagatcattagtagaggggaagtaatttaaagtattgggagcttctgtgtccattgaagactgattagaaatgaagataatttttagtgacagatacttaagtatgagagttctgtaattattcaactcagtctctttgcttgttatgctcactcaaaagaacagtttattcaattttaaaaagaccatattgagtcaggaaataaggagattgctgcaattttttattttgtctacaaaattgttttattactttagaaatataaaaatacagtgtatattctatggcatctcatgtaatggttacttagaaatatttatgtctgcaaaagcctgtgaaaagtgaacaagtggttagggttaaagttcatctcctgctctgtctttttctggtaataaaaagaatttaaaaggtacagtgttttccccctaaatatctacttcctcctttcctggctattggaatagtttacattcttatgttttttaaggggtatgtgtgtatgtgtgtgtgtgcacgcatttgtgtgtgtcttctgttgtagctacccaactagccagggcctcttgtgttccaattctttgcatctaattcagctaaacttttgagaaaaatgtcatgtgtaaaagcaaggcacagctataaagtgttcaactttcagagtacctttgattcttcttgtatagtcacatttgttcatttagtgaatgaaactaatcaacttatttttccttaaaatggagcttcaaaggccactgccttctacctgacccagagctcaaaattcccacgttcactaacaaatctttgaggagggataaagaaagtggtttctctagtgctgactgatttcttagggagactttcagagctctggtgtggtttactcatttagtcgtgtcctgctctctgcaatcccatggactgtggccctctaggctcttctgtgcatgggattttccaggcaagaatactggaatggatagtcatttccttctccatggcatctttccgacccagggatcgaacctgggtctcctgcattgagggcagactctaccaactgagccaccagggaaggccctccagagctctagctactgtaaatgcttgggagacatctgcttgcagctgctttaagaaaggattagcaccaccagcagcaaggcttttggtcagaactactcatttttgtagtgtgatattagccatatagacctgttttttttttttaatttattttttttaattggaggctaattactttacaaagtcctgtttttccaaattactgtaatgataaaagttgaagaaccatagttagggctttgataaagatgtggacacaaccataaactaaggaaagttcatttaggaatggatcttcaaatccttgccattgtgtcttttaaggtcatttgctcaattaaaatgtgtgcaggacctaggatactggggagaggggtcagatgtttttctaaattatgggatgggagtgggtggggaaggatgtttcaggaatgtctaggtgtgtcctgactgctaaaggcctcatatacaaactttttttattgctaagtctctactgaacacccagacgtcactttttccttcttctacgactgagacttctgccagagcattgccatcatcagcggatcataaatgaattcacagtgcttgccatacccacagttccttctgagggcagctgtcctcccctgctaggactcctgctgaggaaacacatgacccagcctctctggctgagtgactggaccagaggaggacctgacccaaggatagctcactcataggccaactaagctcgtgtgatgttgcttgatctcaaaaattcagtctaaatagagacagtagtatttaaccaagcccttcagatattctgctttgggaatcacaactgagataaaaaagataaactagagaagaatgatatagacatatgggctaaaatgaccccattaacagtggtgcataagaaagaccacaaatccctaccactgagcttcctgaggctgccttggaatcagcactgtatatcactgtcagttttggcctctgtgaggcccagcccttctctaggtccttatccttttgttttcccatgtgttctttgtactctgtgctcttcctgttcttcacttgaatgagtttaagtgagtctcagcttcttgtaacctccagagcccaattataggcccttcggtacacagaggaataaaaacaggtaggtggtccaggggtgtcaggggtcagagttgcagttcagggccagggattaggaacctgacctcaggctcccagctttaagctgctttaaaatctatgctaatggacttgtcatattttattttgttttgtttttaacagattttatgttttagagcacttttagattcacagcaatattgagcagaaaggacagagagttccaatatacctacccctcccgaccccgccacacagacacatatacagccccctttttaaaatatgcactgtgaacagaaaatcagtgttatagatatcaaaaggttcaatttcatcttgttgaattgtttttgatgtttatgttgaaagatttttagaatttatgaccagtagttacagtatctgccacccttattaacctcagtgcttctgttttcttatcgaaattgtgttctgacccagagttcctatatttctcaatatggaattcttagagtatagaatgtattaacatcctcttctcccagctctggatgttctcttgcctcttcaatagcaacaaacaattcaagcccactcaaaaaacaaccatgagggatatgaattctattccttcccagttcggggtttcctctgtgtgaggccttgaggaaacacaggtactgttacagacatttgatttatttatatgggctgttcctaggccagtaggagaaaaaagacatggttgctatatccaagaagctctcaagctcacagatcctaagcgtacccttcttacctttttacatatgatctcagcctatgtcttctgtacagactccaccccagctcttccctctcttgtggtcataatatcaacactgcccagccacttcctgtttcttatgcctgcatctccgaggaccatgctgagtgagccacattcttgctgactgcctcattttcttataattgtactgatgcattatattctgtttctgctaacaatatggatatacaaaatttgcccaaacatatataaccatgtaacgataccttttccttgatgaaagctccagccagttctttcatcaaccagtagtcattgaatatttactatatgccaggtgtgagctctgggtatctctctggtttcttctcatttcctgttgttctgcaaacatatttcattatgtttcacatcttcatgctttcactcatgttgtttctgtctggaacacacttcccccagttgcctcgctaataccttttcatctttctagtcccaattcaggtgtcccctccttcaggaagccagtgcccacagtgggtgatgtttgccttcactgggctcccatgtccccttgtgcatacctacaccaccaccattgccacatcagggtaaccatatctgtgtccatctcatcagcagacccttgagggaaaggccaatatcttactgctttttgtttctacagttcttagaacagtacatggaatagaatatacacataataaatatttgtggaaccagaccatatcaatcatggaataaagccaaacagaaaatcttgtagaatcactgggtaggccatggttacagttaaattttttttgtctttgttgaatttgttacaatattgcttctgttttgttttgttttgtttttttttggccatgaggcatgtgggatcccagctccccaaccaggggttgaacccacacttcctacattggtaggtgaagtctcaaccactggaccaccaaggaagtcccctcaacattatttattattgcttgagaccatttgcccaaatcctcagcaaagacagccctggtattcgttctagcaatattgtcaagcatgagtagcatgcgcaccacctggtttttcctgtacaagagctggctaggatgtgggcagtatggattaatgctcttgaatccagcactggtctcagcctccaaaggccatcagtagacatgattatgaagactcttaatatatgatgaaatgtgtgcaatatggtccattgcacaaatgccatggctcttgcagatcctctggtacccccaagtggaggactataaggcaacccaagcataagcctagctgccagtgcagatgctatatccctggacctagatctgagcctggtgtagagttggtgttcagtaaatacttgttgaataaatgagtacttttggataaatggatttagttatatatacctgtgaagggagctatgatttttcactttgtagctctgtagattttgctggaggcacagcttagggttaaaattaagaggagatgatgcaaagaaaaaagttttcttatgggacttcttattccatagttttcaataattgtttactaggggaaaagactataggaaaccaagttgtgcaataatgaaagaatttagttgagtcctgatttttctttcctcttgccatctgtgctgctgtaccatttcttacagatctgtttgctctgactcagagagggggttgaggggagggaggcagacagaggcagaggaagccagaaaaggacttatgacattctggggctggattgagccagctttgcagttgaaatgaattgcccttggaactttacatttctttgtgaatgagatgtttgcccaaatcagctttaacctctcttctggttctgaaatttcacactctgtgtcgtttgagagagttaggggttttcctaaattctgcagatgtttcctgggtgcattaaaagctgaatataaatagatcaaattgtggatgatgtagtggaggttctttgagttttagctaaagactttgtagttgtttaacagtgaagtttccatggtgattagcatttagttcttattctcctgtgctgtacaaaatcaaaggaatcaatttctttcctgtcataatccctattagttattattagagccaacactgcaattgatatgaaaagacagacctcatttacgtatataacgaatatgaacaaagtgggtaaccttttctttaagactattttttttttttagagcaggttagagttcatagtaaaattgagtgaaaggtacagaaatttctcatatactcttacgcaagcatagcctcctccattatcaacatcccccactagggtggtatattatagctgaagaacctacattgatactttataataacccaaagttcacagtttacattatagttcgttcttagtgttgtacattctttggatttatataaataaataatcacatgtagctatcattataatatcatacagagtttttgtttttatttttttctttgaaagtgaaagtgaagtcgctcagtcctatccagctctttgcgaccctgggaactctagcccaccaggctcctctgtccatgggattctccaggcaagaatactgaagtgggttgccatttccttctccaggggatcttcccaacccagggattgaacccaggtctcccacattgcaggcagacactttaacctctaagccaccagggaagcctgtcatttttttttttttcccttaaacttctctaaatatcttctgtactgttggttcatctcttcccatctccacccctggcaacctttgatcttgttattgttttcctgtagttttgccttttccagaatgccatttagttggaatcatataatgtgtagttttaagattcctccctgtcttttcatggcttgatagtcctttctttttagtgctgaataatattccattatctagagatatgctagtttatttacccattcacctactgaaggacatcttagttactttcaaattttagcaattatgagtacagctgcaataaacagctgtgtgtattttttttgtttaatatttatttggctctgctaggtgttagttgcaacacacgggatcttccatctccagtgtggcatgttggatctttagtcagcatgtaaagtcttcgttgcagtatgtaagatctagttccctgactagggattgaacccaggccccctgcattgggagtgtggagtcttaaccactggaccgccaggggagtccctgtgtataggtttctatgtggccatgacttttcagttcctttgggtaaacgccacggaccaccagactgtattccgcagttgctctaccaccttgatccccgccagcactgaaggagagttcccgtggctccccatccttgctgacatttcgtgctgtcaagtgtcccaaatcttgaccatttcagtgagtgtgcagtggtgtctggtgcctgcatgctcagttgctcagttgtgtctagtgctttgcaacctcatggactgtaccacaacagactcctctgtccatgggattctccaggcaagaatactggagtgggttgccatttcctcctacaggggatcttcctatctagggatcaaacagtctcctgcattggcaggcagattctttatcactgagccaccttggaagtccagtggtatctcactgatatcttaatttgcatttctgccttgatgcatgatgtggaacatcttttcatatgcttatttgccattttatatcttctatagtggggtgactgttaaggcccattttttagacagtttgctttttcttattgttacgttttaagagttctttgcatattttggatattagtcttttatcagatatatctttctgcaaatatttttctccagtctatgatctgtgttttcattctcttaacattgtctttcacagtgcagaagttttaattttaatgaagtccattttattagttatttctttcatggatcatatgttcgttgtttcaccatacccagggtcatctaggttttcttctgtgttatcttccaggagttttgtagtttgatattttacgttttaggtctatgatctgtttgaatttatttttgtaagatctgtgtgggtttcctaggtgactcagtggtaaagaatccacctgcgaatgcaggcgatacaggagacagaggaagaaaatggcaacccactcccctgttcttgcctgggaaatcccatggacacaggagcccagcaggctacagttcgtggggtcacaaagagtcgaatccaactgagcatgcatgcacacaagatctgtgtggattcattttttgagtttggatgttcagctattccagcaccatttatcgaagactgttttttctccattgtgttgtctttgttcctttgccaaaggttagctgactacgtttatgtggatgtatttctaacctctctattctattccattgatccatttgtcttttatttcaccagttctggtctcctttccccagagaggtctcacagagggtgtcactcattcatgactgggcaaaaggatgaatgttttgatgacacagactttaagtattgttcacaagagtgtaaaccatgaatgaaaacctgttgactgtcaagccattattttataggatatatgaaagtgtattaaacaaaaatagaatcataaaatgatgccattttgcacttgcccttttccaatccgcagtatctttccacatgagtacatgtagacctatcttactgtttttttagtattccattacatagatatagcataaattattaattatatattatactgtaagttctatgtatttctataattatataaacctttatattaatacaggtacatattagcctttatatcattgtattgtttctaaatagtcacttttacaaacagtgctacagaacatttttggaaataattatttgtgttttctagtatttcatgacaaaaattcctaaagactttctgaatcaaggatgtatatatttttaaagcttttggtttttattataaaactaatacttatcaaaaaatgcaaaatatagaaatacataaaatacaaatcagatgtctacctgcatcccagtttgatatgcatccctgaaatatgcatttcatattgtaaaagaaattacccaattgctatctaaaaaggttgtacctacttacatcaccagtatatgaaaatgcttattgtccactttcttcccaacctatgtcattatctactctaagtcttttcaaatccagtacacatcattttaaattgtgctttcaatttgcatttctttactagtgaattggacaccttgtgtttaatttttttaaatgatgctcctgtgagttgcctgttttcttttgcctaatttgctatagggttttttcttattaatttgtaagagctctttatacaataagggaattagtttgctacaaaattttgaggagctgattttttttttttactttgtttgtgatgtattttgccacccagaagttttacatttttctaaaacatcttttgagccagccttttttttttttgtccaaatataaatcctaggacaactttttctgctgctcttctcagctaaaatttagttaaaaggacatttccccctccccccttttttaaagagaggcgaatagaataggaaaatgcctggagcccaaggatcatcggtgctttcattcagaggcaggtcagcaggattcttttccttaggtgactcaaccagtctgcaaggtgtcttgctcagttgccctctcagagctggcttattcaagtgtccttccctttatccctgctgttgaactcactcccaaggttcttgttttcagggtaagaatctctcctctagctcccaacattcataaggcaataccaactgaactgccctcccagcccctgccctttggcaaaagtgactctccctccaatgcaaaccccatttgcctaatatgaatggtattctggaagcaattgtgtatattaaataaattctgtctacattcagaatgtgagggacagtagtatacacacaacttggggcaagaacaactaatcacaagcagaagttgtacaagatgtgcttttgactgtttacagaactgcctatttaggctgttagaatatctggtcactcattacccagtttttaaaaaagcctttgatgaatccctgtcttctgcagtacaaagaccaaactacttaacatggaatgtgaggtcttccacatcctcgtcctgacctatttcttcagccatgtacatatatgctaaccaccttatccaaatgtttatcagttttttgccaggaattgttctaggctctagaatttgtggttgtccctgcttttacatggctttcagattagctggggagacagacaatcccaagtaaacaaattgatttatagggtggccagggaggaactttccgaaagggagacatctaaagtgagacctgaagaatgggaaggaaccagctgtaacaagagttgggaggtcgagagagagatgctatcggcagagggcacagcaacagccctgaagttagaaagagttggagtgttctaggagtaaaagaaggcaggcataatcaaagttcagacaaagggagaagaccacagtgaggtgatgttaaacccaagggcaggggccaagttgcacggtgcattgtagactatagtaaaggagttcagattaagccaaatgaggtgcttaaatctggggttgggatgaaataagggtgatgacaacataatgtaaaggtctttaaagtttagttcatttatctgttaacaactctctgatgtgagtattattagtaactagttttatggatgaggtccctgaagaaggaagttgggtaatttactcaaagtcttccgatacaattgaagtattgagtcactggatctgcctgacttcaaagcccacgtgcttaaccttgactctaaattctcatttgtctaattgctttgttttgtgagaaaattaaaattcagagattaaaaataagcaagaatgaagcactgttcaaaaaaatcagacccttcaatctgaaaggattaaagaatgaactttttatctggcagaagctcagaaagctgagaaacacaagaagagggcatcatagacttattcactgtgtacatgagaactcaggggcatcttttgaagcttcaaagaagtaattataggtcaaataaaagaaagtactttttatacagtgaggagtaaatagaaggagctgattatcccagatacagactgaaaataaaataaatttagagtagcttttatgaaggctgtagagtgagttagtaaaacagaacctcttttgtatgaagcatgacagaaattgtaacagaagcttaaatgactaaaaatatttggaaaaatgagtaagggaaaactaattctacgtacaatagtgaaaaaggaaaacaattttaggtgtgataattttgcagcatttaaaaattttagttttttatgtattgagaagaaatacataaactcataaaattttgttaagagtaggaagccactgtaaagggatagaaagacagacttgtcttcctcggtcatcacagacaataaaatgcttatttccagggaaatccattttgttagactagaagggtgtggtcacatcagttccaggatcccaacttgacatctgaggaaaaagctgaggccccagttcttttagaacctttgcttgcttgtgctgcatttgtctttcaaaatgtttttccagctacatgcagttgaagttaactcttgcttaaaaacaaatgtcctttattccataaattaggaggtttttacagcctaaaactgagcaacagtgggacttgagctctcccttatccccactgtcctgtcagttcctgtcagtcctgtcgagactccccagcctctcggtgcagacgctcttgtcctttcagtgctgccctctagccccttacagctgccacagttgaggggagaagagtgtacactcggtctctctagaagtctgggagctgctgagtcagagtttcataacctcaatatctaatggtttctgcttcttggttttctagtaattgtctcaccacagtcaggttgcaagcatggccagaagcttcatgggtccagcaccacttctgtggttctcctcttccttcaggagatctgtgggggcagctgcctccttggtatgcatcacacgcctagttgagccttcagcatatcaagtgaacactgcaacattatattaatagcctagtctgttgtatacgcaatttaaaatgttaatgctacgaagtcagattgtgaattttgttcagacagtttttatgggaattctgccattaaaaaaaagtctacccaagctttggaaaaagggatagttagcacataagatataaatatggatatgttcttgtaacatagaggctcttcatgtttatgcatgcctgttcattatctttaaagtaatctcccgttgagaaatgctgggcatttcatttgggcaagccaggcttgtatttttaagtgtgtgtgacaggattattgtttccactcatgtttgtactgatagctaatgaaatttttgattctcttctgtgacttctaccatgattggttttctgttttagtatactatttcttcagatttcaaatccatgaaagttctgtggttcctaacaactcatcattcattcattttttatttattcattcattcaactgatctctcctgaacatctactttgctaaacactgggccaggtgtgaggatgatgccaatggatatatcatagatattgtccccaaggaggtcacaatctagttaaagagacaaacctatggggaaataattacaattaagtttaagatacctatgagacatctaaatagagatcttaggaagttatatgagtctgggtctggagttcaacagaaaggtctgggctagagatcgaaatctggggaaaattggtattcaaactcacgagggtggatacgatgcagtgtaaaatcaaaactaacaatagtaatatctaatcataataatagtattaatgaggatagctaatattaatttaatcctcatagtaactctttatcataggcattattattactctttttgtagatgaggctcagagaagcctcagtgttagtaaaccacaaaacccagtccagtcctacagcctgcctcttaatcctgcactagaagagagaaaaggcttctctggtggcccagattgtaaagaatctgcctgcaatgcaagagactttggttcaatccctgggttgggaagatttcctggagaagggaatagcaacccactccagtattcttgcctggagaactccatggacagaggagtctgaaaggctacagtccatggggtcacaaagaatcagacatgactgagagactttcactttcagaagagagaaaagactcagctcagaggtccaggcaattcctgcatttagaggttggacggcagaggcagacttgtgaaaggagtgatgtgatgggtaggagggaaccaagagaatagggagtctcagaagccaggcaaagagcattccaggtaggttgccaaggccagcagtcaaatgctgctgaaaggtgggtacttctaagacacaggcatgaactgggtgatgaggacagggaaaaggtttgccaggcttggagtttaacgtgaataaagagataggtatggaggaaccagatgtcattagagggttaaacacaagcaggaatggtgaaagatgagaccgaagacgttgtcagaggccagatcatgaaggacctgcaatactccaaggtagccccagaccattgatctctgccagaaatgtgcatccccagagctgggggcaaacaaaagtgagctgcctgttataaacaagagggaactatatatctatgttatcccatatgatatctgttttgtcagatttcttcaaaatttagcgtgttgaatgttgatcattttcaatttatagacatattgagtcattgtgttgtgcaccaggagctgtcttagtattgtaggtcaattaattatactttaaaaatatacagactcatggaaaaagagatcagatttgtagttaccagaggtgggaggttgggaaatcaggaattgggtgagggtacaaacttccagttataaggtaaataaatactagggatgtaacacacagcatgattaacatgatcatgttaataacataacaaataatataattaacaccactgtgtgttataaatgaaagttgttaagagagtaaatcctaagggttatcatcacaaggaaaaatatatttaaattttttctttaattttgtatctatatgagatgatgggtattcactaaacttgaggtgtggtaatcatttcatagtatatccaagtatataagccaaatcatgatgatgtacaccttaaacttatacactgctgcatgtcaactcagagaaggcagtggcacctcactccagtactcttgcctggaaaatcccatggacagaggagcctggagggctgcagtcaatggggtcactgagggtcagacacgactgagcgacttcactttcacttttctctttcatgcattggagaaggaaatggcaacccactccagtgttcttgcctggagaatcccagggacaggggagcctggtgggctgctgtctatggggtcacacaaagtcagacatgactgaagtgacttagcaatagcagcagcaaacctggaagaaaaaaatttaccatgttgagacattataatttcagatttaaaaattacccatgacttctttcagcaccaaatcatttatcagactggtagatgttctgtgtggaaggaagacatctatatacaaaggtacataattagcatgactgtttttatacttctttctatattgggagcaagtgttgaaagtggtaggaaagtgtgatttgttttgcttaattgggcaaccttgatcacaatcaggggaaagtgattcattgagtttctgtccttcattgtacatcctgaacagttttaaagtcagagattgtgctgggtttgaattctgcctctgtcatttattagctaagtgactttggggtcagttacttaacctttctcaagctgtttgttgaatgagagacttctttaataaacaattataaagcatattgcaagaattaagtaaaggatatgaattaggaattttctttatcctaatcgaacaaaaagccttacagtgaagatgatcaataggattcctttctttgtttttgattctgtcttgcctttggttattttgcctatttagattttgtaatttatccttaaataactgtagctaattgtcgatagaaatagtaattttttctagatgtggatttgaagactgtgcttataaagtgagacctagttcctaaaatgatctttacaggaatcttaaagaactgtagtatctaaaaatattcattctgaagctctaccatatcatatagaattctagagaagattatttaatttttgctacttgatggtgacaaaatatattcattaattttcaaggttcttgttttcttcatgaaattaaaataatttcattgcctgctggaagctgacttcacagtacatgcggggtaactttaagagttaccaaaaaattaaaaatcttaaattaaccctgtcattttgtcatttatagaagtaaatgaactggaatcattcatttattaaaatctcagctcttggcagatttttttttttttttttttgctattattccctgaactcatttcttggcagagcttcattctatggtcacaaccagttggaatgctgaggatggatgcctggctgaccactgtggctttgacagattgtcttagatgagacatccttaagtctcatctgatgaaatggaccagtttaatagcacttttcattacaacacgaaggggatcaattttggagtgggggagggaagtttctttctgggatctactttaattagggagaagagaggtagagtggaaaggatgtctggcttatagagtagacatgggtttggactcaagctctaacacttttaaggtctaagccttgatgcaagcataccttagagatgctgtgagtttggttctgggccactgcaataaagtgaatatcacaataaaatgagtcacaataatgttctggtttcccagtgcataatgcaagttatgtttacactatattgtagtctattaagtgttcatagcattatgtctaaaaaaaatgtagacaccttaattaaaaattactttattgcttccctggtggttcagtggtaaagagcctgccaatgcaggagatgcattttcaattcctaggtcaggaacatcccctggagaaagaaagggcaacccactccagtatttttgcctggagaatcccattgacagaggaacctggcgggctacagtccatggggttgcaaaagagtcaggcacaacttagtgacaaaaaaaaaaaaaaagctaatcatcatctttgccttcagcaagttgtaatcttttttttggtggagggtcttgcctccacgttgatctttgcttactgatcagggtaatgtggctatggcagtttcattaaataagacaacaatgaaattcgctgcattaattgacttgccctttcataaactatttctctgtatcgtgcagtactgtttgatagcactttacccgcaagaaattctttcaaaatgggagtcaatcctctcaaaccctgctgctttgttaaccaagtttaaatcctttgttgtcatttcaaccatcttcgccaggaatagattccctctccaaaaaatactttctttgcacctccacaagaagcaactcctcatttaggttttattgcgagattgccctaattcagtcacatctttaggctccacttctaatgcttgctatttctatcacatctgcagttatttcctccactaaaatcttaaactcctcaaagtcatccatgaggatcggaatcaacttcttccaaactcctgttaatgttggtatttgacctcttcccatgaatcacgattaatggcatctagaatggtgaccagagaaggcgatggcaccccactccagtgctcttgcctggaggatcccatgggtgggggagcctggtgggctgcagtccatggggtcgttaagagtcggacatgactgacttcactttcgcttttcacttccatgcattggagaaggaaatggcaacccactccagtattcttgcctggagaatcccagggacaggggagcctggtgggctgccatctatggggttgcacagagtcagacacgactaaagcaacttagcagcaacagcagaatggtgactcctttccaaaatggttcaattactttgcccagttccattagaggaatcactgtctatagcggtgaaaagtgtttcttaaagaattttttttttaagtatttcttaaataaaagacttgaaagtcagaatgactcctgatctgtgagctgcagaatgaatgctctgttaacagacatgaaaaccacatcaatcttgttttatatctccatcagagcccttgagtggtcaggtgcattgtcaatgagcagtaatgttttgaaaggaatcttttttcctttgagcaattggtctcaacagtggggttaaaacattcagtaaaccatgttgtcaacagatgtgctgtcatccaagctttgttgttccatttatagagcacaagcagaatagttttagcataatttttaagggcccttaggatttggggtatagtatatgagcattgccttcagtttcaaactaccagctccattggcctctaacaagagagtcagcctgttctttgaagctgtgaaaccaggcattaacttctctccagctatgagagtcccagagggcatcttcttccaaaataaggctgttttgtctacactgaaaatctgttgttcagggtagccaccttcagtattttaactagaccatctggatgacttgctgcagtctacatcagcagttgctgcttcaccttgcacttctttgttatggaaatgacttctttccttcaaccttcacattcttcttctgcagcttccttacctctcagcctttatgtaattgaagagagttagagcctgctctagatttggctttggcttaagggaatgttgtggctggtttgatcttccttccagaccactccaactttttccatatcaatgatttgtgtgttctttggagtagcacttttaatttcctttaagaactttttctttggattcacaacttgactatttggtgtaaatttttgacctaaagtgagaaacctgtaactcttcctttcacatgaagacttagaggccattataaagttattaatttgcctaatatcagtattgttgtgtcctaaagaataggaaggcccaaggagaggaagagccagggaaataaccagtagttagagcagtcagaacacacacagcattatcaattaagttcaccatcttacgtggatgtggttcgatgcaccacaaaacaattacaatagtaatatcaaaggtcacagatcaccataacaaatataacaggaatgaaaaagttttaaactttgtgagaattatcaaaatatgacacagagatgaagtgagcaaatcttgttggaaaaatggtgccagtatacttgcctgacacagggttgccacagaccctcaatttgtgaaaaaggccacatctgcaaagtacagtaaagcagagtggagtgcagtaaagtgaggtatgcttgtatctgttaaaaagcctcagaggggcacaggacacttctgctcttcactttcagccccatccagaattccccttttcttcacccccagccgttctcttctctttcccccattttggtgtgaccctctttccctgctccaacaccttggcttacctttcttcccatccgttccccactttgctgctgtaggagatggttggtggaaatggtggtcacatcacctcttttccttctgggtggtgggattgggagtgggtctctgtgttctggaagtgaggtgtagcttccactctacataaattatgaagggatggaggtttgtttgggggaggaaggggtgttttattacttctctgctccgttcctgtctggctgtttttccttctttcaaaccaaaatttcctatataactcagctctccaaagtcactttcatctttctctacttctataaattagagaccctttataagattctgggagcctctttctgatacttcttttaagctaccctcttagagtataatgagtaaggccaggaacattcatgtaataaatatttattaagaaattattagatgggccctgtgttaagtgctgaagagacgaaggtgaatgagatgcactcttcctctcaaggaaccaacagtctatagaaggagataggcaagcagagtcattgtttagtgggatgaaaattgcatgaggtaatggggacattgagagtagagtgccaaatgatggtgggaagtcaggaagttcttcttagagaaggcagtactttaacacagatgtgaaggataaataggagtctgctgtttgaaagcaagggcttatttacgatacagcaaacccatagtttggcatgaccagacagtggcagtgatgattgaaaatggagggaaaatgaaatgtttaagaatatattccactgagaggtaagattctaatcctgaacctaggtgtgtagatgggaatttattatgtcaacagatactgtgtgtgcgtgcatgtgtgtagtttcttgaaagtccatcatgtgctttaacatagtagttcctaaattttctacctgaaaaacatgcctttagggttatttgaattacttagtagccatttggctatcagtgttaatgtcagggatcagaggaaagggtattgatgcttcaggatttctcttctgcttcagttcatagcctagaggagcacttagttattataggcttatttgaattgtcacctaaaacattcatttttgtgaatgttttcaatggggtattaacattgaaccaagtagattccttgttgccaaactgctatgacttaataggggaactatgaaagacgtgcagatgtgctgtctgtaagcaaacagcgtgcatgggggtttggggaagggagagcatcacatggatcagatttggggatttagggactagtcatttactgtcaggcttattcccaaggtgtctgaggcctcagacactattattctgagtactcaaacttttgggttccttgactgacaaaatgcaagttcacaaaacttccagtgagtcaccggcattaatcaaggacctcttgagtgttgtcattgtggtagaatacaatgagaatgatgactgctgcctccttcagcacacagggatgggtgtaacccccgagaagccatgctgtttggtgcccctctctgcagggaccagtgcaggcatgtcccctgaacccgcctttccagggctctcccattagactcagtcagctctacctcgtcataaattatgttgtatgacagatggtttttattttccttgcaagctactaatctttgtgtatttatatttcagtgttttctgttttaagcctttttctcttttcttcatgtcctacagtttttgtggctttagtcacaaaatatcccaaatccttgttttcccttcttctacagtttctgcatcagtgttcactctttctttgcctactgttccacgagtctcttctctgagtctctgactcctaccccatctcagctgtgctttgtggcttcaggaaaaatcctgaggtgggtctatgaagtttgcctttgctacttctcttcaccattctcctaacttttcccccttcccttgccctacctctgccttaaatagaatcaacacaaatgtcccactaactgtggtcgaggaggtgagccaatctagatgggttcaaagacagcttaaggagcatgcagtctagtgtaggaggcctgaggtatcgtaagggaggcatttgaaggactcacaaggtaatgagggatagagtagtgtgagttaaaaatggaatggggagcactgcaggaaagcttcaccttttattagctaatggagacagctggtgacagagtcgttacaagacattggaccttcccttgtcttgtcttgctgggaactctgtcagggctggttcactttggctaggattgtctttcactaactgcttcggtttcactaggtacctgggcagacttagtgggtatgcatatccactcctatttctgattcctccctgactgttgctaacacatctctcttttaggttcttgtgtgatgtcaggaccttgccttcttgtcttccccttcagtcttcacattggatgtagctgaacaagcttagtcatcttcatcagggctaccatgtgtattttctgtgggggcctaaggggacagtggaaagtagggttggaggtgatagaggcaataggaaggggcattgtcagattgagattcctctctgtttcagcatctaaggtatatatatttcccaactgacctagttctgtatagtagtttctgcagagtcactgatcctcactgattaagatggaaaagaataatagagacagtggtaataatagactgacttctgacctatttctccttggatactttccccagagataaagataaaataaaggggaagttggttgtcagagtgatgtttggtatttcaatatcctgcctctgctgagtgtaagggccttagcctctgtcttctatctgtaagtgttgttaacatctggctcttggaaatcaaacctttggcaaagtaccagctcattactgcttccaaaatacttgtagaaatctgagctagagcttgctatggacaaaacacaaaggcacgtctttctagagttagttgaaaactcatgtttagagcaggtcagccatgattctacacactcacttggacccattttgctttttgtgttgtcctcagtcaaggtagtaggttatttcatgactctgaatctcatgttttagacatcttttttggaactagtatatcctttcagaaaaagttatagaaatactggctttctaaagtaggcttcagagtggaagcagttagtaaacagaaatgttcatttttttaacttattttttaattggtggaaaagctctttgcaattttgtgatggtttctgccgtacaacagttacggcaaatcagccatgattatacatgtaccacctcccttttgagcctcccagaaatctttattgaatgaataagattttggtaatgtatatggatattactcagtttaaggggctgtataactgagggaaaagttatgaaataaattgtagtaacatatttgatatataacattaataatcacttcttatggaaaaaacatttagtaacaatctcagcctatacttatatattggtttatgctttcacagagtttctgtgtgtataaaccttggagataaactagatgagtcttgctgtcatcccccatcttgcagatacctgaagtaaaagctaaaagaccaatctggtagtcctgcgattggagcccataacccggcttggtactcttttctctacaaactattcagaccaaaaatctgcataaatctatggtaataagagataaataaagcaaggggtgaggttttgttctgtttttttcttttttttatgttcacttttattcagtttaaggattggcattcttttagcaaatactcagggcccagctgtgaaccagatacgcaagcacttgatacagtgttgaataagacaaatatggaacttatattctaacaaactaagaaaaatagtaaatacgtaaacaagaaataacataagtaaattcaggtagtaatgaaagctctgaagaaactagagaaagactggtgttggtgatattttcatatgtgatataattcctaaaaatgggcaccaaggtttagtgtacatatatatgttttaaagggagattcctttctagacaatccatatagtcataaaacacctcttcattgtggtgtttggaggacccaatcaaaattgatctgaagttcaaaattggcttaagtccagagggtgtagttaaggctaaagatttgctgttttagaaactcctcttgatacctctttcatgatattgaggctaggatgaatattccattttactattttcactcatctttataaaataatgaggacaaaatatagacagcagtgcctttttattttttaaaaattagcagcagaactttcttcaaagaaaattccagatgtccagtatgtaaaacagctgtggctcctctgctcataccataatgatcccccacgaatactgagaaatcactaagggtttgcagaacacaagatgaaaactacaataaaaaattcaaattttaaatcttatgattgaaaaaaatagctgtgccgctgaaactggcacagccgccataccagagcttccaaatcttgttcttagacctatgaaagtctgcattcagtgaaaaaaataggtttatacatacattttaatctaaagttaaatttttgggtagcattcttaatataaggcaaagtcaaattttaatcaaggctatttcttcagagcatagatccccccacttccgtggtgttattgagatagaattgacatactgcactgtataaatttaacgtgtatggcataatgatttgaactacacatattgtgaaattattaccacaatacagagcatgccttttaataatgtgggtttgatggtactactgaggctaaagtacttttcatctgctaattttaaagttaaatttcatatttgctgggttttattttgttcataaactgtttaattataactacacccatgattttttaatatcattataaagtaattgaattgctggtttaaatattcttttcttcatgtcttctagtttgccagggtttggatacctgatcctgaagaagtttggaagtcagcagagctgctcaaagattataagccaggagataaagttctcctgcttcaacttgaggatggaaaggtaggaattctgcttttatttgttgttattggcataaagtaaaggaaattcaaaagggtaaatttgctgtgagatacttaacttcacttggaagttaaatttttaattaatctaatattttcacttaactgataaaaatggcaaacaattttccatcccaaagggttagtgaaaatagcagttactttaaaaaatccattattttggcttatgaatttattatgacctgatttagattcatatctaatcctcccgtagatattcctgtttatctgtattttgtttaggatatcacttaaatgatttatattaactaagaaaacatttcaagagccagcttgagataggatatttgctgaaataggtatttgaaaaatatttacttagaagctattatctataaaaccctttgctagtggccaggaaaacctataaccagttgtgtctctgtactttccatctgcattcactgcagaatagactcttagttccaccctttttattctcaccactgcatttggcagggcatgtcacacttttagcgtgacattaatttcctctaaacaatttataatctagccaggagaatgcaggatgtaaaaagtagttcaatactgcaatactaaagatgagcttatgattaactgccaagtgagtaatactgtcctgacagttaatatgtattgaacacttactatgtaccagatgtagttctaagtcctttatatcctataactcacttaatcctcacaacaatcctatgaggtgggcctgttattattaccactttatggatgaagtactgaggctcagaaagtttgggacttgctcagagttacgcaggcattaagccagtatatggtctgtgctcatgaccactgtgctgtactgtaaagatagtgaggactttagggtcccaagagaggcactgtggggtgcttcagggaaggctcccaagagaagaaagagttttgactagacagaatttggattaacaaagagaaagaggatagactttgtgaggcttggaatatattttgcagatagtgaatatcacaagttgactgaatagagatttaaaaaggtatgtattctagttcaaggctagtatgttaaggtacctgctatgtatcatgttaaaaagaggcaaaaaatatgttctctgacattaatgtcaaataagaaagtacatatacttatgaatagtgtgacatatgatataataaatataaataagaaacaaaaatagaacagagtggagactggtcagaggaactgatgaaggctgagtcagagaggtatcgtctaaagaatgaatagacaaggaggattgcgtttcggggatctggaggagcctcggcaagggaggcatgcacagtattgtgcatttggggaactgtacaagtttcgtgttgttgggatttgacgggagaggacgggcaggaatatggggggtggggaccaggtcatagagagcctcgtgttcatgctgcaactcttaaacttcaactggtatatctgggaagtgattgtagtgtttttaaacagaagaaggagtgccaggttttctgttttagaaaagagtcaccggtggtggagtggagaatgaatttcaggagagcaaaacagaggcaaggcaattattcagaaagaaggcagggaagaattagaccagattagaagggccttgactatcaaataaggaattaacttattcaatattcattgatcatccactctctgaggcacgttaggtactttaggctatattttcttatgataattctcacagcaaacctgtgcgttcgcatgtggtattgtaactctttaccaaataaggaagcccagactcagagacattaaccagtctgcctgagatcacacagccaatttttgtatggcaggagccaatgcaaagactagtcagctttggaaaaggacattagaccctaataaacagacaaagagaggtcgagggtcagactgtaaaaatttcctcattttgcagaatttattccaaccttatttgaacatttgaccactatatatctctttagtattaacaaaaatattaacaaaagtctttttacaaaactaacttgtccgtctctgcgattatattgctgttttttttccttttcgtgtgttgtatgttgtttccccttaatacataattgagtgacagtctccatgcttgactttgccttaaagccatattccttaaaatgagtagtacttcttaatttggagggccaagcacttcattaaaagtctgataaaaactatggactgtattttaaagaaatacacatatgtgtatgtacttacacatacatgcatagatgcaaagtgttaacatctaattttaagggattcttgggcctctctgggttcaggagttcccaagtacttaccacataccaaacattgtctcctctaatttttaccacacgcctgtgagctatttccattatgccctttttacaaatgaaagattaaggttaaataatattcacaagaccacacaaggagtaaataacagtttcaggacttgaacctgtgttgatctggctctagagccaagctcttaccactctcttatcctgtctgtcacttataccaggtaaagagggtaaaacaaagaattattctcccatagaaaatgatctggcctagtaactaggtagaaaatatattcttgactttgacttttcaaactgtattagcaaaaaatgttgctgtgagttaatacatctagtgaagatagactctccttattttttgctgtttccaccaatttctgtggttttggggggtaccaggaaaaatgtatttaataactgaggaacaaatcaggaataggaaatgtattaatacatgcctgtatctggtttttgccatggtttatccagatgctgtatcttgtgccttttcaggatttggaatatcgtctagatccaaagaccaaggaactgcctcatttaagaaaccctgacatacttgtgggtgaaaatgacctcacagccctcagttatcttcacgagcctgctgtactccataatctcagagtccgctttattgattccaaacttatttatacatattgtggtgagtgtgcattgctgtctgagtgaactgtgaattcttttttgctaatggacataaccatggaaataatgtgcatgagaaagaaggctggggtggatcttttcttagaaacatattaacaagatttcagttcagttgctcagtcgtgtctgactttgcacgtgactttgcacgccaggcctccctgtccatcaccaactcccagatttacccaaactcatgttcattgagtcggtgatgccatccaaccatctcatcctgtgtcgtccccttctcctcctgccttcaatctttcccagcatcagggtcttttcaaatgagtcagttcttcgcatcaggtggccaaagtattggagcttcagcttcagcatcagtccttccaatgaatattcaggactgatttcctttaggatggactggttggatctccttgcagtccaagggactctcaagagttttctccaacaccacagttcaaaagcatcaattctttgttgctttctatatagtccaactctcacatccatacatgaccactggaaaaaccatagctttgactagacggaactttgttgacaaagtaatgtctctgctttttaatacgctgtctaggttggtcataactttccttccaaggagtaagcatcttttattttcatggctgcagtcaccatctgcagtgattttggagccccccaaaataaagtcagccactgtttccactgtttccctatctatttgccatgaagtgatgggactggatactatgttcttagttttctgaatgttgagcttgaagccaactttttcactctcctctttcactttcatcaagaggctttttagttcctcttcactttctgccataacagtggtgtcatctgcatatctgaggttgatatttctcccggcaatcttgattccagcttgtgtttcttccagcccagcgtttctcatgatgtactctgcatagaagttaaataagcagggagacaatatacagccttgacgtactccttttcctatttggaaccagtctgttgttccatgtccagttctaactgttgcttcctgacctgcatacagattctcaaaagatttaccagtgttcattagctagttgcattttatgttgaataaactcttttatgaacttacataatattactcagaatacaaagaactgggtccatcttttgctttttctctgcatggaagtcgtatgccatattcgatactgatttacaagttatattcatctcttacaaaaaccaatacttgaagagtagacatccaaacacttagctctggggtgggttcaagatggttttttctttttctcaattgcttagcagtgaaggactgacttgagttgcagtaacacttcttgcttgatctgcttggctgggcccctgctcattccagtactagctgccagtgacccggcccaggattatttttttccctctcctagcagttaagcatacatgtgtatgttccccctttccttctttttcttctttctctgtttccttcttattcttcattttctctagctcttttttctctactgactttttatccttctttcactaagtattatctgctgagtctcaggtctgggatttccatccctttccttctaagtctctcctgcatggacccaacttggtgctcaacatttcttcactgagctccagtttggggcagggacagctatcttctcttcttaaaagaatttatattttttatatccttgatatttcttctttttctttcctacctattaagtcttttgctcaattttcattttttcttcagtttatatttcttgctcatatgctaccttttcagtgaagcctttcctgtccaccctatattttcttctcctaggcaacaatattccttctctgtttatcccccattttccttactatctgtcctgtaatatatatatatatattttttttttccttatttattgtctgaatttccctctagattacaaggtccaggaggacaaagatttttcctctttaaaaaaaaattttttttttgaaatatagttgatgtggtggctcagacagtaaaaaatccacctgcaatgcgggagacctgagtttgatccctgggtggggaagatcccgtggagaagggaacagctacacactccagtattctttcctggagaactccatggacagaggagcctggtgggccccagtccatggggtcacaaagagttggatatgactgagcgactttgactttgactttacaatgttatataacttacaggtgtacagtatagtgatacacagtttttaaaggttatactcaatttaaattagtcttttttttttactgctataaatatagcacttagaaaagactcaaaacttaattgtagtcaaatatttgttgaatgaatgactaaagttaacatatatctgctataaaatttaaggaaataccaagaaaaatattaaaaaggaaaaataattacatgtaattcaccactgaaaaataaccaatattaagttgtcttatatcctgtgtgtaaatgtaaaagagtaaataaatataaatatataaataaatataaaattggaatcagtctgtaaaattggaatcagtctatatatagttgtgtgtcgttttttcctatggcacttaatatttgtcacaaacatgatctggatcacatggatataataatacatattaaaccactctccctttttaaaaaaaattattgaaatataagtgattcacaatgtcatgtttagtttctgttatacagcacatgactcagttatacatatgtgtattctttttcttgttcttttccattgtggtttatcacaggatatgaatatagtttcctgtgctatacataaaccactgtccctctgttatgtattttgtttttacttttcactgttatgaataacattataataaacatctttatttttttttaatccctttacatgaatatatgtttatttcatttggatacatttctagaagtagaatttttggtttaaatattataaaaatatttgaagttcttccagtattgccacaatttttactactttaaataacctagtcttgtttgtaaatggtgttttagttaggacttaatggttcacaggcaaatgctatggtatattttgactcttgacaatttgttagtttgatattaatcgaattttaactgtgattctcactttaccacgtttgatatgcccattagaatattattgacttcttttgttttttttacctttcttcccaggtatagtcctagtagctataaatccttatgaacagctgcctatttatggagaagatattattaatgcatatagtggtcaaaacatgggtgatatggatccacatatctttgcagtagctgaagaagcttacaagcaaatggccaggttggtggaagctctattactatttcattacttttattggatgtgatcatttcttctttactgagtcacagatattttaaaatacagtgaataacaacttgtaaattattaaataaacagcctcaattaatttgtttcaggtggcctgcgttattatccaaataagctaacatttgtaaaaggatatatagtttttaaaaattacctttgttatctcactataatcctgtgactattcaaggacagatgtcatgttttatagatgaatgggtcaaggtttggaagtattaagtgacttgcccaatgttattcatctagtcagtggcagaccagaactaaaaggcctaaatgctgatagaaatctgtctgtatctggggtaattaaaacagaaaactgtgagttttaagttagtgaattttagggcatcagtgatcctgaacaacgtcaggaaaatgtctttgatgataactgtggaaccctaataatatttttagagtggagagtgagagaaaaatctactttcaagactagattatgctcttggtaatataatttaatgcaaaattatgcatgcattgaagaatagtctatttttaacctatttctccagtctacaggtaaggatgtggcatcttataaatatgatattggaaaccctcaagcagtttatggagagaaaactaatactgaagagttttttattttctcctttccaacaagagagaatgtttgtacataattggaccagtgtgtgacagaattttagaattatttcaatgacagaatccatagaagtcattatacccttttgttagtaaaatagtattgatacttctaatggcagttcagttcagttcagtcactcagtcgtgtccaactctttgagaccccatgaattgctgcagctcaccacgcctccctgtccatcaccagctcccggagttcactcaaactcaagtccatcgagtcggtgatgccatccagccatctcatcctctgtcatccccttctcctcctgcccccaatccctccaagcatcagagtcttttccaatgagtcaactcttcacatgaggttggcaaagtactggagtttcagctttagcatcattccttccaaagaaatcccagggctgatctccttcagaatggactggttggatctccttgcagtccaaggaactctcaagagtcttctctgacaccacagttcaaaagcatcagttcttcggcactcagctttcttcacagtccaactcttgcatccatacatgactactggaaaaaccatagccttgactaaatggacctttgttggcaaagttgcttttgaatatgctctctaggttggtcataactttccttccaagaagtaagcgtctttttatttcatggctgcagtcaccatctgcagtgattttggagcgccccaaaataaagtctgacactgtttccactgtttccccatctgtttgccatgaagtgaagggaccagatgccatgatcttcgttttctcaatgttgagcttgaagccaactttttcactctcctctttcactttcatcaagaggctttttagttcctcttcactttctgccataagggtggtgtcatctgcatatctgaggttattgatatttctcccagcaatcttgattccagcttctgcttcttccagcccagcgtttctcatgatgtactctgcatataagttaaataggcagtgtgacaatatacatctaatgacaggtaacagctattaagtactctttctgtgcaaggcactgtttaattgcctcccatttactaagtagttttatccttataggactcatctaaggttggtattatcattttatagatgagaaagttaatgatagaaatgaacttttacaaatcagaaacagagtcgcaaacatagagaatagatttgtttccaggggtgaggcagagtagaagagggatggactgggagttaggattagcagatgcaaactattatatacagaatgaataaacaataaggtcctatgtatagcataagaaactacattcattattctgtgataaaccataatgaaaaagaacattaaaaaataaattttattagtaaaatgatttcaaaatcaattagtctgacactatgaaatattgacatattaaatataaaatgacaaaacatggttttgttctacatgtcatattatttcagattctgctttagaatagtaaccaaaagtttacttttaagtttaaaagtgagaaaattccatttattgatataatgttttccccctgaaatattggactggccagagttcatttgggtttttccactacatcttatggaaaaacaaacttgaatgaactttttggccagcccagtagaaaagcctgccagtattttatttgtttggtattgagctctgcaaaactattttagcaccttacaagttgaacctgagagctactgggcagagaggggattgcatggtattccctaccaaaaaataaatccctgaaaaattttttactgttcatagagaattatatgacttttttgaaaatactatttttaaaccttgttactggtaatctgcagttttaggtttatatgaatatttctagctttttaccctttgatttgctttggtttcttaatattacctccttaatattttccctgtgactccagcatgacttcttaatggcaagtttgttttccctttgttcagttttgtttttagatagttttaaaatatgtatcagtcaacgatggtattatgtttgccgcttatatgaattaatctacacccataaaatgtgccacaagcccatgcattgggagcgtggagtcttaaccactggaccactggaccctaaggtgattattttaaactttgaaattagtaagtaccttgtgggaaaatactttgagactatgcaaatatcctatttctcataatatactttcaccactaattttaacatccatcagcggttcttacctgcagtagttattactgagtgattgtttgctatttccatcattccttctgcaggtatgaataggaagtctcatctaaggaaaagctatttctttcctccccaacttacttattatttattttgtatttgtatcagtgtgaactcatgaacatgtatttcatactatggattattctgcattcgcgtgtgtgtacttagttgctcagtcatgtccgactctttgcaaccccatggactacagcccgccaggctcctctgtccatgggtattctccaggcgagaatactggagtgggttgccatgtcctcctccaggggatcttcccaacccagggatcaaacccaggtgtcctgcattgtagacggattcttcacctactctacattgctatcattatttattttgttcaaactgtctcagatttggccattgagagctctttccagtgtcctttcacattctccatcatcttttgatcatttccttactttctagcagcacctgactcattttctaattttcttgccccaacccccaatgaattcagccatttcttcaaggaccttgtactaaagaaatggtacttaggaactaagatctgggtgctagatgcattcactacttgggtatccttgcctataaaccttctcagtgctcacagctaagaaatatgttgccccccacaccttcaccaacagaaggtgttgtcataatttaaaatttccaccaaactgacaggtgagaaatggtatcctagtgttgttttaatttacttttctctaagtagcacctttctctaatggcaacccactccagtactcttgcctggaaaatcccatgggtggaggagcctgataggcgacagtccatggggtctcaaagagtcggacatgactgagcaacttcaccttcacttttcactttcacacactggagaaggaaatggtaacccactccagtattcttgcctggagaatcccagggacgggggagtttggtgggaggccgtttatggggttgcacagagtcggacacgactgaagtgacttagcagcagcagcagcagcagcaagtagcacagactttgcacatctttacacacacacacacacatgcctgtatctatataatgtatatatatttaaaacataaaaccattaaaattactgattcctctaatttaagttcaaatcacagtttttatttaatttacatttcatctttattttttaaatttttattgatgtttattcttgctttgactggtgttggggtaccatatggtgatcttctgttttgtttttatttatttatttatttattttttcgttaaattgggtcttcattgctgtatgcgggctttgtctggttgcagtgagtgggcttctcgttgtggtggcttctcttatggtgaagcatgggctctaggtacacaggcttcaattgctgaggcgcgtgggctctcgttgtggcgtgttgactcagttgccctatggcatgtggaatcttcctggatcagatattgaactcaggtcacctgcattggcagctgattcttaaccactggaccaccagggaagtcccaaaaccatagtttttattcttgatttattttttcttcttttaacttctttctttgatcttgagaaacctgactgtccttatccatagtatatttacttgtttgctcattcctagaatattcttagtttcagaaatgctaacccatagccctgcgaaaagcaaatttaccactcaagtgcagtattgtgtccaggtcattttgtctttagtcttacatgatatgaagaaccaatttccaaagttacctaggttggttcattttttccccacttattttattaatttgttgaaccactctcccatatatgatcacttagattatttgcaacattttgcaattacaaacagtgctacaataaataagtttgtatatttattatttattatatacatttttatatttgtatttctttatttgtttctcttccaagttgcttttaatgaagtcttgggaacaaaatatacagtctgactcagatacaccatggagcaaggcctagataaagagataattttgcccacatcttggagataagggtgatatatatgtctttatgaaaactattttttttaaagtgtaaactctgtacaacattctccaggagctagagcccaagagaacccactggcagtctattatcggtaggacctcagaggcatctcagggattgaaggagaggtaggcagtttttccacagctggaggaggctgcagctgtcctcatctgtgccaggaataccaggcagtggcaagcagcattggaagaacggagtggggcagtggtattgggcagccctcaatatcttgatcataaatatttggaacaatccatttggtgatatttattgccaatggggccagagctggagggagatttctcatccaaaaggggcagagagtgtacctctctgcttgaagaggcacaggagaggtgatgggagcaaagagatagagcaagggactctcacattcttggctacctcaactggacaactgccacagggccatgagcagcttaaaccacccaactgcttttgggaggagggtgcagaaactaatcactgacaggctttggtagtttaggttcatacctgtttcagagcttttctctaccaacttgttattacaggaatgcctcagctggggtagaaggtctggttgaatgtgtcttcatgtccaacattggtgcttttgctccaagccaggaccagttgctcttagaatctatggctcccatgtctagcacagtgctgtttgaactgaacaccatggccttggtgacttgtgacacaatggtttgaaaatcaagatcgctgtgtaagcagatggaggcattgctgggtttggggcctatcagctagtacatagcagaagtggagtttgacttcacattgtacacggtcttacccccaaatcctaattgcttgcattgggttacacagtgttcagtgctaatgcagtaaccttgaccagcctttaagaagacaagttagaggtggagcacatttttgtatttttaaaagtggcattggtaggtcaaaaggtaggtataaatatattgccagattccctctaaaagagttgttctggtttacatttttgcctaaattgttcaagagtgtctatttccccatagctttatcaacaaaatatgtaatctttgtgtgtgtgtgtgtgtgcgcgtgtgcatgcttagtcacatatgactctttgcgatcccatggaccatagcccgccaggttcctctatcccggaactgtccaggcaagaatactggagtgggttgccatttactactctgggggatcttccccactcggggatcaaacctgcatctcttgtgtctgctgcgtttgcaggggattctttaccactgtgtcatgttcttgccagtttaatggtatgttaatgttgttttcatctgcatttctttaaatatgagtaagtttggatatcttttcatatgtttaagagcactttcattttttgtttgtttttttgtttatgggctgatttgttgattcaactttttccatttttctgttgtttttggttttttgatcctcaattttaatagttaaatatatatatatataagccctttatctgtgttatattgcaaatacttcccctcaattttattttgcttgtaatgtcctttttcaagcaaatttattcatcttttttatttctttgaattttaagtcactgttagaaaacctttctctacaccaaagtaaaaaagatttaattctcttttcttctagtgtttgtattgtttttatagcttacctttagatcactgatcccattggagtttatacatttatatgatgagagatatatggatctaaatttgtcttttttccaaatggctacacagttatctcagtgtcacttattaagaagcccatctttggcccagttatttgagataccacctaaaatttatcatgccctcaattttcttatgttcttggtttaatttcttggctatattctttcctcttcctttattcatgtcccagtaccacactttgattatagtgattttatagtatgttttatgtttgtgtgtctgataccattaaccacccctcccctgacacagtgtctttttcgttattttcctggttatccttaggcatttgtttttatatgtagattttgatattaacttatccaactccataaaaaataaagctaacttttgagtaataaataacatgaaggaaaggaggaagcaagccattcagatattggagaaagaatattccaagcagagagattagcaattgcaaggaccatacaaagccttgaggacttttgtagcatatttgactttttctctgagtgtgggttttgagcaggggaatgacatgatctggcagctgtgttaaaaattcatgatagattcctaccaaaaatgtatatcctgaatctaatcataagaaaaactaaatgaggtgtatactgaaaaatagctctatatactcttcaaaattatcaagatcaagatagtcaaagaaaggctgaggaactgttcctgattaaaggagagggtggaaacatgccagtaaaatgcagtgaatatttagaattgaatccttgatgatgagggagacagggtaactttgtaaggggcaacactggatgattgtaaaataggaatatagactgtagattaaataatagttttttgtcaattttacatttcctgattttgatcacagtacatacataagagcaatgtcattgttcttaggaagtgtactctaaaatatgtaggagtcatcaagtctataatctactcgcagatgtttcagaaaatatcagattaagagaaacagagacatttatgaaacaaatgagttctgatgagatggatgaaactggagccaattatacagagtgaagtaagccagaaagaaaaacaccaatacagtatactaacacatatatatggaatttagaaagatggcaatgatgaccctgtatgcaggacagcaaaaaagacacagatgtgtataacggacttttggactcagtgggagagggagagggtgagatgacttgggagaatggtattgaaacatgtataatatcatgtaagaatcgaattgccagtctatgtccgatgcaggatatggcatgcttggggctggtacgcggggatgtcccagagagatgttgtggggaggggggggggggtgggaggggggttcaggtttgggaacacatgtacacccgtggtggattcatgtcaatgtatggcaaaaccaatacagaattgtaaagtaaaataaaaaataaataaattaaaaaaaaataaaaataaaaataaaaacagaaccacaaataaataaataaataaataaataaagttgaatttcaagaagaaaatataatttttggatttttttaaagtacttacaagctaaatgtataatatttcatataagaagcacatagttcatatatgtcaaggcatcagaataaaaaaaaaagaaacaaatgagcaaaatctaaacaattggtgaatctgagtgaagcatgtacaggaattcagtttactctttttgccattttctgtaagtttgaaatcatctcaaaggtaaaaatacaaacaaaacaaaaggactgaatgtaatgaaataagggtcaattccaggtaactagttaggaggattttgtattgatccaagtaagagctaatgataacctaatagaggagaatacagtcagagatggtgagaagtggataggctctggataaatttttaaggtagaacataagatggcttgcttatatgggggtatgagagaaaaagagaagtcagggatagtggcaaagtgtttggtctgagcacctaaaaggttggagttgctgtttactgagatggaagaaattcagacagagcaggttgtgcatgtaggggtggaagagttggaagaagaagggggtggagttccattttagatatttaagactgaaatggcatttttgacatctgtcctcaaagcagagttgacacaagtgattcttgccccgtagatacatgtccagtgacagcaacatagctaggatccgtggctcattacttctttctcagcatgacgcttacagagaatagtgtcctcatagaagattttcatagactagcctcttaattttaactgtcctgtcagcttacagaagagaagaactcagtgggctgctatgtctcatatttttgtttcacattcttatcagccttttctcatcctgaaactgattgctctctgataattaaagcacagtattattttccttaaaacatcagggctttttttttttaatctcttttttctctttaaaaccaagtaatattgattgcttgatttggtattgttttcctccactgtgaatggtagagcaaataaattttattgattgtttcatttatgggttttcttaaaataaatttgagagttacatgcataaccttagtgtaagggaaacaatatccatactagccaaagctacataaacaaataactatataagcttaagtcttctggtctccctggacctcggctttattatctgaaatagaaaacttgcactagatgacgtagctttacactgaaggcattctttggtgtgcatttgttttcatttggttcatggggattaatgcagaaatcttttagtctttccagtgaagggcaaaccatggtgaggagcctgcagagacacagaaggagcatagtatagacttttcatctggaaactaagagatgtggagtgtacaacttaccgctgctttaaccttggataagcagacctctctgcatctgacctctctgcatcattgtttcccccaaccaagaaaagagaatatttatcatgcttacatcagagatgaaaattaccttagatgataaacacaaaaagcattttgaaagatactatttaaatctaagctgttaccatcatcacagtcttcatcatcctggagtctcacgactctattgctaggcctttgcttagggtgggccctttttgcatttgtttaggcagtctctgaagcttcactctgagtttcattggccaagtggatgctggctgttatagatcataaaatctctcctgttactgcctgtgactcaccagccatgtggtatcaattatttctacttatgcagatatgaagtagcacatgctatgtgataaggaattttatatatgatatatatatatatatatacatgtgtatatatatatatagggactaacttctgttagtaattaggagctaccatgtttagaaatatactgtgtgccaagcataaggtcaggcatgttacctctaatttcattatacccctggaagcaaacatcattagccctgctttacaaatgaggaaactgaggaaagtaactttcagaccattgtgctaatagtatctgggaactgaggtttgaatccggctctgagtctccaaagcctatcttctttgttgtttaattttcttacttccaattacatgaccctatttatatatatccattactggacaaaacaggctatttcttttgtggcatctttacattaatttcacagcctctatagaaatggcagcccactccagtactcttgcctggaaaattccatggactgatgagcctggtagactacagtccatggggtcacaaagagtcggacacgactgagcgacttcacttcacatcctgatgaagggcttccctgctggctcattggtaatctgcctgccagtgcaggatacataagttcaacccctgggttgggaagatcccctggagaaggaaatggcaacacactccagtattcttgcctgggaaattccatggacagaggagcctggagggctacagtccatagggtcacaaaagagttggacatgacttgacgactacacaataaaaacacaccgatgaaacagggaagttaaattgacatgagaagaactgacagtcatatgacagacttctcagcaggaattgggtgtatctctaaggaacacttgttctcatttcctgagtaatctttctgcctctgtagcccagctttcattggtgcaccagcacagtcttatagcaaatatttctacttaaaaactaataggatgtattatcttatttacttattatctagtaagttttagagtttaaatcttttcttcttgggattaattaaaagcagaaatcttggagaaacagagcagagcctatcttaatgcttggcaacaataaaaatgtagaaaaaaccttgtaccttctaacaagagaaacagagactacagtttcaagtaaaagccatatcacagtaaatatataactttggaagaaagcattttattacactagcttaatatttttctttttttttatcaaggaattgaataagggagaagcaattagattgagtgcctgtaaagaaataaacctctagattttgttagattttgtttcatgagaatatgttcacttataaggtaaaagttagaccatggcaacacctgagagttaatactgaggtgagtgggtatagtaaattgtattctgtgtgagtcaggctggcattatttagtttcctcattaatgacttggatatgaatggaaggtatgctcattaagtttgcagagaacaagatgatggtcttggaaatatgaataatattcagcatgagcacaataaactagagagattatgtttttaaacagtaaagttcagaggaaaatgtgtaaaataatacacctgatacaaaatgaaatcttgatagatgtaatctaaggaaaggctggacagaccaaacagatacagattgaaggaaaacagactaaagtataacatctctctctttcatcaacccagagtggacattctatccttgaataatttagttcctggggtttcaggtgcttctccatagtttaattctattgccttttcccgtacaaccttgtttctcgttattattatatatgagtcaattcaggcatcaccttctctagaaagcatttcctggcatctcctcctcatgtctccctctccttctccatgctttcataagatcctgggtagacctcttttcttgtaattgttgttgtcgttgtttagtcgctaagtcatgtctgactctttgcgacctcatggatgtgtaacccgccagactgctctgtccattggatttcccaggcaagaatactggcatgggttgccatttcctctccaggggatcctcccagtccaggaatctaaattgcatctcctgcaccagcaggcagattctttagcactgagccaccaggtccactatattttgactgtacttttcagtctgtctcaatacgccctgaccatagagtcttttatcttcataaagtgtttggcatattgtgactactcatttcattgtttaatgaatgaatgaagcagtattttggggtggtagcttttgattcacattctagactctggaagtaccattgactaaacagatcacaagagttcacttttacttcagggcacccagtacccaggccatttaggatcattgcagagacacttgagaggactggctaagccagaaatcataagttctcagttcctgcagccttaggatgctccagattgatttgtccttgatgaagaatggtaaatctgtattccttaatttggttttatcaggtccttgaaatgatatctacatcccagtagtaaatgaagggtcttataaaaggatgtgagtgccttaaggatcagctaatcaaaatttggaagaacaataaattattatttacatatttgcacactttcactttcaacattctgaaacttagagatcaaataagtagagtaggatagactctgatattcaccttaaaaccataaaattttttgtcccttatgtttttggctgttttctccctatctctattatacttttcctatttttcccttttcatgtctttattatgtattacccttcttccttttatgtctctagttgtctttcttacttctacctatctctgcttttgtctctttttgacatttcatcctgtgctcacatatagctgaacaacattttaaagatgactgtatcactgcagatggtgactgcagccatgaaattaaaagacgcttactccttggaagaaaagttgtgaccaacctagataccatattgaaaagcagagacattactttgccaacaaaggtccatctagtcaaagctatggtttttccaatggtcatgtatggatgcgagagttggactgtgaagaaggctgagtgctaaagaattgatgcttttgaactgtggtgttggagaagactcttgagagtcccttggactgcaggagatccaaccagtccattctaaaggagatcagccctgggatttctttggaaggaatgattctaaagctgaaactccagtacttcagccacctcatgagaagagttgactcattggaaaagactctgatgctgggagggattgggggcaggaggagaaggggatgacagaggatgagatggctggatggcatcactgactcgatggacatgagtttgagtaaactccaggagttggtgatggacagggaggcctggcgtgctgcgattcatggggttgcagagtcagaaatgactgagcaactgaactgaactgaactgtacatattttatacacatttctatttcctgttcttcatttaaaagcaggtagaaagagcttacatttttttctctttgtagccctgtgttgattttgaccatctcagattcaagggtcctacagagaagaaatgtttggccatgtcaaacatagccctttaagaccatctgagcatctgtcggcctgtcctattccaattgtacttggtcccaagagtttacttggcttagagtacaggttgtggcatatccaacatcttaaaaatcaactctggagttaaacttttagtttataagtattaatagtttagaattaagaaggactttgggtgctatttaatcattaaaatgagggaaactgtgacccagagagggtatgcagttgctcaaagtcatgaaattggtaaatgacaggtcaaagatcagagcctgattcagagaaatttctataatggaagagtggtgcttatttatatattggagtgctcttctaggcttggggaagaagagaagcctttgcccagaagcagggggatataataaatattggagtcccttaaaaactgctggtcatgtggatcctggatcccaaatctcctggaaaagaaaatgtatctggtgtgtgcttgatatcactgtgtgtatgtgtgtatttgtacaaatatgtgtgatccatctgatcaatcctcaaccgtatctcctttcagagttctctttttccccatggtataggaaagggcttctacataatgaagtttaaattttttggtataacattttatcacacatgcgtgcatgctcagttgctcagtcatgtctgactctttgcaatcccatgaactgtagcccaccaggctcctttgtccatgggattttccaggcaagaatactgcagtggggtgccatttctttctccaggggatcttcccgactcaaggatcaaacctgcatcttatgcattggcaggtggattctttaccactgagccacgtgggaagccccaactttttatcataaagacttgaaatagtattttaaaggcagtacagtttaggataagagttcccactaatatttccttttcatcagactagtggaagcctcttcaccttgtttattgttggaaagcatgctgggaaaattttgtcaaggtagctgtcacacaggggatagtgacagaactgatcatgcaggaattaagaagagataatttgtctaattatattatagaaaggaatccaaagactgccgatactgtcctttgattaatgtatctgagaacattaaaatgttctaaatgactgaaaaagagaaaggtggtactggtcctacagcgagaactggttaagagtgatttatcttgaaatcatttgtatagaggcagtgagagtatctgagtatagaaattcaaataaaagggaatgaattgatgactgtgagattcaaggattttttttagaaatgagaattatatgcaagcttttactgttacgtattaaatattccttagtgacaacctcggtcctaattttccccatagtatgggagtcaaagtgtcagaacaggctgtttacctgccctggtagtgtgatgtgaactacttaatcaggcctgagttggatattcccattgtacttttcaaattttctaaaataatgtggtaactcccatttctcaatgaaaaaacagcctttatcatagaaaaattttcgtactttggaaacttattatgaatacttttgattctaccactttggtgtctcttaaacccacctgcctgtctcagtcaagaccaccacagtctttgttcagactttcataccttttcatctggaccccctgccactcatatccacattgctgccagagtaattttgctgattggattgtttattttctgtttaaaaccctgaagtagcactctgtgacctgtaggtaaacttcaaattccttaacatctcatgtaagatctttgtgatccacttcttactaacctctgtggccttatctgtcattacttcatgttctagccaaatgttctcctttccctggaatgtttctttcctaacttcttcccttgttttctcttactcatctttctagactttgctggatcatctctagggagccttccttgatcacctcttcttctcagtacctcattacacttattatagtctttaattattagtttgtctttcctctcagaccatcagccactggaggatacagatcatagctttttaaacttgtatcccttgtatctagcactgtgtttggtgtgtagtaggtgtttgctaaatgcttgttggataagtaaatctcttttaaaagatgaaaaggtcatcttctgtagcgaaataacttcccaatcttgtggtgtgtaggatagttccactaaaaccccctgaagtcatcttgtctctctgtaaattaagggcacaaaggataccacctttatgaacttgttcagttaatttgatgggttgtagctgattgctagtttcatctcaggaagttttagttcctgcttctatcccagtcaaagtcatagccaaggcagatttattcctagactcactttcactcagtgcacatttacagcatttgtgatgtgtagactctggactaggtgctggatattaacagtatggtaacataggtccttatcctcaaagaaatgttagtcttatgagcaagttcatcacctagagttttaagtcactgtatgagtgaattaaagatgtatgtaataatagatagtctttgagttctaacatatttgaataaatcagccagcaaatgaactgtttattctctggtaatgagggtactttagtaagaactggaatttgtgagagatactactttatggactgttagccagtaggcaatttgtctttttaattaagtagtattttcttctaggttcacttgctgtaattcctgtctcttctgaaggtggttgacaacagtgctgtaatatacaaaaatcattttgtttattaataaagtaatatatttgagatatgtacccacaaaaaattcagactgttacagattcattcttagatgcaatgctctcaaatttaatgcttgatatcttcttctccttctctattcattgttacttggtaagttgttatttttattaggaaatgttgttccttgggttcctcctcacaattttgcatatgtaaaccagcaagaactcaccttggctcactgatgagaacacagagaaaatgatgttaatcacatttagaagtgggcagtaatgtcagttactcttctttgttttacagagatgaacgaaatcagtccatcattgtaagtggagagtctggggcaggaaaaacagtctcagctaagtatgccatgagatactttgcaacagtcagtggttctgccagtgaagccaatgttgaggaaaaggtattggcttccaaccccatcatggaggtaagacagtagcagccacggccttccaactgtatcctctccataagaaccacactgaagaatttgattgaaacagcccatgtcagaaagtttgggacctcccaaccactaagagtaggaaaatactgttccagatattagtaagagatctaggaaaagtaaaaattcagtaaagtagacattttaagtaaagtccagctataaaggattccactgtattccatatcctgtgtttttaacctaccactacattgttgcctccaagtagctggcaatggcacttcttttcctcaattaatggagttgtatctattgctgcttgtactggaagtataagctattcctttcccccccaatcctgagcttatttaagctccttctaaaacgtaggattcactatgctcaagcatgaatgagttttattcttcctttacccacatttcattttctgtatgtagtctcatgtgtttagctgtaagtttttatatttttccaggtagaattataaacgtaaatcatgatcttggaaacatttttctgcatgtttctttcaagcatatcacacagttttagattagaaaaagaaatttactaatataaattattgaaaaaaggaagatctgtgaaaagatgtcctttttccccccttttgtttatttaacttaaaattttttttataatgttgtgttggtttcttccattcggcaacacaaatcagccataattatatatgcatcctctccttccctagcctccatcccatccccacctccatcccatccttccaggtcatcacagagctccagactgggtttcctgtgctacacagcaacttctcaccagctatccatcttacacccaattgtgtatatatgttgatgctactttctccatttgtctcactctctctcgcccccaagaccattctctaatggagtccgtctgtatccccattccttcctgccaataagttcatcaataccattttttcagattccctgtatatgtgttaatatatttgtttttctctttctgatttacttcactctgtataacaggctctaggttcacccaactcactagaactgactcaaactcattgaaaagatagcctttcaaaagtagactatatagacaaagtagacatgctcagaccaaagaaaacagaccttttcatgtgaaaatttgagtattttaggatttgtaactggaggattatttgtgtattgatttgattttaggaaagatacattaaatggagaaaataagtctcagtaaatggagagaaatgactttggacatgcagaaacaaaccttttcttttttttttttttttttactgataatcctagtcagcatgctcagcattctttattcctgtttctttccttttgtcaagtcttatttgtcacccaaacacagatggcgtttagaactggcctggtgcaccagtgatacaagtggtttttgcactaatcagtccagaggtaattgtgcctggtgtgcagtgctgtgtgtgacactttattatagtatgctgtgaccccttgcccacagggctaccttctagagcagcaggacttctgttcttgggattgacaaaataagagatgctggggacgttaagagcctcctggactggaggagctatggaaagagaactggaaatgttttctgaaatagcatgtacaagagaaaacagatgcttatgtcaaaagaaagcagtaaagatcttaagaaaatattaagattttgaaagaatttattattatttttttaatttttactatatagaatttaaactatatagatataatggtggatcctactcatgttactattgtgataatatagtctgtatagcccatttcttgttttggtttagataacagcagggatttactttctgttgttctttttactgtttttgattgtaacaacacattcttggtgttcaacagtagtttagtccattcttagtccctaacattagaagataccaaagtcctgattatgatggcattaggaaaccccatctcttctagattcagaccatataataacgtataagtctggaatatgtctagttgaaggaaatattttatgaaaataactacattttttcctacaacacagatttgtgttatgtaggagtgatattaaaaatttgaaatggctacagatactactttttaaatacaattataaggaatttacctcattcgctaggaagaacaaaaaaagataaagacagcagttatacattttaaaaaattaatttattaaaatgtttaatgacagcagttatgcttagctgcttcattctataatattgtttagtttctctgcaggaatttggattaataaaatttattaaagagatcactacttttcaacaactacaaataagggcatcccagtttgaaaggttaaaatggaatatagggctgaaaaatggtgacaaagagtttacagttacaggaagaaaacaggtaaaatattgaatatgtggcctagaaaatttgtagcttttaagcctgccttgggattatgtctttgtatcagagccctttacggtgatgtcaagaaaggcatgtctatgtctccagtgattacagtcatcccacaccttgaacattgtagcccagtgacttatgagatttgcaattatcctttggaaagccagcagctcctcatcctcagcatagactccttttgcaaaatacaaatgatgtacagagaaataaatgattcttttttgctcaattttatgatatttgcttttttgcccttcttatttcctagaaatttttatcctaagatagggacaaggaaagtgatgggggcacactgggtcttaatagttctttttactctttaataaattgtagttgaagatttgcatctccatttagtaaagaagaataatgcactcaacatgtcattgaaatcagtagtgaaatcaagaccacaaaacttctttcctttaacaatttcttgctgattgaaatgaaaacagcattagggaggctgttataaatacagtacttgtaaggctgatgaaacacttagggggaaaggacaaaaggcactatttatatccagaaccttgtttccgtatcgggttaaaggcttagaatcatatagttttatttttgaaagggatgctactgctcatctattctagaagctgaagctgaatggttctatgaagacctgcaagaccttctagaactaacacccaaaaaagatgtccttctcatcataggggactggaatggaaaggtaggaagtcaagagagtactctgttacctgtactccagttacttggagtaacaggcaagtttggccttggagtacaaaatgaagcagggtaaaggctaacagagttttgccaagagaatgcactggtcttagcaaacacccacttccaacaacgcaaaagatgagtctacccatagacattaccggatgttcaatattgaaatcaaattgattatattctttgcagctgaagatgcagaacctctatacagtcagcaaaaacaagacctggagttaactgtggctcaggtcatgaaccccttattgccaaattcagacttaaattgaagaaagtagggaaaaccactaggccattcaggtatgacctaaatcaaatcccttatagttatacagcagaagtgacaaatagattctagggattagatctgatagacagagtacttgaagaactatggacggaggttcgtaacactgtacaggaggtggtgatcaaaaccatccccaagagaaagaaatgcaaaaaggcaaaatggttgtctgagaagtcctcacaaatagctgagaaaagagaagcgaaaggtaaagcagctccttgggttttgaaatcactgcagatggtgtctgcagccatgaaattaaaagacacttgcttcttggaagaaaagctatgacaaacctagacagcatattaaaaagcagatatgttactttgctgacaaatggtctgtatagtcagagctatgatttttccagtagccatgtagagatgtgagagttggatcataaagaaggctaagcatcgaagaattgattttgaaccgtggtcttggagaagactcttgagagtcccttggactgcaaggagaccaaaccagtcaatcttaaaggaaatcaatcctgaatattcattagaaggactgatgctaaagctaaatatccagtactttggccatctgatgcaaagagccgactcattagaaaagaccctgatgcccgggaaagattgaaggcaggagcagaaggggatgacagaggatgagatggttggatggcatcaccaactcaatggacatgagtttgagcaggctctgggggatggtgaagggcagggaagtcttccgtgttgcagtccatggggttgcaaagagtcttacacaactgagccactgaacaactactgcttgtctagtctagtcaattaacacatgaggacactaatgctcttcagaggattaaatgatgcaagttggtggtagggcctgctgtgatacccagatctttagacttgtatttcatttactcctctaccattctttgctacatgttcatataccttatactcaaagacaaaaggatctgtttcaaccctggcaactcactgctccttctcacagagtgtagtgatcttggcaggtccactccacactctgaggagatccaagggaggtgacgtgtggaggtcaggataggagtcaggagggaggagaagctgtggaccaccctctcccagcttgcgcagttgctggggaaggtgctgaggtcagcgccccagaagcactcagtgactctcactgctctgccgctgctaccacatgtaagctcatctgctctttgacagagtgtgttgtgttgaaagaaaactttgcattgatccattagtttcattttctaaacaaaataaaataataggaatatatggaggctttttgttgtgtattttatagtgtcaagttttgctggaaaagtagtttccagccattctttccatctttaatgttaatcttaaatttagcagtgttctcattgtcagaacagaataggataatacctgtcatatttcagagactaaacgttttctttgattgatcagagattctaatgtgttaacttttgtggctgtgctaccactgttttcatcacttgtgccttttttttcccttatattgctttcttaatgctgcagagcattctcatatctttctgctgtggtttcagtgtactaatcctagtagtcacaggctttgcatagggaaagatgttaattatatgaaattatctaattaagcgtttaatatatgcactgtgtgaacccttgcttttctaactgtagcgtgctttttgctttgccttgaaggtaaaaattatggaagcatgtcacctaaatcagaaggcagtgcatatgccgtttaagtgtttaagattgtattaaaaatttagcagaaagttacattctctacattctgtagcagatgtcttgcaagttagataccactatcaaattcaaagccaaattttactgtctctggtttctgaaaattgctttgaattgagggggtaattactaacactccactaataagcaattcagctgaaacaaagagaccctgaacaccatggcaatatttccaggaaaatattaatttgttttagccagttttttacatgaaacagactacatttcaagaaatcaaaaacctagttatttaaccaggatgacttgtgcctaggcagcccctggtcccatccgttcttttcctttgccgacatgaatgagtgtgttccatgccttcttccgtggtggagacctcccaaccgctggcctcctgtctgctgtttctgaaaatcacttgtgtgaaaataacaaggctgatactgactgttagtatatacctgtgtcattgtgcagtgacaaagcatgcagtctgcaggggcaaaatttgttctgtttttaaaagaatcacttttaaagggttgtgttcacctctgttctgtctctccctgaacaaatctgttcatgtccgggcatgaattgcacttctaaaaccgtattttttttccccttgtttttcagtcaattggaaatgctaaaacaaccaggaatgataatagtagccgttttgggaagtatattgagattggttttgataagagatatcgaatcatcggtgccaatatgagaacttaccttttagagaaatccagagtggtgttccaggtaagccaggccagtatacatacagattgctatatcattccagagctcatttgattcccagattctcttgagcatgttacgtcagtatcactacaaactacacctggacggaaacatgtgaaacaatgcctgtcagagaataccccttagactaatagtcttgggactggacagtgatttaggtttaatggtttttaccgtttcctccagacgcttgtacgaaaagattagttaagaagaggtgctgatagtttagtcttgtctgtcccatttcccagttgatagggaagacattggtctctgcttcagggagttatgaactcagcttgaacccagttcaaaaaaaatgttcttgacctttttccttccttcttttctttcagaatatggtattgtttagatggaatgttgggagttaatagatcctcataactcagttgtgaaccactgtcagagaacacactcaagtctatgtattggtataagactttcattcacacatatgctcttagtccttttgaagtggggagtgggggtggcttccaggatctcagttccccaacctgggattgaacccaggcctcggcagtgaaaatctggaatccttcccatccccagggaactcctgctcttactccttttttatttgtaaatgggaaacactatacattacaacactgacagacatgtttatgctcagggaatgtggacctaccgttggaaaactcctagtataggactcctggtgacccactgcaaactgtgagatggggttcctctagctccttcactggatgcctgcctcatggagattgcaatagccctggcactgccatatagctgagtctatagtttccatcacacaagtctattaaggcttagaacgtgtgtaggaaaaacatactgaaagtcatgagtttgggcagcctagaactattcaggctttgacttgagggatgtgcctgatttgtggctacctaaatgtaatactgtgaactgtggtgttggagaagactcttgagagtcccttggactgcaaggagatccaaccagtccattctaaaggagatcagccctgggtgttctttggaaggaacgatgctgaagctgaaactccagtactttggccacctcatgcgaagagttgactcattggaaaagactctgatgctgggagggattgggggcaggagaagaaggggacaacagaggatgagatggctggatggcatcactgactcgatggacatgagtctgaataaactccgggagttggtgatggacagggaggcctggcgtgctgcaattcatggggtcgcaaggagtcggacacgactgagcaactgaactgaactgaactgaaatgtaatacctgatttgtatagtaaagcaatagttaccctcctccattgttctaatatctagatacacgcagaacagtgttattgtacacacatgtatgcttgaatgggttaaaaaatatttagtagccaaaagaaacaatgggggaaatatatatctaagagaagactgaatctaaatagtacaaatttgattgataggtagacaatgaaagggaaaattggtatggtgaccaaaggctagtagtggggcctaacccttcttgtctagaaactgtgaagcagttctagctgttccccaaccctcatggctatataatattgaggatgtttggttatatcaaagtgagtcagacagagagtacatatgtgatattccttcatgtacaaacatgatcaaatcatttctgtagattctccagcttttctaaatgtctgtgtactgaatcccctaaaatattgcctgaaaagtgaaagtggctcagtcgtgtccaactctttgcgaccccatggactatacagttcatggaattcttcaggctagaatactggaatgggtagcctttcccttctccaggggatcttcccaacccagggatcgaacccaggtctcctatattacaggcagattctttaccagctgagccacagggaagcccaagaatactggagtgggtagcctatccctttccagcggatcttcatgacccaggaatcaaaccaaggtctcctgcattgcaggtggattctttaccaactgaactatgagggaagccctcatattgcctattcgtgcttatagtcattggtatattgtttttttgtttagggtcttctgtccatgtaataagttttctttaccagacaccagcccccattatgcaggaaacctgaccttggccttacttgctgtattcttctgtcaactgagttcagctggtagagaatccacctgcagtgctggagacctgggttcagtccctgggttgggaagatcccctggagaagagaaaggctacccactccagtatactggcctggagaattcaatgtactatataatccatgcgttcacaaagagcggacacaactgagtgacttttactttcaccttctgtcaactgaatacactgcagaattcaggaatgtgatgatagaatataagaattatgttttgtatgagcagtattattacattgtattttgaaagtatgtatgtggaagaaggcagtcagaaaatactaagaaatggtcttagaattgtacacaatttattttctatctgaaatatatttttattgatttttaaatatataatctacattgatatggatgatgtagtgcattcatggatttcttacaaacaagtacagtagagggtccagtctaagatatgggaaagatgggactttttccccagagtgttaggaagaccatgaacctaagaggtactgtgggaaaatatgagtattgggccaacagagattttagtttccccaaaagtcgctgatctcttatgacagtgccatatagcaagctgtttactagtttaaaaagcattactatcacatatattatgttgaatgtgaccaacagatacactcacacagatgcacatagttaataaatcacttttcaataatcatagatattaaacataaaacttttctgagttttagattaaaattctctaattgaaaactcttcttatttcaaaggcagaagaggagagaaactatcatatcttctatcaactttgtgcctcagcaaacctacctgaatttaaagtgctgcgattaggtatgaatatgacattagatttattgtgctggtattatctcctgtttatttccaagttcataactttacttcttaaaaaggagattatcttgtcctgaaatatttatggatgaaataagaggtctacagttagcctcaagataacccatgggatggataaggggtaagtggctgtataaatggaacaagattagtcttgagttgatacttgtttaagatgagtgtgatgagtacacaagggctcattatactagtttctctacttttgtgtatgtttgaaatttgccttgtttaaaaggaaagaaaatataaaggagtttatgtggtagaaccatatgaagtctctgatgaagaaagcaggaaagtgtttgaagaaattattctagcatgtagattgaaataaaacatttaggaaaggactgttcacttaaactctacaaacattttgctccattatttaatttgagtcttgtattaaaatgtaactaaaaatacagacagtcaaactccagactctatacaattaattatgctttcactgcctctaaagcagagtggacataagggtagaagtcaaggccttttcatagactgcaaatcttttaaaattttttccttaattgtaggagatgcaaataactttcattacacgaatcaaggtggcagtcctgtgattgaaggagtagatgatgccaaggagatggcacataccaggcaggcctgcactttgctaggtatgtaatcttatccttgaattcttggaagcaatagctctctgactcaagcaacctttgatttggaatcttagcttagcttcatattaagtggtgaaaatttgggggagatttagcactttttttttcagatttaacattcttcataaaaaacatttagacatcaaatgggcatggagtttctcttggggatgatgggaactatactgaaaatatgttatggtaatgattgtacaactttgtaaatttacccaaaacttttgaattgcatacttaagatggatgagttttatgatatgcacattattcttcaataaagctatttaaaacatacgttcagggcttcaggggaaagatatgggactgtttacttacatttttacaaaatctgaaacgtagagctgaatgaaatgggtctctattcagaaactcatgttttataggatttttttgtgtatttgttttttttcattttaggtatgtttttgaggcctggaaatgtggttgagctggcttggtaacaagataatgtataacatgtagtttatttgtttctgaaatggctcaggtcactgttttgtttctagatttaaaaaatatattgtatctacatataaataaattgacctttagaaatgtagtatacaacttttagtgctgaattatttatttaaatctttcagcatatgaataactctaaagtcatatattggtattttgaggagtaacctgagatgagttaatttaatttaaaagtattgctaatcagagtactcttgcctggaaaatcccttggacggaggagcctggtaggctgcagtccatggggtcgctaagagttggacacgactgagcgacttcactttcacttttcactttcatgcattggagaaggaaatggcaacccattccagtattcttgcctgcagaatccaagggacaggggagcctggtgggcttctgtctatggggtcgcacagagtaggacacgattgaagtgatttagcagcagcagcagcaatcacagtatgatccaggaccactatggagcttgtaaaaatttagaatctcagactactaaactagaatctgcattttaaccagatccattggtgattcacatatgcatattatagtttgagaaacattgctttacttccagtgctaactctgtttacaaacagaaaattgtgaatttgaaaaagccataacacaggagatggtagaaacattccttgtaaaatgaactctgaattacctgtatgtgattgcatttttggaaataattttaatttttttatgtaaacataatatatatctaatattctggaaaaatcttaccttattgaaaagtgaagcctcatctggtaaaacaccaagggctgacttgcattctcatcctgcctgacctttcaggtcctgctctagttctttgtttaggtactcacttgtcaggctggggcatagcaccagcctgaacatttttaattgtgtggtctctttgaattatgcttggtctgtagttaaaagaagtgattgaataatttgacttaaaacaatcttactgagccacaacttgcatttagagtagagctaaatagtagtgttagtgagatacttaaatcgtgtgatgaatttgtttagcacttaccatgtgtcacacagtgtgttaactttactaaatgtattttctcatttaatgtttacaaactccctttgagatagtctccaatgtccctgtgtctcaaatcagaaactagaagggtgaaggtgtctgcctgtgtgagatggcaggtcaggagcagagcccggcttccagctgaggtctgtctcatggcacagcccatggtctaaactatagtgctaaagtgcatcatgtattaaggtcaacaaaggtgaaagtgttgttaactatggcacattataatgtgtacaacatctggcagtattcaagtgttaaaaattaaactcttaaaaagttaaattatctgctttaattgtttaattgtttaattaatcactgttcatttactctgttgtttcaggaattagtgaatcttatcagatgggaattttccgaatacttgctggcatcctacacttaggcaatgttgtgtttatgtctcgagattcagacagctgcacaatccctgtgagttcagagcaagcttcctgtgatgacagttgatttgtgttttagttttgttgattctttatggaaacaatgtgtttgaagtctctctattaactaacattaataattatcagagagataattactagaaagatacactatctagagtagaattttgaaccgtctataaagaaatgtggattcagatccctggttcacagtgattgcttgtgtgtgtgggagggataggggaggaaagaacttgggtatatgtgtgagctgtataaacagaggcgggaaatattagatgtgaaagttggattggtgagtctacagtgaagatcttgtttggcctatgacacacataccagaattgttaagtttatttgtcctgtggaatatggattaaaagttactgaagaaattgttagcagtgattactcctgggaaaaggaattagatgactggagagatatggtgtcttcactatgatttacatattcttccccatgtagagatgactacacactgagaattaaaatctaattcatttgtttaaactgtaataaaacctaatagtctcagaatgttctcgttgggcattgtgatttgcagtattttctgatcatccctatcgaagatcacacccaatgcacacattcacacatacatgtagataaatattaggtgttttttaactttattaaaatggaggcagttttaatattattaactctttttccatcttgcttcctcaaggattataataggaaacaattctgagatttatgtttcactcttcagacacccaaattgatatttgcaaatctacatgtagattaattcatgtgacataaatttggataaattagactttatttttgaaatacatgtttcagcatctccgcctgggtccaatcccagctttactatttatgtactctatgttttggggtgagttagttagcttctctgaaccttagtttcctcatttttaaaatgaaagagactttgttttttaccaattttggactggttgctctgatcacacttcatactggataaattgtattctaaaaatgtttgtaattaatatataagaactttaatacatacataagaaatattttaatatatatataaactgagtgaaaataggaacttggaacagagcagaaccctgaagcatggactcacctgagaggcgtttgctgaacccagtgacgctgagctatggttttcatagccaagtgaagtgcggaagacaaaaaacaaagcctcagactcctataaacaggggaacaggaaggcaaacttctgcctaaagctgagaccctaaatgaggaacatactcaccgcctcctccaagagtacaaagaaaaatcaagtctttaagctaggcggggggtacgggggagggcagaaatagttccctaaaaatttagagcaatgagctgcccctcatacttatttcccagtttgttttcatagttcctggatggtccccaacagcaacatacacaaaacttagcttacattgatcctggattggtagtgccctggatgcctgacagaagcaaatgcaaatccaccttcaatccaggcctcgacagagtcccatgagaagttacaagaaatactgactcatagtcaaaaatctcaaatctcatgataaaacaaaatagaaagagctaggcaaaacaacagatagcagtcaaacctactaagaatgctgaaagaaattaatagcagatttgacacaactgagtagataaatgataagctgaaagacagacatgaagaaatgatccaaaatgcaagatgggacccacagatggagcccttaacaatagttagaagagatgaagaatggaataatagaatctaattttaatataatgagaatttctaagggaaagaaagaagagaatgaggcagacaaaatgtttgaagaggttaattactaacaaatttcagaacctgtgaaaatgacactacaccacagatttggaaaggagaaaaaatcccagatagaacagataaaaaggaacccacctctaggctcaccataatgctaccataggcagagagaaaaatcttgaaacagaaagaaagataagacatactagtgttgaaaaagtagcaattaaactgattgctcacttcccaacagcaataatagaagtcagaaaacagtggaccatcttcagtgttctagagtaaataattaccaacttagaatcatatatccagtaaagatatatttttagaatgaggaaaagatagatgtgtttttggacaaatagaaacttgtgagaatttgtcaccaataggccctcactaaaggaaatattaaaagacatggttaagacagaaggaaagtgatctggatacaagatctaaaattccagagggaatggtgaatcaaaaaaagggcaaaatttgattaattaaaagaataataattatgaattgagcttcccaggtggcgctagtggtaaagaacccacctgccagtgtaggagatgagatgtaggagatgcaggttcagtccctgggtcgggaagatcccctggaggagggcatggcaacccactccagtattcttgcctggagaatcccatgggcggaggagcctagcaggctacagtccatagcgttgcacagagtcagacacaaatagtgtattgggccacaaaatactttttacaaaaaactcattacagagggaacggtagtagagaaacctcacagacattcctgtaaccaagcaaccagtcagcatcacatgagttctgatgcagcctcctgaggagggcgccacacgcttccctagtattctcgccagaaaggcatgccgaacctgaccatgaggcaacatcatacagacccacactgaggggcacacgacccttccaaagtaccaagttctcaaaagacaaaacaaaacgaaagagtgaagagctcctcaaattaacagagattaatgaaataagataactaaattcaaggtacgaccctagactggatcctggacatcgaagtgcgatcctggtccctaacaacctgattctcagaggacattaatagggcagtcagtaaaatttactaggtaatagcgacttagcagcagcagcagggttgtatcactgctaattttctgatttcattcattgtactatagttacataagataattttaggaaaatacacagtagagtattcagtaccaaaagggcatcatgcttgcaacatgctctcaaagactctgaaaaataatatgtatgtagacgtatgtgagagagtgagagagaaagagcaaactcggtaaaatgttaatatttagggaatctgggtgaaggaaatactttgtactttttttgcaacttttctgttagtctgaatttagtttaaaataaaaagtttaaaaaactaaagtaaaaaaaaaaaaaactaaagtgcgtcaccagccctttcttcctcccaaaaagataataaagtactggatagcaaagcttatagattgggattgagtgtttggagttcatgttatttaattacattaagataactaatgtatcaattcttctatcataaaaacagaaacagaaagtgaagctttcaaactaataaagaggaaaacgaactaaaaaaataatccaaatatagcaagaaaaggagagaaatttttagaaaaagagggacaagtaaaggcacaaaaagagtactaatagaaatagttacaaacgaacgaatgttttagttaatatggattgtcagaccagttttagaatttaggtatatacttttgaaagaagcattcctgaaaaataaaggtacaggtagtttgaaagtaaaaagttgagaaaagacacaccataatagctagaaaaaaacctggtagagctgcattgatactggacaaaatagactttgaggccaaaagcagtactagagatagagtcactatgtactgatagagacttttattcaccaggaagatgtaatagttctaaacttgcatgtacttaatgatatagtctcaaaatatataaagcaaaagattaccacaagaataaaaagaaaacctgtcatagtgggatattactgacttctctcaatcactgataggtaaagaagtctaaaaattagttaagttatagaaaatttgaaccaaacagttaacaacgttgacctcatagaacaaaatggtagaaccattcaaataaaatgtttagagtgctgatccacttctaaatgatgtcacacaattcatatataaatgaatgaaatcagctccttattcaagggagttgatccatgttgatggtgatggtgctgatttgtgtctgaagtgattacttgggaggagggaacttgaaagaaaaaagggactgcttccgtgggaagggtcaggggaggaaggtgtcaagagacctagggtttaatgacaattctgacatatactggtggtgtgctttttgccaaactagtcttttggatgttatgtcctaatttgtcaattagagatagcagtgttcaccctgcctgttcctcaggaatgttatcagatgtaattgaaacatgtgagtgaagatgttaaaaaatataatgtactaacatgagttaaattaaataagtatttttaatttatgaatactttgcatgcctactcatgcaaaacctatggaagacattgtaggggatacagggatccctataggtaaggggttcccaacctccaggatctaatgcctgatgatctgaggtggagctgatatgatagtaacagaaataaagtgcacagtaaatataatgaatgctcttgaagcatccccaaaccattcctccactccacaatccatggaaaacttgtcttctacagagtcagtccttggtgccaaaaaggttggggatccctgtcatagatgatgcaggggatccttggattagaaacactagtctaagaagccacacaaataactattaagttgtctgtttataaccttttagtatctccacttcacatctccctgccattggccctcattgctcttagaggaaagaccagccatggaacagcctctggcttcatcccctgcattatctccctcatgtagcttcaatccctcacatctctggtttccctcccaccacattttataccagatgtcccctctacttggaagaccctttcaccaagttaaccccttcttattcttcagatctcaactccgtttctcaaggccactgtctcctgtctccctgaatagggcacattccttacacatggaatcttagtatagtgtcctcctttgtagtaattttaattttagggagcaatcatttagttaatgtccatttcccctagtgactataagttctaggaggacagggtgaaagtaaaagtgtcagttgttcagtcgtatatgactctttgtgactccatggactgtagcccacctcagtccatggaattctccaggcaagaatactggagtgggtagccagtcccttctccaggggatcttcttgacacaggaatcaaacccaggtctcctgcattgcagatgaatccttttactctctgagccaccaaggaagccagtacatgtcttttttttctgctggcatataatatatttgtagacaagctgactcattttctgactgactaaatgaatgtgcctgaagatggatgcaaataagtacaataaagagacaaaggaagaggtcattttttggagtcctagaagagattacaaaatgctgcctagattctggtttgatggatggttgtgattatcaccgatcagcttcagatgttcttggtgtttgttgtagcagagaaattgtcaggtttaattgttacctctttgttaatatttttttagtaaattcttacttgattgatctggtcctaggaaataacccattctcttttgttagcccaagcatgaacccctcagcatcttctgtgacctcatgggtgtggactttgaggagatgaatcactggctctgccatcggaagctggccactgccacagagacgtacatcaagcccatctccaagctgcaggccacgaatgcccgtgatgcactggccaagcacatctatgccaaactctttaactggattgtagatcatgtcaatcaggcactccattctgctgtcaaacagcattcttttatcggtgtgctggatatttatgggtgagtgtatttggcttagtggtctgagcatttctttctagacattatctagtaactccaagtaggcatttgattatgtctcctactggtgagctaaagggaaaattagaagataattttttaaagtcttgtttcatttgctagtttgccttctctgggtacctttctttaatgttgaaccccttcctatacatttgtgctttttgatgcctaatttttcatcatctggttcacttttcaaaaaaaactatgatatttctattcccctcctttctgtgtttatgtaaacattgtgaatctgtgaactgacaagagcagtagctttattgtaattctgattgttccctacttggggatgaatatgccctcaaaaactcatactattgaatatattcacatgctgcagccttgaaaaaaaaatctctgccactttgctgatgtctatctgctgggtacatatttcgtgttactaacttagaaagccttatcttcactgatgtggaaagtaagttttgcaatgttagggaatttcctatttctctctaattagcacatttttaatattttttaaaagctattttttcctttttctcctctttccatattattgttgattttacagatttgaaacattcgagataaatagttttgaacagttttgcataaattatgcaaatgaaaaactacagcaacaattcaatatggtaagaattttcttgcttaaataatgttctgccaaaaattattctttgaattcctggtatgtgtttaaatactggctcctgaagtgaagttatgaatttcagttattatctatggtttaaagcagttaaactgctgaggaacttatgattaatgaatgatgcaaccttggaaagatgtttatggtccagattggattcaaggccatctgctgtctgagaatagtaaaaatttggtccaaataaattgagaaaaggaagcagaaaatgttttagatgctgacataggggtgtgaaactttgaccccagggatatcattcagttggtcgtccctaaggctaactatatgtggagttaatactatcttagccctgggtgttctttggaaggaatgatgctaaagctgaaactccagtactttggccacctcatgtgaagagttgactcattggaaaagactctgatgctgagagggattgggggcaagaggagaaggggacgacagaggatgagatggttggatggcataactgacctgatggacatgagtttgagtgaactccgggagttggtgatggacagggaggcctggcgtgctgcgattcatggggttgcaaagaatcggacacgactgagcgactgaactgactgactgaactcttacttgctgtattaaaacctttagactatttgatctttgtaaaatattgcataaaatattgtacttggataaaaatttttatccctctttttagcaaattaagctacttagtatagggaaataatgtagaagtgatcttaaatttttaagctgcttccataagaatgtgcctagtatattttgtgtctctgcataaggaatgttaataaaaacctgtcagacactaagtggaatattattttttctcaaggttttcctgagtttctcaatactttaatcaacagcggagccttctgctctttcccagtatattttggcacaaggtgactggaagtattaaggaactaatgccagcctcattagggactggctaatttgtttatttctcgaggacctcatgtctctgcatgtgtgtttctgactttcttgtttccctttccctctttctgtctctatccatctgtttcttctctctctctctttgctcacacacacacacacacacacacacacacacatgcagcttagcctctctgcacgagagagaggccctctttctcttctttctttcttccctccctcttattatcagatggcatatattttccttcagatggtatatattttgtctaggtttttgcttcctcacttacctcacacttcctgtgatcaagcagtggttgaggtgcttctatcttcttagcttgcttaaatcccattcatcttgacttcttgcagcatcagctttcactgttaattgtttcccagttcttatatctgagaaaagagaatgtgattaacccagttcatttgttcatcagagatctctggcccttgactagatatgtcttggagcatggggtcttacagtaaagaacttgatgctcaggctgctcccacagcaggggctgtggggtgggcggtgggcaggagaaacatggtgactggcaggtttagagcttggagtcattaccttatcgagtaagcatctcttgtcatattgaacctcatgcccttaattttgcaattaagaatggaaaatttttgaggtcccatggatcttgccaaactagacatagagacttgtatgagaaacaggccctaaagtttggagcagtgtttctattgtcaatgtgaagaccacactgcatatagattaatgaattaaaggaagataggactcatttgtgaggaattattggtaccatcagccagggcatcttgctgacacatggtggttcatttgccttctcattaatcaaaagaacagaagaaatttgctttctaattagcattacataaatattcatatgtatgacaagtttttttttttttaactaaagctttcacacctggttagactatgaatgctgcaaatgagccaagaacagcattataataagtatagaataaagtgggaaagttccagatgtgtgaggagaataaagtatcagaaatcttggtaacccttaggtttcatgggggtttgggttctaggaagtacgtgttgtctggtaatagccacagagggatactcttcccagaaaagttgcaggacatgtgagagaaccagtgtgacaaaggagacaagaaaggaaagcagaaccctgcaggaagaaatgggtacaggtcattagcacctatagaaactagaatttgtgggttggcgccattggctgatcagcttgatgcagcgcttctattgcccttccttcctagaccaacctaactacctttcactgcagacctcgggtcacacagcccttcctcaaagaagccttttcttgctaccatgttccaaattagttggggactcctgagctcatagctggccattatttttctctggaacattattacagtttgtaattctgtttcttgtgattgatttctgtctgtttttctcactagtcttcagtgtctattttgctaatggtgtgtagtgactgggacatggtagacagtcaatacatatttgtgcttaagtgagtgaatggagatgagaagcagtggctgaagcatttagcagaaatagtaatgtgtttgtagtggttgcagctgctggcagaattgaatgtagaagccagaaaagtgagccatagattccctgactgtggaggataatcaaggcagacacaaaagaccaactgttatctaattctgaggcacatgaacttcaacagcatggtcccttaaaagaattactttgtcatgctgtaagcatcacccagaatgtttcagtagtctggagggcatcctctctgcaggttgttcaaggccagctaaggcatttctgtgcccatatggttagcaacactgtgtgataatttaaggggccaaaagtacatagtgtggttttagatatgtacatatcaaaaaatcaaaagctgccacacttatcagatatttaaatattcacatacctagattttcttgtttgccaaaaatcctatgcagctgaggtttttccatgtgtggtttatatttgctttcttatattgttctctgcctgtaaatcatgtttctccaagattgctgctagaagccattgaccgtctccaattttgttttatacatgtttattgactaacatttatgacagtaatgtagtaatgccagttttttttctttttcatttcagcacgttttcaaattagaacaagaagaatatatgaaagaacaaattccatggacactcatagatttttatgataatcagccttgcattaatcttatagaatctaaactgggcattctagatttgctggatgaggaatgcaaggtaagtatgattttctgatgtatttaatatatcaaaattgtgagttgaggtaaaatggtaaataggtttaagcagagattcactagtataccatgaagtgccacagtggcaacaagtggggcttaccctaacttgcattctgaaggatcactagctccaaagggttcaaaatatagttgaaactaggagaatctcccttcccttttcagctgattctaagttatgtgaaaaactggcattagatacagctactaccaattttagtcacttttgttattgatatgcttatatttggtacttttgttcaatggtatgatatagttcaggaaatgtaagaaattgtacaaaaggtattttgaataatagttctaaatatctataattttaaacttgactagatgttctttattacttatatgtatggtaggtaaagagttttagttttaatatttgaagatgcagcatgtggaaaaaatattggatccctggcttcactgatgagtgattctagacaacctatcctttcccttagttgttctttagtttatatgtcataagttacaagttcatgtacactgatcctcctaagcatccagatttcctacaacattaagaatgcaaagacaaatactgtatgttttcacttatatgtaaaatctaaaaaaataaaatggacaaatgaatgtaacaaaacaaaaagagcctcctggatactagagaacaaactagtggttaccattgtggagatggctggtgggaagggcaggataggcgaaggcaggactaagaggaacaaactactaggtacagaataaacaagatacaaggatgtaatgtacagcacagggaatatagtcagagttttatagtaacttcacatggagtataatctataaaaatattgaatcactatgttgtattgaaactaatataatactgtacatcaactatgccttcaataaacaaaaagaatacatgtaaaggtgctcagtttcacttgaaattaaataaaacataaatcaaaacaaaaataagacacagttttttacctatcaggtgagtttaaatttgataataccaaattagcatttattgcatatatactcttgatgaaggacaaaagttagtagaacatatttttgaggaatatttatcaagattttaaatacacataccttttgaaccagaagtagaaatgctgagagtttaccctatacaacctagtagtcataaatacaagaatgctattattaagaagaagaaaaatacaaggatggctaagttgaggatccctcttggcaaatgtcacattgcacatgaaaatatgtggattatttttaaatatcttttgatactgatttctaacataattccacagtgataagagaacagactctgtttaatttcaatacctttagaccttgaaatttttgcaacttgttttatacccctggatatgtcccagtgtctccttgtttacagtctatgggaacttggatagaatttgtatcctactgttgtataaaaattgtataaatcttaattatgttgaattggttcacagtgcttttcagatctagtagatccttctacttctctgtctattcattctattaatttttgaagatttgatattgaaactccaactaaaaatcttaatttatctacttaaaaaatacttgtaatatatagtgaaactatatgtaacctggttttatatttttcaaatctcctgtaaatgtgttatcatacgtccttaatttaaaaaaataaaaatttttaaaaatgcaaggagtttatagaatgatactatttgtatccatgcctttaaagacagataaagcagttggtggaaatggtgagaggatactattctgttttatacctttctgaattatataaataatctactatgtgcaaatgttgtctttatttaacaaattgtttgaaatatatgataatcatggtgtgtcatctttcatttgtgaggctttcattgctataaaagtatattgagtatttatttgatgacccttggtccaggcagactgagttactcaaagcttgggctgagtcacccatgggcaggtctcagttgttgcttttcgttcccaggtggcgctagtggtaaagaatctgcctgccagtgcaagagacccaagatccctgggtcagaaagaccccctggagtaggaaatggcaacccactttagtattctcacctgaaaaattacatggacagaggaaaacacacacacacacacacacacacacacacacacacacaccccacctcccccccgccccccacacaccccaatcattgatttgggacctctgagagagaaatgtgaaaggaatgagctcctgaattggatgttaaagttgttgctgctgctgctgctaagtcgcttcagtcctgttcgactctgtgcgaccccatagacggcagcccaccaggctctgccgtccctgggattccccaggcaagaatgctggagtgggttgccatttccttctccagtgcatgaaagtgaaaagtgaaagtgaagtcactcagtcgtgttaggcaaagccaaaacacggtctcttgggggatgcatcagaagaatcccataacaatattcaccttgttttcttactctttttttctcctgaatgtagatgcctaaaggtacagatgacacttgggcccaaaaactgtacaacacacatttgaacaaatgtgcactatttgagaagccccgcctatcaaacaaagctttcatcatccagcattttgctgacaaagtaagaaagctttattatctcttttctatttgaatacttaagttcaaagaggaacaaaatcaagaatcgatagacagcagttttttctttgctgagctttcattctttagctctttttaggaaaagtaagcttaattgttggcttactggtttaacctaaatggaattatattatgaaatgagtgtttacagtcctgtatctataattctgaaatccaagaaactctgaaatacgcaagtattttcataattcatttagtggctaaacctgatctttgacctgaagtaacatgaggttatttatagtctttacttgtgccagttaggtggctatttatatatttcagtgtagaaatattaatatgtttgattatagattgctgcttcagatctacttaaagattctacttaaagattctggatagtgaccccagaggtttcagaaaagaaattatagatgagtgtggccctctgagattgattgagtgggtccctgctaataaggcttgcaggcctgctgcttcacaggttctagagtctactcagaacatctggagctgcgacactagtttatatttcaaggaggttgtgggggtaggcatctggtaagcgtcccatggtccctgccagcaattgagggttttcagagtctgtcctacgtctagctggagatctttggatggcttcagggccatctgagggctttgttctacagtctggggacccttgagtggtagatagctgaagtcttttagaaacagggagagtccagtctcatgtagtcctacttaccagctcatacagtatttacccagcctccacctctgtctgtgatcatcacttcagctttctgccagatagctgtttgttccttctgaccctccctctcacttcagtctcttcttcccaaaggagactttcccctgcagaaaggtgaagcaggtttggaggagatacagtggttggccttgggggagctctctttggtttacctgagagaagagaacagcttcttatgagtctgcttacgcatgaattgggatcatcttttagatcacagttaatcagcactgccactgttctctagaaaaagcagtatttgagagttttactctagagttaacatgcttcttaccaagaatgatactagtttcttagaataaaactaataacacttcactgagagcccatcatatagcctgggcccaatacttatttttgttgttgatgataaattgtatctattcaaagcttttattagctaaggagattttccaatgtgttttcaggtggaataccagtgtgaaggctttctggaaaagaataaagacactgtttttgaagaacaaattaaagttcttaaatcaagcaaggtaaccttgtataggctttctccaattgggatatattcattaaaatgtttatgactcaagcattagctttttaacatattataataataatttttctaacaaaatcagccctactgttgatttaatttatcaaatagatgtgtcatgtagcattttaaatgccttacaaatgttaattcatctaatcctatgatgaggtgatattatcactgctcccattttacagaggagggaactgaggtacagaaactttgtagctagtcagtttccaagccaaattaaaattcaggctgttgagctgagagtctgcatttttaaccacgatgcagtggtattttatgtgaaattattgcctcacagcaattctaggctcttttgtgcctttgtgagacaccatgagagaaaattgatggtttttggtttttgctatgtcattttgaagggatgtaccagaaacatggccttaagcactccatccaggtaaaaactgacttctagatcactgagggcaatttcagatgtggtccgaagcactttgaaattattcttcttaggcttacataccagaaacactgcattttagtaggaaaacaatattccagattgtaacaaactgtgatgtgtatctgaggttgattatgaggttgatcccaacctccaccctctgactctcatcagaaaagcattgggaggggagcacggctcatgtccatcctacagggagcaaaccaggaagttagttacttggttacttagtttaacaaagtagatattcaagtattcagtgaaagattaaaaatattcatgtgaattcttacagatttctgaccagcactttctgtttttttctaagaaagtcctttaacttcaatggaatgttatatgaacattttgattcttgtttttgaaataaaaacttttactttcaatagaaagatcatataagtaccaaattctagttttaaccctcagaaaataatgagtctatagtcttaactatctgtaggaaaagtcagtttttcacttatccttgtaagccctgaatattagtgctttataactcgtaggaatgatgtgtaaaagaaaatactctcacagtgccaatcattgatgttgtttagtttttgttgtcaaaaacagtcaggtccaactcttcacgaccccatggactgcagcaccctggcctccctggccttcactatgtcttggagtttgctcaaactcatgtctgttcagttgatgatgacatccaaccatctcatcctctgtcaccccctctccttctgccctcaatcttttccagcatcagagtcttttccaacaagtcagctctttgcatcaggtagtcagagtatcggagctttagcttcagtgtcagttcttccaatgagtattcagggttgattttctttaggattgactggtttgatctccttgcagtccaagagactctcaagagtcttctacagctctatttttcaaaagcatcaattctttggtgctcagccttctttatggtccaactatcatatccataaatgactacaggaaaaaccatagctttgactatatggatctttgttggcaaagtgaaaaatcatggaattctaatggtactgctctaaataatttagcttacacagagcattcaccaatccttattccccgggcacccagaatcttttgtgactttattctgaacttttctgattggctagtgaatccttaatttccagaaagtagctctgcattctgaggaatcatttggagtgacttccagtctctatggggcttcccaggtggcactaggggtaaagaaccctccagccagtgcaggagacataagagacatgggttcgatccctgggttgggaagatcccctggagaagggcatcttctcagtattcttgcctagagaactcctggatagagaaacctggtgggctgtagtccacagggttgcaaagagttggacacaattgaagcgacttagcacagcacagccagtctctatagcattgtcgcagttgggatagaggtggtgtgagatgtacatccactgctcccagtcagcaggaaaaacccaacccaagggtatgaactttatattttaatttttctgtatctgataagaagtaagtgtaacctactgttgatttgtactcttggaagtactaactttagaagatcaatatttgtgttatgtgctttatttttgtggtaatacagtgtggggttctgtttgtgtgtttatgtgttttgtcttcttttttttcctgtaattttgcagcttctggacaaaattgtcaacttaaaaaagaattaaggtattaaaaaacttaacagaaggtgtcttaatttatattttcccaccataaaaatatcttctgttgccacatcaagtatcaagaaacacataaatcgggactggactaaatactattaaattgcaactctaccaaataccatgaaaaagaattgtaacctctgctctcagtgttgctaattgataagggaaagcacagttcatctactgagttcatgctgcaaatctctcatctgtaaaacagaatcatgatagtatcttctttcaagtgttgttacgaagattaaataggttgtattaagctttcagagcagtgcttcacgtataaaaagcttagtgaataatggtgctgttactgagatgatttcccacatcttcatgaagcagtcacttggatgcttctgtcttttttaatactatttcatagacacataagttcagccttaaactattcagattcctgtcttaagtatagacagatcaaagaaacaagacagaatgtccaggcatatctacttacttatatatctgactctctgtttctctgcttttctctcttcaaataaagttggaatcctcagtcaatagggtgaggagtgctgagactgtataaactggttggtttgagatccatgaggaaggccagtgtggctggagtgagtaggtgatggtaggtgagtagaatgtgtaggatgggtagagagaggccactttttggaggaaagtatagtaaagagggcaacccactccaatatgcttgcctggagaaccccatggagcctgtggtgtgctacagttcatgggatcgcaaagagttggacacaacttagcaacaacagcaacaatggtaaacagtatggattttattcctgttgctttggaaagtttggacaattttcatgtgggggatgatatgctattgtgtggagatatgggggaggctggaagtggggagtaatattccaggggaaagacagtggattaagatactgaagttatagcagtggaaatagcttatcatttatttgtggggagagttgacaggtcttgttgatggtttgagtatggagagtgagaaaaggggagaaattgaagattatttctgtgttttgggtctcaatgctggatgaataatggtgccacttactgagatgaagacataaaaggtcaggctctgagagaaagaatcgaaagagttctgtcttggactcattgagatggaaaacagacttgcggttgcccaggggaaatgggttgggggaggggtggggtgggaggttggagttagcagatataagctattatatatagagtggattagcaacaaggtcctactgttgcagcacagggaactatattcaatatcctatgataaaccataatgggagagaatatgaaaaaagaacaacgtatatctatgtataactgagtcactttgcttttagtggaaattagcatgacattgtggatcagctatgtttcaattaaaataaaagttctgtcttggacatgttttgcctgagatggcaattaagtagtcaagtggacatatcatataggaagttggaaatgtaagtcagcaggtcagaaggaaagtcagagtaggtcatataaattcatagtctttagagcaagatggcacttaaagcagcagtactggataagattgcttagggagaacaagtaggtaaaaatagtagagaataaggctttcaacttctggagactggcctgaggaagaaccaggagagaagtctgagaaagatggccatgaggaagcaggaacgctgcctaaagaggaaatcatagagtagtttctaatatgacaatgtaaaactcactttttagaaatggaaactcaacgtagagaattttaaattcataatttgtataaagaggacacaaaactcatacatgtgtgtgtgtgtattctgaactctcaacattgagcagttttctggtagatattgtagagatttgttaaattgtagcaccactggtgaatatgatatttcaaaccagctctattaaccattgtacacagacaaaaacaaatttaggtaggtagtgctaatgtagagctagcaaattacttgtgaatgatagaacagtatagatagattccagagtacttggcctattatcaagtaacttaacatcttaactccatgctgagttttcagatcaaatctattaggaactcttatttttcccctttgtaatacaatataatggtaaaacattcccccctcccctactttgtagccaaccaagctatatgaactctgtaaatcaaaggatatatttatttgtgtagcaaacagccattattggtatgtcatgtataacaatttgttatatacatcatgaattatatcctaaattatccttatagttaatatacacattgtagcaaacaaaattaactgattttgttgtgtaatgaaagatttctcttaaaaaaattatttcttctggagattctctgagattattagataaataattggttgttgcagttatagtttgacttataagaaggatttattttatttctatggaatgcatcactattgtaaagatatgtacatatatcaaaatgttcctgttgactagtttgaagtctcttttgttccataaattttttttccaaccactttaacttatactatacatccatttattaactatcagatcttttaatagtctttctttttgctatcctggtagaacacaaaattgattacaggaattatgcagttaagttataaatcctttgaaaacaaatgcaaagctttactctttttcctataatccaaactactttctaaaaattactgttaattcatgattttttaaaatcttatattgtagaactagttcttgacacccttcccaattgtaatgttttttagctggtgctcatcatttgaattggtgtgtagataaatgaagcacgatgatggaatattttatggaactgaggtgataagataggactttcagttagtcttttgctcataaaatagttatcatttaaaaccagtaaaatgtttagagtgggcatttcccatggattaagatttcagatctcagaggagcagttttgatttcattttccccccaaaaggttgtagaattattgcattttccacctatatttctgtagcacttatgtcccttctgctcatatttttggctcctaccacagatattgattatttctggaatgtgactctgaaaggagtaacttaaggaagggaatcactatagattgcaaatcatcctaatgtttctgtaaagatttccatttgagtttgggtttagagtgatttccttttactgtttctgactcagtttaagatgctaccagaattatttcaagacgatgagaaggtcatcagcccaacctcagccacctcctcagggcgcacgcctctcacccgcaccccttcaaagcccaccaaaggcagaccaggccagacggccaaagagcacaagaaaacagtagggcaccaggtgagttcagggagccgccgctgcggggctgcttcccttagggctcagctgagctgcggggctgcttcctttagggctcaactggagccccaggtcttcttttgtcagcctcccaggtggggtcctcaggtgacaagaggctggagtgctcaccctgagaatgtggaactctgtccattcatgcttccatacttctcctctcatatcatagaaccgtgactgcagaagctttgccccaaatcattttttctacattttaattcttctagtgctcatcttccctctcaaaccactgctgcctttgttttggtctctggctgtttcctctctagagctgcaactgcttcagcccagggaccctgccccctcatttctgatgtcttgtgcactcaggggttgggggtggggggaggcccgggaaacatgacacacaagctttgtgcctgaacaagggctcgggcttgggcaggggactgagtgctagtcagtttgtttgcctgaggagacaagaagcagggcctgacacgggcccacagccctcagtctcatcccgtgtcccgaaagggaaccctggcctggctgtactctcagattcttcccctcatttcctatccttttttgaagtcaactgctactttttccagtattgatcagcaagatttccaccgtacatgattaaatgaccttaatatccttaaagcaaggttgtgtttttagtcaaagttttgagtgtacaacagaaaaccacagaaatctatattaaaagtggtggggggatgtatgtggaagagtgaactctaatataataataatgatgatgtgtccaaataggttcatcaactgtaacaaatgtaccactgtggtggggaaagttgataatggggaggccatgcctgtgccagggcagagggtatgtaggaagttactgtgtcttctgtctgactttgctgtaaaccttaaaccactctaagaaaataaagtctatattttaaagggtctgggggagagggaaaattaagaatgtcacagagtaagcatgtgaatggtagagtttaaggaaatttgaaccgaaagccctagcagctccactactgggggctggccaggttcacaggtggccaagtcatctccactagcaccattagaagaaaagtttagttgttttatgtcatctttgactttgacaaaccttgatgcgcctttctgctccttttcatgcagttccgaaactccctccacctacttatggagactctgaatgccactacacctcactatgtgcgctgtatcaagcctaacgacttcaagttcccattcacgtaagtatttctcaactgctgaatttaaaagaatccatatctcataaggattgtcaaaccagcagctgggaaaaaaatacgtgagtaaatcttcatgtcttgtagaaggaatagttaatataatttttttcagtttttgttctcttttaagagtttgagaacagggacttccctggtggtccagtggccaagactccatgctcccacttgttggggcccagattcaattcttggtcagggaactaagatccacaggccgtgcagtgtagacgccccccgcccccaaaaaagtgagaacaaattagcaggtggccttgtgacaattttaaacatttgaggtcaaccacacatttctagttctactttctattttgaatttacttccgtttaagacctttttggttaatttgggcttcagttaaaaccagagctgggtgagataagattgctttagcaaaggcttacagtcatccctgctgcttttcaactgttgaaaacatcagaggagtctgctttttaccatgcatcttatcctccatcaatatcatacgtgagaagaagttttttccaaaacagaaatatttctctaattttgaaggtaatgcatgcacattggaaaaacaattttcaggaaatatagaatagtataaaagtaaatgaaaaagcatttcattatacctagagaggtaataagtattaactgacatagatccttcttgatcagtccttccctgctctgtgtgtgtatctgtgaaagagagagagagacattaataagagagaagaaatcgtgctgtaattgctgttttacttcgctttcaacttaataaattgtgagtgttttccatgttcgtaaatacaaatcattatctccattttaatggctacatcatatccctttatagagtcataccatcattcatttcagttattccctgttgatggccatttgggttattccttggctatgataaacatcttttgccaaacatttctgtatattcgcctgcctgaatatctccttagactactgtattcctaggacaggaatttgtgggtcaatgacaggcgccttcccgaacactgtagtaactcccactctgtaccgtgtgcgcgctcctttacctacgcccctgctactcctgcccgcgggagattctgtcttagactgcagggcacttctcaaagactgctgtattcttctcattcccaagaagcctttctggaggaggtgagaagcaggaagaagcttttatgccctgggcaactctcctggacagccccagggcccagtaccttgggtcaaccaaccccatctcccatcaccaacaaaacactgagaagatggcaccacagaaacctcagataggtcattcagggcacaactagggagtaaggggagtgatcatcctgtaagaagcaggccttgctacttcctcttttagtgtcaattgaacattaaggtgctgtttatctagagtgaactgcaggtaagatataaaatagttttcactgacgtggacactgttaatgattagtatgtatacactgagttaaatagcttttagaacaccagtaattaacaacaacaacaacaaaaaccgaatggggcatgtttaatttgttcttcttgttaaagaaatctccagagctggccagtctttattctggggtagctctggatggtgaactaaagaattatgagaccagctagtcaggccaaggcatgtaatgagcattgcacagtacagaggagcttgggctttttaaatatgctcaggtggtatttcttacgagtttttggtgtatgttcttactgctggtgatcttacccactctcaaaatggagttttcaattttgaatcagtactccaacatttgaatttttttttctaatttattcattcggctccttacaaaagaattcagtctctggattgaggacagtagtttgtggctagaaccagacttttttgtgtactaatgatttccacctttactcataggtttgatgagaagagggcagtgcagcagctgagagcatgtggtgtcctggaaaccattcggatcagcgcagcaggtttcccctctcggtgggcctggcagttttcaaatacaagggatcctcatgggggaggttcctgctcctttagataagctgacatgagtctcttttcataggtggacttaccaagaatttttcagccgctatcgggtcctaatgaagcaaaaagatgtgctaagtgacagaaagcaaacatgcaagaatgttttagagaaactgatagtggtaagaaagattttcactcatctgtatctgaacagatgtttgccaaaggccttgtgattataacctgtacaagtcctaggggtgtccaaatagcactaattcaatgaagtcaggaatgggagggtggagaggcacactgtcttggagtttgaggctcccaggctctacgatggaaggactagtgaggacaacagcccagtgtcaagaaacaggatggtgaggcctgaacccagacttccgatgcattctttttagaactggatcattttcaataaaaatttaccaagtacttacttatgaaagacaccaggccaaatgctgtgtgattaagaaaaaataagtcttatcctcaggtaacatagtatgtctttgaaatcaatgcattttaaagacaagtatagtataccttagtgtctatgaaatgctgagtgaatgagacaagaaatcagaggaaggcaaagccacttctgctgtggggaggaggaacaattcatgggagacatgtattttgagtcaggccctgaaaggtgggtaagactgtgtaaaactggaaggagactatcctagtagggagcaaagaacgtggaagcaggaaagcatagttttctcaaaaaaacagtacagtaggatttatgtttttgcagtgaaaaattggtgcctgggaagtaaggaatttgttaggaaattggggttggtgtttgaagggtcttgcctaccaagctaaggcatttgtagaccttagaatgcatcagagtcacctacaggacttgttacgctacagattgccaggccccacctccagaatttctgatttggtcgtctgggatgtgcccagtaatttgcatttttatcaagttcccagtgatgctgatggtggtttggggactacacttggacagtcactgatggacgctgtggagaacttaagattcatgaaatggtttttaaagaatattatattttcatttatttgacattaggttggatggattaactcactttgaagtaattagtaataattactagctattaattagatgtagtatctcttctctggcaataggttttttttttccttgaaatagcttaggccactttcctggtcatgtgtaaaagaattgggtccattttgaatttggcccaagtcttttctagggaatgaagagcagaaagtagggacagtcatcccacaccagctttctcccctagacctctcccggctgagctttgggaccacaaggcagaggagggcaggcttggggagcaaggagaggggagctgagatgagattgggctgcgaaaggaaactacttgctagcttttccagctagcttcctttgtaagattcattgatttaaactgaagtagttttagatgtatgtgatttcctattttctcttttcatgtacaagataggaaatatttgcttacagtgaaaagttattttctgttttcactttgaattttagatcacaatattgattgttacaaataaactctactctttcaatgtgagatgcttaataaatcacatgcttttgaatatgttggatcagaatgtaatagactgaaaatagcatgcctatctatctgtgtttacccctcaactttgcttataatcagaagtcagtgagcattataaatgattatatttttgaaatttgtagacagacttactattgataaaaccaagagataactgttgagaaacttaactcttaacatgaatatgcagcgtttttaatctttttgtttttattttgtatgtgttacttcctgcctttttcttcacactggtgtttttgtcccttcagctttctcatggaacttacagcccgatgtaatccttacagccggggtcagtcagagggagtgtcagcatctccatttccttgagatatttaaaatacaaacaagcaaatagtagctgcctataacccacaaccaagttttgggcttcagataataattccaggtagactaattctggaaaataactcttaaactgcagttttccttaaagtcccttctattcgctcaacttgcctaggatcaaaatgctggctccattagatatttgtgatgtagcccaagttttagctaatagtttcatccctttattgatattgcttttagacatatttttttttctctttaaaattcacttatttggtcatcatttctacttctgagtatacagtttcttccaaatacaggacaaggacaaataccagtttgggaagacaaagatctttttccgggctggtcaagtggcctacctagaaaaattgagggcagacaagctgagggctgcctgcatccggatccagaagacgatccgagggtggctgctgcggaagaagtacctgcgtatgcgcaaggctgccatcactgtgcagagatatgtgcgaggccaccaggcccgatggtaggtgtcctggtggcatgtacacgctggctcaggggcagccaagattggagagtgcatctgacttattgtctaagctaggatatagtttggggtggggtggtcaccctaccactcaaggcagttcagttcagtcactcattcatgtccaactatttgcaaccccatgaaccgcagcacaccaggcctccctgtccatcagcaactcccagagtttacccaaactcatgtccactgagtcggtgatgccatccaaccatctcatcctccgttgtccccttctcctcctgccttcaatctttcccagcatcagggtcttttccaatgagtcagctctttgcatcaggtggccaaagtattggagtttcagcttcaacatcagtccttccaatgaacactcaggactgatctcctttaggatagactggttagatctccttgcagtccaaaggactctcaagaggcttctccaacaccatagttcaaaagcatcaattctttggtgctcagctttctttatagtccaactctcacatccactcaagtcaacaccttatcttttcttagttccaaggaattaacttataagacagttaaatagaatataattttacttacctttaggaatcagattgaacctcaaaaaaaattacatattactgtctactcatgtcctcagtatttattttttatacatttatattgggcttccctggtggctcagctggtaaagaatctgcctgcagtgtgggagacctgggtttgatccctgggttgggaaatctcctggagaagggaagggctacccactccagtattctggcctggagaattctatggactgtatagtccatggggttgcaaagagtcagacactaagtgactttcactttcacttttaatggacttgaagaaatcatctgtaaattaggacaatcatgaatataacctgttaaaaatgattccattgaggtggttttaggagcaataagctgagaactatagaaaagaattaacttacatgtgattacatattaggataattttaatttagagctatcagaagacatgaattaatgataataaaaacttatgcccaagtaagtagattgaggaagaacatcatgcgttcacaatggatagagctcaggaagctggtgataagtaggtatggtattactgtgtaaactggtctgctgtgtaaaggggacatagcctggggtaatgagcacagtcctaaaaggaataaacctttatgacctttagcttctttattgtaaaatcgagtaatatgggacagcccacattttagggttaggtaaggttcatctaagataacagatggacagatattcggggatcataaaataactacaaatataagaaatataaatgtgggtttaacatgtatgttattagaataatcaatggaagtactacttattatggcaagatattggtgctttcatcctctacaaaatgcgttcccgggtttttctgactactgacaactcgccactctttctctaccagctatgctaagttcctgcgcagaaccaaggcagccactatcattcagaagtactggcgcatgtatgtggctcgccggagatacaagatcatgcgaactgccacaattgtccttcagtcttatttgcgaggctacttggccagaaataggtatcacaaggtgaggcattgttttcaacttttttattcatcccattaatgttaatcaagttccacgtctatgtaggacttgtatggaaacaaggaagagcccctggagaagggataggctactcactccaatgttcttgggcttcccttggggctcagctggtaaagaattcacttgcaatgtgggagacctgggtttgatccctggtttgggaagatcccctggagaaggcaaaggctacccactccagtattctggcctggagatttccatgtggttgcaaagagtcagacatgactaagcaactttcactttccctttcaaccaactattgaaatatatttttaaatattaaataataaatacatatttatttatttattaacatgacttagaaaaagaaagcttacctttttattccctttgcatatgtaatttgggggggggttacatttttgtttcctgtggctgctgtaatacattaccaccaacttggtagctagaaacaagagaaatttctcattgaactttctcacagttctagaggcaagaactgtgaaaacaagatgtcagcagagctacactccctccagaagctatggggggaggatccattctttgcctcttctagtgctggaggccaccactattccttatacttttgtgtccatatcactctaagccctgcctccatcttcatttgcatcatcttctctctgtatctaactttacttccttttgtctgtcttgtgagaacacttgtgatggatttgggtcccacctagataatctaggataatctctccatctcaagatccttaacttaattataccttcaaagaccctttccccaaataaggtaacatttacagattcatggaggaatctaggggtctttattcagctaattatggtgagctttgaatagctaaagtatataacagatgagcagaagattaagagtaaaacgaatttggaagaatttaccatgataaagtgaaatcaaatgtaatatcaatgtagttaaagttgtgttaactggagtatgatcctatagaaatatttgacaagtaagctttatgtctagcactaatcattatgactagagatagtggatcaccagattagtcttacctaatcatcacctctaacaatatatggtctggttgatgaacattttttctctcttttatttcagcaaggttttgagtctgttctttaggttcatccaccttattagaggcttccctggtggctcagacggtaaagcatctgcttgcagtatgggagacccgggttcgattcctgggttgggaagatccctggagaaggaaatagcaatccactccagcactcttgcctggaaaatcccatggacggaggagcctgataagctacagtccatggggtcgcaaagagtcggacacgactgagcaacttcactttcaccatattagaactgactgaaatgtgttccttttcatggctgagtagtattccattgtgtatatgtaccacagcttctttatccactcatctgttgatggacatataggttgcttccatgttctagctattgtaaatagtgctgcaatgaacattggagtacatgtgtctttttcaactttggtttccttagggtatatgcctagtagtgggattgctgggtcatatgatggttttattcctagttttttaaggaatttccataccatcttccatagtggctgtatcagtttacatttccaccagaaatgcaagagagttcccttttttctacaccctctccagcacgctctccagcatttattgtttgtagactttttgatgatgaccattctaacctgtgtgcggtgatatctcattgtagttttgatttgcatttctctaataatgagcaatgttgaatgtcttttcatgtgtttgttagccatctgtgtgtcttctttggagaaatgtctgttgaggtctttttcctactttttgattgggttgtttgtttttctggtattgacttatatgagctgcttgtatatttttgaaattaatcctttgttagttgtcatttcctattttttttccattctgagggttgtcttttcttcttgcttatagtttcctttgctgtgcaaaagcctttacatttaattaggtcctgcttgtttattttgtttttatttctattactctaggaggtgggtcataaaggatcttgctgtgatttgtcacggagtgttctgcctatgttttcctctaagagtcttatagtttctggtcttacatttaagtctttaatcccttttgattttatcttggtgtgtggtattaggaagttttctaatttcattctttcactcatagctgtccagttttcccagtaccacttattgaacatgctgtctttgcctcattgtatattcttgcctcctttattaaaaataaggtacccatagatatgtgagtttatctctgggctttctatcttgttccattggtctacgtttctgtttttgtgccagtaccatactgtcttgatgactgtagctttgtagtttagtctggagactgttctttagaacatattcctaataagccagaaataccctgatgctgggagagattgaaggcgagaggagaagaggatgacagaggatgagatggttggatggcatcatggactcaatggacatgagcttgagtaaactccaggagttggtgatggacagggagtcctggtgtgttgcagtccatggggtcacaaagagttggacacaactgagcgactgaactgaactgaacagtctagatcttggagccctttaggcatcgttaggagagtcagttgagtgatataggacacttctctaatcataggcagtatgtgggcatgccctggaccttattcatgtatgtattttactttcttaatttaaattaattttagacaacaaagaaacatggaaagctaatgaggcttgaatgagcatatttaaatagctgtgctttgaagaaaatttgaagacagtttctccaggtgtttctgctcatgcctgctttatggttaggtgttgtttcttttcaagcatgagctttcaagggaaggtaaaaccttattaaacttgacctattagatacgccaaaccagttactcccctgctttcctcagtactctctttgggaacatctgaactggggtttgaggctattggttagcagcagaagtctctagccagcttagctcccactgtgactggacctagtgagggtaccagcttagagactagtttatgtgtaggccggtggcacccccttagtggtccttctagctgtgattccaatctcagcctctccttctccagctttgggaggtcttaaagtgaaagcaagtgttatttaatgtctctgactcaccaatggaaatgagattgagaatggaagctctaattacataccatttccatttgactgaaattatagaaatgaaccaatgtctgaagttacatgggagaaggaaattaaataggaaaattggcattaatagctttgccactctgtgctgcttgagtttttttttagttctgaaagccttcagtttgccatcgctgagttttacccagtttgtcactagtcatccagataggcaggggcttccctcaggattctgatgttgagtgagagcaaaggatgccctgcttcactgcagcctgatgcatggtgactgcacttagtggggactgaaggctaccttggcattaggaaaacaaaggtgcagtcttgagttagctgaagacactatataggtctctgaaacacctatgtttattttgctgttgtttagttgctaagtcatatctgactcttttggggaccccatagactgtagcctgcaaggctcctctgtccaggggaatttttaggcaataatactggaatgggttgccatttcctacgccagaggatctttctgacacggatctaacccatatctcctgcttagcaggctgattctttaccacggagccaccagggaaacccacgtttattttttatttgatgacttgaaacacaaccacttatttcttttgtatcatctgggatggcatatgatttcattatttttctcagctacataacctaaaaataggaactgtttattcaatgatcttaacaaattgctactatctgaatagaggtttcagagattttttacacatttttaaaaagtttcataaaagatatattgtatccctttatcataatcactagtgagtacttaagtgaatatattgtaacattcatgtcacacaagttcagttcagttcagtcactcagtcatgtccaactctttaggaccccatgaaccacagcactccaagcctccgtgtccatcaccaactgccagagtctacccaaacccatgtccattgagtcggtgataccatccaaccatctcatcctctgtcgttcccttctcctcctgccctcaatccttccagcatcagggtcttttcaaatgagtcagctctttgcataggtggccaaagtattggagtttcagcttcaacatcagtccttccaaagaacacccaggactgatctcctttaagatgaactggttagatctccttgcagtccagaggactctcgagagtcttctccaacaccacagttcaaaagcatcaattatttggcactcagctttctttatagtccaactctcacatccacacatgactactggaaaaaccatagccttggctagacggaccttggttgacaaactaatgtctgctttttaatatgctgtctaggttgttcataactttccttcaaaggaataagcgtcttttcatttcatggctgtagtcaccatctgcagtgattttggagccccccaaaataaagtcagccactgtttccactgtttcctcatctatttgccattttataaaatcatagtcttgaaaggacttcaaagtcttgctagttcaacccttcctaaaatttaagaatattcccatcattcctggaaattatttgcacaatctctgcttgatggtcattgtgacgagagatttatctcataagggtgaatgagtgtttatcagtttaggggaatatctttttttaagaaaacacaaaataaaattaagatctgtttactttatcttccttttagctttccttttaaagttctatccctactacctttgaaccccatgagcggatctgtgccacatttgtaaaacaatgggaaatcctcactagagtggtattcctcaaaaatggcaaatgagagaatcattttttttttgtttgtttctggggggaatcaataaattaataataaacttttcagtaccctaagtgttggcttctatagcctgcttaccaaccataccctgtgtcctcaagccagagacctaatgcacagtgatatggaaccagcagtaagggtagtgggtaaatctattttactagcacatgattcacagggtatcaagttctgtttgttttctgaaggataactggttgcttttgaaatcatgtagtcataagaaacctaatgcgtttttctttctttttagattagttttctatttagtaatctggtgcctttaattttgatggctcttatgtgtatactctgtttatcatcatacatagacatgtaatcccacataggacatgtggatataatacatgttttatatatgtttctcaaattgccttttcaagattacatttcaatcatctttcaaaataatttgtgcctccatatatttgtgataagtacactccacataataccttgttgcctcagcttttccagcatctttccctttagttaatgtgtggttctcagactgcatccataggttgatagagttgaacattgagtgtagtccaggatctgacattactggcacctacccttctctccagatactccgtgagcacaaagcaatcatcattcagaagtgggtccgtggctggctggctcgcacctactatagcaggagcatccacgccatcatctaccttcagtgctgcttccgccggatgatggccaagcgcgagctgaagaaacttaagattgaggcccgctccgtggagcgctataagaagctccacatcggcatggagaacaagatcatgcagctgcagcgcaaagttgatgagcaggtgtgttttgaacagcagccctaaaaatgcagcatgcctaatgaaatacactgggattatctttagcattgtctcctcttgactttacctttcagtctcagcaaaaaaaaagtaaaacagtagtgacattaatgagcatggaaatagtgacaagctcataggtaagattataattgcgaggaccaaggcaggaaattgtttttgagaacacggacaggtttgctaacagtcccaaaggttaggactgaaagtcatattttacacacctctttcatcattatcattcagttatgtgtagtgtattgttccttttatagatgagttgtttagcactgagatggcaaaagaagcaggaagatgtccatgcttctgaggaatctgcggtctatttgcagagataacagtttgatttctaacagatagttattaccaagtaatattttagcacctgcaaattatataggtagttagtgacatataaatactaacgatgacaaagaaaaacagaaaacagaatgaaataaaattcatcagaaaggttttctgaatgggaggagtttccagatgttaaacaaagagatttgtaagacgtgattttgaggccgttttaccattcctatacatcagtagccagcccatggctttcagtagcacactgatttgtttctaaaaacaaatctagattttcctattcctggattgagaatcaggaaagataatttagtatggtaactctccttgtgactatgagagaatcacatctatgttgctcatctcatgtaaaacataagtaattgtgtctgttctcttttggtatcactaagagggtactggtagtgttactttaaatgttgtcactagtattctggttagaggctgtatcagtgctgcagtgacatagcatgaatatgatgaataggcatggttttctcactaagtacaattcatggtgtgtatatttacttactgtcactcatgtgtgtgtttaaagaacaaagactacaaatgcctcatggagaaactgaccaatctagaaggaacatacaactcggagaccgagaaactacgaagtgatttagaacgtcttcagctaagtgaagaagaagctaagattgctactggacgggtcctcagtctgcaggaagaaattgccaagctacggaaagacctggaacaaactcagtctgagaaaaaatccattgaggaacatgctgatagatacaaacaagaaacggagcaggtaagagctaatgttcatatcctcatctacttctttcacaaagatgtgctgtcatattgacttggttagccattgtagctcgaggtagttctcggttgaaggtaaaacacacatttcagtcggttgactgttcactattagtgtttttccccaaggagttcttctgtatgctggatgagtagctataggtcttttagtagaacgttttactctactaagaagagaaggaaagcagtattataagaagaaaattgatggccaattacctattatacactctttttgttgaatgtatagatctgtgtggagtcagccagcttaagatgattaagaagtaaattaaacaataaactgtcaatagctaggaatttttatggaaacctacattaaggctgttttgagaagtccaccagaaatccaaatgtctgcacactggccatagtcaagaactgctatgcaaaaaataacaacaaaactacttacagattgatgaatgtttccacactacaaatttttattaacttatatcaaaattttattaagtatagaaaacacgaaggctctcaagaagtaatgaggagtattgtttaaacataaaaaaaatacctcaacataaggcttacttggaaaaagtaatagatttttagagatcctactagtattaccatctttaaatgaaaacagagttgactctgttggctgtaactgcttctgaaccttaacagcagctcatgcaataataacctctgaaggagcttagacagttcaggtaagatagtgtcactaataagatggcaatccttccatgatattcaggatcctgattaaaataaacctgtctatatcttcaggttgactctgtgtctggaaacagtttccctggtagcctagtccataaagaatctgcctgcagtgcaggagacctgggttcaatccctgggtcgggaacattccctggagaaggattcagtattcttcagtattcttgcctggaaaatcatatggagagaggaacttagcaggctactgcccctgaggttgcaagagttagacatgacttagcaactaaaccaccatcaatatatgttactttgacatggcaagcttgttctattgaatatatatccaatgagatactcttgaggtttaggatctgtctctctcattttctctctttctcagtctcttttttccccatttcttgagtccctgaaagcttccaaaattccttagaaactacagagtattaacttggttaggggtattctcttttccttttcacagtcaaattcatacctttctagttagatagaatagtatacgcaaacatattcagatttctcctttcttcttgttttattatctgcagttttcacagggatatctataggcactaccattaagtcttttagatagagtgtggtaatgaagaatggaaacatttccctgggagagctagccttgtggtcaggaaagctgcattgccagtccacctgatcaaggagcctagaaggtccagagagctgtgcttcttaaccaggaatgtgtatcagaattggctggagagtttttaaaaagatacctgcccaagctctgggagtgtgagtcggacacatttattttgaaaaagcacaacaggtgattggttgcatagccctgacaaagagcagcttctctcaagagcacccaaagaacccagcctttgtactgagagcacaccttctcaggacagaaggaagagagtggacaatcagaaagagcacctcctggcctgatgtctgccgtggctcagtgctgtaacttcagttctctgttcttcagggatcctttgtcacaacccgttgtctccatcgctgaactcttcatacgttctcattattactaaagctgtacctttaagagttctataaacttacacttacagaaaggaattcacatttcacttattcaggtttcacttcagcacacattctattacaaagctaaactatataaattatcaactttgcaaagttacctttggttttgatttttgcctcctgagaatccttatctaaccaggaaccagaaagttaaaaggtcaacatttttttttttttgtggtaaaatatgcttatatgtaactttaaatttactattttaattgttttgagtgtaaagttctatgacattagttatagtcacatagttgtaaggccaatgcttaaatgtggaataagtttacgaccttgcaaaactcttaaaaggagatgaaagtagaattcaagacagagagcagggagctttggaaggtcttcagtgaatttcatacttttcttgtcctctgtaatctctctgttgaatcttgggtacacataagcattgtgttagactgttggggtgaaagggcattatcattactttaagagcaaatgtttactaggtgtcaggcaattggtaaatgctcaaggtacaaagtaaaacaacaacagcaaatcatctttgtcctccaataatttctagtcaatcagggaagtaaaagtaaatcatttataagggctataaagagtcatttacagagttctgtagcagtccaatggggagacatataattggaagaagtttctgggaaagctttctggggggtaatgcctgaaccaagtgctttctgggaggtaatgcttgaaccaagtttaaaggatgactgaatataactcagcaaagaagtgagacaatgagacatggaagtaaggagtgactactgtgtggtctttgtatttagtatcgggtttcctctgtctgttgcagccatatcagtttattgtttcattttatagctggtatcaaatctgaaggaagaaaatactttgctgaagcaggaaaaagaggccctcaatcaccgtatcgtggagcaggctaaggagatgacaggtaaggctcatgtgggcccagcctgctgcactccaaacaacctgagaccaagggtttataagttacaactttgcttgtttaggctggcatcaataaggtttcagagttccagaggcaggcactctaaataattgattgaattagttggtgaatttgtaaatcgtatctccctatgtacaaatatgaattcatgcttagtcaacattgtatataacttaaaaaataattgtatgtatgatttatagcttataggagtcctcttgatttaagacaaattcttgagctaaaatgtatatttataggaatatatgtatctgtgtatattattgattttgctaaatgagtgaatactaatttcctaagatcacccactctttgccatcttaaaaaaaaaaaaagacactgactagaggtagacatttatttgctattggtaagataaattaaaatggtgataatttacaagaaatccatacataaacatgagataagaagatgtatatctaaactacagcaattggtggtagaaataaaaaggaagatgtaggttagagtgaaaatacatgaaaagaattaacagattattctcatttttgatatggtattcaaaagaggagcaaaaattttctaaagtgttgcaatgaattattaaaacaataatgtgttattagtaatgaggaaattgaggaaaacaagtctctgtttatgaggcaaatcagttaaaatttggatgttagctagggtctccagatagagatgatctgaaagcaaattgagattaaagtgagaaccctcaggggttttccccacaccatacccttcttcccaattgaagggaatactgtatagaaaagagaagaaaatctggaatttataggataatcataaaaaaaggagaaggtgaagaaaaagagtcgtaaaagaaagttaagacggaaggagaaaacagtcattgaagacacggaaagaaggttgctaggatgcagaatatagtaggaaaatccagaatgatgagaattcttctaggaaaataggaaatgttatttgatctaaagagaacaaaacaaatagcagtggatttgcctagggaaaatttgttggtagccttgagcagctttccacaaacttgtgagaataaaaggcaatttatagaatgttatcggagaaggcaatggcaacccactccagtactcttgcctggaaaatcccatggatggaggagcctggtaggctgcagtccatgaggttgccaagagtcggacatgactgagcgacttcactttcacttttatagaatgctgtatagagaaaaaattctttcattcatttatttgcaaattattaaagctctaggacaggggaacactgtggaggcagtcatgacaggacactgggaagtcctcaccctcgtggagccgacagataaagagatggtgagcaccagaagcaggcaggacagattaagatacagccacaaaatatgaggtaggaagcccaatatttataaacgtggctggttcagctcattgagagaaagcacatggctgagatttaaggcttttttactgatactttgatctgcaatcaagggctagtctccagtctccaaatgatatcctctctacatgccagcccctagtgatagagagggtagagtgaggtgagtaaatgggaaagtccagtccccggcagcacgtaggagtggtgacaacagagaaccaggcgtggcaagttacctgcatggaatggaaggagtaacaggacaagggcctccgcagtactggggaatggtaagaccaaagccagggactgagatgagtagggagactctggagagcaggacagctaggtcctctgagaagtcactgttcccctagaggcctaaggaatgtctctaacgttttcaacaaaagaattttatgagtagcctgaaacagaatactattggaataaaaaagtatattctagttactaaacgctgattagaggacgttatcaagaatgtgctataaccaatgaacaaactagttctgttcacggaagaacatgatagatggttgttgttattaataaattattttattctttggtcatgatattttctctttccctgcctccactaagatactcttcataggtcatagtgctgctaaaagtagaacccctcccaaagactgtaaggcagtgcccatgtttttcttctcacattttgtgaagctgtctttggtatgtttttctctctctcttctttcagagactatggagaagaagttagtagaagaaacaaaacaactggaactcgatcttaatgatgaaaggctgagatatcagaaccttctgaatgagtttagtcgcttggaagaacgctatgatgacctcaaggaagagatgactttgatggtggtgagtcaaatacttttgcccattttttataaaaaatttccctggtggctcagagtctaaagcgtctgcctgcaatgcagaagacctgggttccatccctgggttgggaagatcccctggagaagggaaatggcaacccactccagtattcttgcctggagaatcccatggacagaggagcctggcagactgcagtccacggggtcgcaaagagtcggacacgactgagcgacttcacgtcacttcacttcacttcacatgtgtgcaaaactagacagatagtagcataaacccccatgtactccatgtactcatcactcagttccaaaatagtcatcacgtttctatctcccattctaacctatatcacactccatccaatggattggattgtcttaaagaaaatcccaggaatcacatcactgtattcataaacagttttataaactcaaacactttgaagactagactataagtcactattgctggactttgtttatgtactgaatgacaatttaaaatttgcttataaaacaaatatttataaggtcaagtattttctcagtagtttttgtaatttcaaaggcatattcctaaacaaagaaaattcatctgctatttgtaataaattgtcttacctatttcatggactcttctgcatctggacgagtactttttgtacttttgatagtgctacacaccatccccggtctacttatctgatatcaggaaacagagttccctgacactcttgttcctgcaactatcagccttaaatgtaacctaatagctgagacattattttgccaacaaaggtccgtctagtcaaggctatggtttttccagtggtcatgtatggatgtgagagttggactgtgaagaaagctgagtgctgaagaattgatgcattagaactgtggtgttggataagactcttgagagtcccttggactgaaaggaggtccaaccagtccattctgcaggagatcagtcctgggtgttctttggaaggactgatgctaaaactgaaactccaatactttggccacctgatgtgatgagctgactcattggaaaaggctctgatgctaggagggattggggtcaggaggagaaggggatgacagaggatgagatggctggatggcatcactgactcaatggacatgagtctgagtgaactccttgagttggtgatggacagggaggcctggcgtgctgcaattcatggggtctcaaagagtcaaacacgactgagcaactgaactgaactgaatggcacaaatagccagaaatgccctgaaatatttgctataaacacaagataatttggatgggtgtggtcaagatggcagaagaggaagaccctgtgctcaactcttcccacaggcataccaaaattataactattttcagaacaattgtgtataagaatgacctgaagactagcagtgttaaagtgctgttaaactgctgctctctatattccagcaaatttggaaaactcagcagtggccataggactggaaaaggtcagttttctgtccaatcccaaagacaggcaaatgccaaagaccgttcaaactaccagataattgcattcatctcacatgctagcaaagtaatgcttaaaattctccaatctagacttcaacagcacctgaactgagaatttccagatgttcaagctggatttagaaaagacaggggaaccagagatcaagttgccaacatctgttggatcatagaaaagcaagagaattccagagaagcatttacttctgcttcattgactacactaaaaactttgtgtggatcacaaccaactgtggaaaactgttcaagagataggaataccagaccatctgacctgcctcctgagaaatctatatgccagtcaagaagcaacagttagaactggacatggaacaacagactggtattaaattaggaaaggagtatgtcacagctgtatattgtcaccccacttatttaatttctatgtagagtacatcatgcaaaatcctaggctgggtgaagcacaagctagaatcaagattgccaggagaaatatcataacctcagacacgcagatgacaccacctttatgtcagaaagcaaagaactaaagagcctcttgatgaaagtgaaagaggacagtgaaaaagctggtttaaaactcaaattcaaaaaactgagatcatgacacctggtcccatcatttcatggcaaatagatggggaaacaatggaaacagtgacagactttactttcttgggccccaaaatcactgcagatggtgactgcaaccatgaaattaaaaaattcttgttccttggaagaaaagttatgacaaacctagacagcatattaaaaagcagaaacattactttgtatacaaatgtctgtctagtcaaagctatggtttttccagtagtcatgtatggatgttagagtttcataaagtaaactgagcaccaaagaattgatgcttttgaactgtggtgttggagaagactcttgagagtcccttggactgcaaggcgatcaaaccagtcaatcctaaaggaaatcagtcctgaatatttattggaaggactgatgctgaagctccaatactttggctacctgaagtgaagaactgactcattagaaaagaccctgatgctgggaaagattgaaggtaggaggagaaggagatgacaaagaatgagatggttggttggtatcgccaattcaatggacatgagtttgagcaagctctgagagttggtgatagatgggaaagcctggtgtgctgcagtccatggggttgcaaagacttggacactactgaatgagtgaactgaagactagcagaaattatttcatgcaactaaagatataaaaaaggaacctcaacaaaataggtagaagattaaaggatacacagaacaaaaagatgtaaaatatgatgacaaaaacactaatagtggaagaggaactaaaaatgcatggttgttataaagttttgaacttgagatcatatttaaataattatatatgtgtgtgtgtgtatatgcaaatgattgaacctcctttattattgcttatatgatccttgtcgtaaccacaaacatattatagatatacacacatataaaaagagagtaatctaaatataatagtaaagatagtcatcaaatcacaagggaagaaaggaaccaaaaggagctataccaaccagaaaacaactaacaaaatggcaatacgtacatacctatcaataattactttcagtgtattagactaactgctgtaatcaaaagacatagagtggtagaatggataatggaaacaagacataaagacacacacacacacacacacacacacacctgtgagagagtcacttcagttataaagacacacacagactaaaagggagagaatggaaaaaatatattccatggaaatgaaaagacagctgggatggcaagagtcagacgaaatagactaagacagactgtaacaagagacaaaaaaggacattacataataacaaaaggatcagtccaacaagaggatataatagtggtaaatatatgttcacccatcataggtgcatctgaatacatacagaaaatattaacaaatgtaaagggagagattgacagtaacgcaataatactaagggactttaacaccccacttacatcaaaggacagatcatccggaagattgagatcatatcaatcatctttttccaccagagtgctatgagaatagaaatcaactacaagaaaaaaacctgaaaaaacaaatacatggagctcagtatacactattaaacaaccaatgggtcactgaagaaaccaaagaggaaatttttaaaatacttggagataaatgaaagtggaaacacaatgattaacatctgtggaatgcgacaaaaacagttcaagacgggaattttaatggcaaataaataagcagtctagccttatacctaaaggaagtattgtcgaaaaagaagaccaaacaaaattcaacattggtaggagaaaaaaaaaagattagagtggaaaggaaatagaaactaagaaccagttaaaaagatgcacaaaactaaagagctggtcctgtgagaagagaaacaaaattgacaaactattagccataatcatcaagacaaaaagagagcccagataataaaatcagaagtgaaagagtagttataccacagaaatataagaggctactagacaattcagttcagttcagtttagtcgctcagtcgtgtctgactctttgcgaccccatgaatcgcagcacgccaggcctccctgtccatcaccaactcccggagttcattcaaactcatgtccatcaagtcggtgatgccatccagccatctcatcctctgtcatcccctgctcctgcccccaatccctcccagcatcagggtcttttccaatgagtcaactcttcgcatgaggtggccaaagtactggagtttcagctttagcatcagtccttccaatgaacacccaggactgatctcctgtaggatgggctggttggacctccttgcagtccaagggactctcaagagtcttctctatgtgccaaaaaaatgagcaatctagaagaaatagataaattcctagaaacatacaatctcccaatgctgaatcaggaagaaacagaaaatatgaacaggtcaaatatcagtaatgaaattgaatcagcagtccaaacacttccaacaaaagtccaaggccagatggcttcacaggtgaattctgtcaaacatttaaagaaaagttaacacctttgcttctcaatctattccagaaaacttccaaactcattctatgaggcatcacactgataccagaatcagacaaaaaatcatacacacacacacacacacacacagaaaattgcaggcctatgcttctcgatctattccggaaagcttccaaactccttgtgtgcagcatcacactaataccaaaatcagacagagaaatcacacacacacacacacaaagaaaattgcaggccaaaattactaataaacatagaacatacaaagtggtctggcttgagacacccaactactcctgagggcttgtttccctgtggtcgcacagatgggtctgctttgtgtaagcctggatgttggaaggaacaaggcaaaaagctctttgtggcttctggctcttttcctgcaccttggaaggagtaaaggaaattggacagatcacaaagctttcagaggcctttctgaagctctcaggatttgtaaccctaaaagatccaggccactgaacctccacctcttctgcagggggcaccctcagagcaaggggcccaaagcccacctttttatttcctcttccttcaagtcattctttaaccacttctccagaaaggaagggactgcaaatacctaatttttctattccccaaaggcttgctgaatactagttcattagttaccacatgtcatgaaactatcacttggactccctgaattaataacccagggatcttcccagagcagcttcctgttctgctcactcatccttgccactgctgactccagagcttcagttgcatgcataaaactgacagaagttgtagttgcctttgtgaaaacccccctcctgtaacctattaatatggtgcagtaaaatgattatgctgtcactgaatatatcctgtggactttggggagattttgtttgattataatatgaaagtcatcatacttatgcctcccctagtgcgactagccactcacaactttaagaggcgatctgccgataatcagagatgatttttatttgagtgtttagttttgcgactgtactcttcacaccctcctggttcatctttctgtgtctttgaggagctcaggaggtgaccccttgtaagagtttgttaagacaacatggaatagattgtttgggtatgagagcattaggtcatgaagattagaaccaagttaaggtggatgcttaactatgccaagttcaattatttaattatgttgtgttaactgtagctgcttatttgtgttgcagaatgtgcctaagcctggacacaagagaacagactctacccacagcagcaatgagtctgaatacacctttagctctgaaattgcagaaactgaagatattccatcaaggacagaggtatattttagacacctatcaataaaagtaagatatgcccatcctgttattaacagagaacatttccattgcagggaggatcccatttgttcataaatgtaacatttgttttatattctttataataacttgaaggtgcttaattagctatgtatatacatacctattacatattcttgtcaatcgatatttaaatttttaatgtgattttgaggaccagattttcccttttgtaattcccttttataccttaacgtgctctgtgtgtaaaaagtatagcctatcatgaatttattttagactgaggtcattttttaaaaagtaagcttttatcctagaatattataatataaataccaatgccctagagtttagcaaaattgctgcctgtttggtggcagtttgtaccaatgtaattctcttctacaaaaatgcatggaaaacagcttatgaatctgtcttagtgttttgtattacatggtttgaaatcaaaatgacatattactgtaactccaagagtacagtgactttaagttagattgttcccaaaccaattctcatatcttcttcaaatatgatattagtttctgtaatgggtaattcaggcacattattttctatttttgtctcatgagaaaatgagaaaatggccaagtcagaaatagactgcttctggcagaacagctgaaaaaaattgaatgattctttcctttcttagttctacttgggaatgaaaagtttctccatctcattctgctcattttaaagaaattgtcacatggttggaatgtgatatagttggactcatacatacaagggggccaagtaactggtccaaggtcacagcttgtaagtggcagagccagtattctaactgaggcttgtcttttcagagctgtacacttcatctcctcccactcaggggttctacactgcagttctccagtcccctttctacctacacacaaacagataacattagtctggggacattgatacagcagtacggccagtatgtaatagcagaggttgttcaagttatctgttgtgcaacaaagcatccctgactttagtggtttcaaactacagcagtttattattgctcacagttctttgggttttgactgggtggtacttctgtcccttatggtgtgggttgaagtatctccctgcattcagctggagtgagaaggtctcctccttgggtctctccatgttgcttctctcttcaataatgcagtgagtgggttctaggaatgcaagggcaaaagatgtcaggctgttagggccagacccagaactggcatggcagctggttctgccacattttatggtcaaagcaaagtatgaggccagcccagattcaaggggagaaatggactccatctcttaatgggaagaaagttatttttgttgggtgatcgttggtagccatctttggagattaccccagagttagactttgaagattttaaaattacagcttctgagcctttagtggatataaagatgttttctccaaattcttacagatttgaggggagaggtaacctttttcatttctccttctcacttgttttatgtcaagtgactaaactgaactgaattgaacagtgggatttggtacagttttcatcttttttgaaaaatgaagtatgagttgtgcttcagaaaccaccagcagatcttggggtactgatactgtctgtcacgtgcattgaccaccagcagtgggtcatacacaggaagtctcctctcagtaacgaggcagggtattgactgaactagtcatgcttgttgcttgtgactgagtgcgtgcaactgagatgtggctggctttggttagtgctgtcttcatcatgcagcagactgcaataactctcctccttaggactgagtccataaccttagcttcagtctctctgcatttcagtttcctcgtctataaagtggcactgctattattatcttactttatagtgatgttttgaagattaagtgagttaatttttacacacttgcaacagtgttagatacataataagtgttcaataaataaaggtttttgccctaataaacaggcttcacacccagtataataaacagactgggtgtggccaggatcagaaagatgggaatctgtacaactgataatagaaaaagagggactgatcaccaagggaagctgggcaggagacatggcagtctaaggctgtggctgccactttgctcttcaagtcacttacgaccttcaggtttgcgtttcttcctgctgcttcctctataatggccaggtttacaaatcacctctgaacaaactaaaggaaacctttcaactcctatatgtagtgttcccaagtaactgctttagaatccaggggcccagggcaataatgggatcactcttgcttataaattgattttttaaattaaaatagattgttttgaaacacagaattctgacctcagtcatgtattaatagcaaaatttaatgtaaaaataaaggattaatgtctctttagtcacaaatcacagacgtgtgatttgctgttcacaagtcacagtggcaccttctctgctgtttctctctggagaactcaccagctagctccgcttgccttgtagcccgcccacacttctggtatctttgtggtctggggttgcaaagaccatgtaacagttttgggaaccattgctttccctgctgtgtcatgcacctttcttagtaatctttgactaattatctcagttctgcttctgctctcaagcttcctcacacttgtcaaatccagggaaagcgtcactgtaactttctcagctactgttagcagtaattccaggatgactgccaggcctatcatgctaattttgtgaagaaattctgttattttcctgatttcctctaatgagagattgttgttattttttagattagtttttaaagcttcactttcttggaaaagccctagatgacaaagtccttacaaaggaaagaaagcaaaaacaaaaccctagacaccttcctgagctagatggtccagtcatcctccttgctcatgtggtatgaggaggacaatatctcttcgattatacacgtcattagagataagaatgggcaccatttggagcactcttagttcctaatcattatgtctcaaacagttttgcacttgtctagtgttcctatccataaaattttgttcttatctataccaattagttaattttttgtgtaatattagctggtatctaaagaattatcccaccctattttaataaaaggagtccttttcaacaaaaatgaccattcaaggctggagaggaattattcccaaatgatgacattttaagtacagtgaatgaaatattatattcactcataggatgaaggcttcagttatagtatgaaaaaaggattaagtaattaaaattttcagggatgtatacatcattaatgggcttccccagtgattcagtaaagaatcctcctgcagtgcacaagagacacgagccacaagagacacgagccacaagagacacaggttcaatccctgggttggaaagatcccctggaagggagggaatggcaagccactccatcattcttgcctggagaatccccatggacagaagagtcaggtgggctacagaccatagtgtctcaaagagtgggacacgactgaagcaactttgcacatatatatatatcattaataatatgaacaaacattaaaatacataagatggaatgtttatattataaataagctaaaatatcagtatttgtgaggtgtatagaaataagtatttatatgaatgaaattctgtagtgattttatgttcagggaatatgttatctctattctactaagtcaggacagactatatacccaaactttttcttactctgagtatgataaaatggacagtaagaaaaagtccaggtctaactagcttgtagataaatgacgctgatagcctataagtgcccacttcttggtttagttgattcttcttaggtgtttgttttttttagaactagaatgatgctgaacttggcactactaggaattcacaaatgatcaaagatagctaatgaatataaaaattattcagcctcattaaatggcaaagaaatataagttaaaacaatatgaaataccactattggtatgtcaattgagccaattttttttttaatgatataacagtcattgctgctccaggcaaggtggtggttactgatggaagtataaacaggcctaatagactttaaaacattaatgtttatatatttatgtactgtcctaggggcttccctggtagctcagagttaaagcatctgcctgtaatgcaggagacctgggttcgatccctgggtcaggaagatcccctgtagaaggaaatggcaatccactccagtattcttgcctggagaatcccatggacagaggaccctggtgggctacagtccacggggtcgcaaagagtcggacacgactgagcgacttcactttcactttcatttatgtactgggatgtttattttagtatatttcaatacaaaagttagaaataatttcagtgctcatctgtaacatgatgatgaagcaaatgatggtatacattttaatacagccatcaaaaataatgctttcaagtatcatatataaatttggaaaacatttataataaatgccaagtttttaagatggtacaaaattatgatgaaatgtttctcctcttctttaaatttatagaaaaaagattggacaaaaattatgagttttctctggatatgaggttatacttacagttctcattcttgtacttttcttatttcctaaattttctatgaaaacttatttagcttttatatcaagaaaaaccttttttttttaaattgacatttggaaatataagatttgctgatcagttaagagggcttcccttgtagctcagttggtaaaaaatccacctgcaatgtgggagatctgggttcagtccctgggttgagaaaataccctggagacaggaaagattgataattatgcttattaattattattaattataaccattatttatatttattataattaataattatactttgatcatttaattaaataaataaattgttgttaccattctttttctctctgacaaaaagagactctttatcttctccattgagtctaatgataacaattctttctcttcagttcagttcagttcagtcgctcagtcgtgtctgactctttgcgaccccatgaattgcagcacgccaggcctccctgtccatcaccatctcccagagttcacccagactcatgtccatcgagtctgtgatgccatccagccatcccatcctctgtcctccccttctcctactgcccccaatccctcccagcatcagagtcttttccaatgagtcaactcttctcatgaggtgggcaaagtgctggagtttcagcttcagcatcattccctccaaagaaatcccagggttgatctccttcagaatggactggttggatctccttgcagttcaagggactctgaagagtcttctccaacaccacagttcaaaagcatcaattcttcggcgctcagccttcttcacagtccaactctcacatccatacatgaccacaggaaaaaccatagccttgactagacagaccttagttggcaaagtaatgtctctgcttttgaatatgctatctaggttggtcataacttttcttccaaggagtaagcatcttttaatttcatggctgcagtcaccatctgcagtgattttggagcccaaaaaaataaagtctgacactgtttccagtttccccgtctgtttcccatgaagtgatgggaccggatgccatgatcttcgttttctgaatgttgagctttaagccaactttttcactctcctctttcactttcatcaagaggctttttagctcatcttcactttctgccataagggtggtgtcatctgcatatctgaggttattgatatttctcccggcaatctcgattctagcttgtgtttcttccagtccagcgtttctcatgatgtactctgcatataagttcaataagcagggtgacaatatacagccttgacgtacaccctttcctatttggaaccagtctgttgttccatgtcctgttctaactgttgcttcctgacctgcatacagatttcccaagaggcaggttaggtggtctggtattcccatctctttcagaattttccacagtttcttgtgatccacacagtcaaaagctttggcatagtcaataaagcagaagtagatgtttttctggaactctcttgctttttcgatgatccagcagatgttggcaatttgatctctggttcctctgccttttctaaaaccagcttgaacatcaggaagttcacggttcacatattgctgaagccatattggagaattttgagcattactttactagcatgtgagatgggtggaactgtgcggtagtttgagcattctttggcattgcctttctttgggattggaatgaaaactgaccttttccagtcctgtggccactgctgagttttccaaatttgctggcatattgagtgcagcactttcagagcatcatctttcaggatttgaagtagctcaactggaattccatcacctccactagctttgtttgtagtgatgctttctaaggcccacttgacttcacattccaggatgtctggctctagatgagtgatcacaatatcatgattatctgggtcatgaagatcttttttgtacagttcttctgtgtattcttgccacctcttcttaatatcttctgcttctgttaggtccataccatttctgtcctttatcgagcccatctttgcatgaaatgttcccttggtatctctaattttcttgaagagatctgtagtctttaccattctgttgttttcctcgatttctttgcattgatcgctgaagaaggctttcttatctctttttgctattctctggaactctgcattcagatgcttctatcttcccttttctcctttgctttttgcctcttttcttttcacagctatttgtaaggcctccccaggcagccattttgcttttttgcatttcttttccatggggatggtcttgatccctgtctcctgtacagtgtcacgaacctcattccatagttcatcaggcactctatcagatctaggcccttaaatctatttctcttaactcattaaaaattcaaacacaaagtaaatgaggtaaaacagttatgacattctcagaatttccatgatggttaactagttccttttgcttagcttgaattggtgtatctttatttatcctgatagttcttgctgtggttctgttatggaacaagttgacatacttttaaatgctactaggttatcttttagtttattaagggctatatatgttttggtttttttgttttctgtctgtatgacctcaatatatttatactagcatttcaccttttcaaaaatcagttttcctaattacaaaagtagtacatgcttattgtacacaattcaaatatagaaatgtatgaaactgaaaatgaaactttcccacagtacctcccattctctaagataaccctgatggccttctagatttttgtatgccatgggcttggtatatttaaaagtcacgtgtttttttttttttaagaataattagatcacaatatagatactaacctgcaagttgtatatttcacttagtacttttatctggaacatatttatctacttgtgtagatctactttattctttttaacagctgtaaatatttcatagtttgattataccagaatttatttaagtaggtctcctattgaccagtatttggagtcttttcaggttttatgattacaaaaatactacagtgaacatcttttgtattgatattattgtatacttgtgtaagtattttggtagaattaattcttaaacatgattgctagtttaatggatatacagatttaaattttaatgaatgcagctcactttctcttctaaagggcctacttatactgccaccaacatcatgtaagacactgttagtctttgtcaatatgatggaggaaagtggtacctcactgttgtttaatttgcacttctccatttattagctggttggatgtgctcttcatatactctttggccatttatatttttcctataagttttcctgtttttctatcgagctgctcatcattttctcatcaggtcttacatcttatgaatcatcttgaccatcttataatttctggagtttaggagccaagtgagaagaaagtgcctctggacatgtcattgttcctcaagctccagaagcgggtcacagagctggagcaggagaagcaggtgatgcaggatgagctggaccgcaaggaggagcaggtgctccgcagcaaggcaaaggtgagcagtgctctcccagcctagggccacggcaaactgggttctgtgggctcttctttaaaggtaactcaggccagaagtactttaatcaagtaggatttccttcaagtgaggactgaactctccttactgttttctgcagagctaggtaatattctgagtaaaaattaacaattaaaatataactacttatttataaagttcttaactttatgtttttccctaggaagaagaaagaccacagattagaggtgcagaactggaatatgagtcactcaaggtaatggggagtgtctggtcaagactttgaatatcttgttttggcaagaaacccattcagagcctctttctctcagagaacatccttaatggtacctgaggccctagcttaagctcttttcaggcattatttctagccttgtgttgttacctttttaaaattctctttcacataagctagatttcagcctaagcagtagctgcctttggaggctgtagaaagtagtaaaggacatggaccctggtgtcagactgcctgggttcaaatgctagatccaccactatatggctgtatgcaaataatcctttctgtgcctcagttttctcatctatacagtgggaataatgataatatttgtcttataggactttcatgaggattatatgaagtaattcatgtaaactatgtagaatagtgctaagcacatagtaaagacatgttagctgctgttattatcttcattgttttaaaatacatcagccttaatttttaacaacaatcctgcaagtaagcattttaattcccattttatagatgaagaaatcaacactaagaagtataagtaacttcctaagataaccccactagaaactgacaggagccgactttgaatgttggtgtctctgactccaaaccccatgttctaaccatcaaatcccactgaaactatgtgtttgtagagaaagacagatatttgtttacagagaagaaacatattccaacatattttaaagaatagttggagggaaggggatggaggtggagaactatatcttcttagtggttcaaggcagagtctcactagatggagataagctgccactgtatgttctagagcacacgaaggcaggaaaaggcactggttaggaacattagttcctaaaatgcagagcatcttgggtaacacagagatgaagcccagaggggagactgtcccattgcttgattcagagctggctgtgtaccacctggctccttcctttgctttccagaatcaaaatcttgagcccctagaagtctgagctatcagattgtcagctgtcaagtcacccccagctccaaaagttccctaggctattaattaatttattagccttaaatttattattctcgatgttttctaattatgccagtttttaaactttttttctgcttttgaaaattgtggttttaaatagctggaaaatagcaataatgttcgtaattataaccaaacaaaactaaaaattagaaaagccacaaaatatttaacagtaggcatttatatatacttgagaactcctgaggtctctctaaacgatcatgaattttttttggtttgtttttcgtaatattatgcaaatctagtcctgataaattatttcctaatactgtgatttagaacataatctatgcacatttagaggcccctgttctgtgtggattgctacttcccacagtccagagccactgacacgtgcctcctctccaggccgtatggcatcttggtgtggagaatgcctgtcctctacccacccaaacccacaatgccttgttcagctccttcccctgaagacagtaagagtgattctaaacacttgactgataataccttatatttaccttacaatttgaaatgtttttccttcaccttaccttctttagtcattgtcacacttctgagataattttttatttcctttataagatcaattaactgaggccttagaagagtgaagagacttactattagttggtaaagtctgatcttgaatccagatcaccaaacaataggaaacatgctacgttcccatcacaacttgcttgaaaactaattttcacccccaaaatacaatatttacttttaaaataccctgcaggacctttccctttctaaattataattaaatattttgcttccccagtgaaagtactactggggtagtacatttttatgtttgtggaaaaagaaaagggtggcagcaaagggtcatctccattattctcctttgtcttttatgctctttgcctagaaaaccaaatcaggatatgggttatgcaagacaggagtcagatgggatgggttgggacaggccaaaggaacagggataggaatctcatctccagatcttctgcttctgcctgcctttcacaaaaaaatggacaaagagagacattctcatgtaaaaatgaagcccggatcacagagttccaaagtgttagcacagtgtttcttgaaatgtggtccctgggccatctgtgtcaacatcacctggaaacttgttggaaaagtgaatctgtgggcgtcacaccaaatctaaagccctccaccttctaagtgattctgatgcacgttaaagtttgggagacatggcatcagagcttaggtattgaagtagagacattcatatgttttctgttgcagaaacagaaatatgaatctgattactttggtgggatactgaagataggaaggagcattcatttacacatcagttcagttcagtcgctcagtcgtgtccaactctttgcgaccccatgaattgcagcacgccaggcctccctgtccatcaccaactcccggagttcactcaaactcacgtccatcgagttggtgatgccatccggccatctcatcctctgtcatccccttttcctcctgcccccagtccctcccagcatcagagtcttttccaatgagtcaactcttcacatgaggtggccaaagtactggagcttcagctttagcatcattccctccaaagaacacccagggctgatctcctttaggatggactggttggatctccttgcagtccaagggactctaaagagtcttctccaacaccacagttcaaaagcatcaattctttggcactcagctttcttcacagtccaactctcacatccatacatgaccaccggaaaaaccatagcctaagaatgaactaatccatgaaagaaaaggttataaattcttaaaccagaaaaaaaactgtcttcagatagtcttagcatgacatattaaaaggtctaatttggtactacaaacctaaaattgcttctctggaagaaacaataaaatgttttatgtttgtatggaagggtctcactttcattattgtaaaatcttagcaccatctgctaaataaatcagcatggtacttttaatgcctgtctgtttcactatttcccacccagtatcctatgatctttgtattttagtgtcagtaaacagagtttagcatcagaactctattctgggttcctgttgccattgtttgagcagggcgtgccaagggcagcgctaactggtgacgtgaggatggctggtggtatgtgatagtatggagatggtgaaggatgtgtgtgtccatctggatggatgaaggaggaggtggcccatcctctccttccacttctcaaggtttctgccagcaccttcacaagactgtcacacaggataaagtttcaaaaatatattgtttgttgttattgaaacattatagagaattttattagcttaaatgtcatataatttcttaattagagattagaagcctaaaatttcagtggtttttctcatccgctttacaaaggagataagaggatgctactcaccatttcagggatctgctcatctgaaccattcattagaagtaacctgacagttgggccctcatacttgctcttatatttacacataaagaaaacctgagcttcttagtacttatccaaactcatacctgaggacttagcattctctctaggcctgtgaacacacctgggcagattctaaaacctgggttgatgaagcaaactatcactcatcttgctcagttccacttgatgttgactttctgaattgcagagctgagttcccaggggagccattccctagggtggctctggcggtgttttccatcagaattcttctgctctcctggggaaaggtaagtaatcctatgtaaagctgaggaagatggcgatgaaccattctttgtctcgtcctacagcgtcaagaactagagtcagaaaacaaaaaactgaaaaatgagctaaatgagttacgaaaggccctcagtgagaaaagtgcccctgaggtgactgccccaggcgcgccagcctaccgtgtcctcatggagcagctgacctctgtgagtgaggagctcgatgtccgcaaggaggaagtcctcatcctgaggtctcagctggtgagccagaaggaagccatccaacccaaggtgagcatgagcaagtggcgaaggtgggtgctggggactggcctcttcctgttctttccctccaatttatgtgacagaaacgtaagtgtatttagtctaattgaggatatcatttgaaaaaaagaaactcaacattgtttaaaaactgttgcaaacaccaattagactgagcaagaagcaagtgaaatcccaactgcttctcaaagtttcacctctcactcactaagaaagggcttttaaaatgaatatttttatagtaatctgaccatgataaattttgatcagaaatataattaagtacaaaaatccataaattaccttgctgtgggaagccattaaatacaattttaaattatttgttgaaaatagcctgtttaactgggaagataacacatgtaaagattatacatgagatcagtgaagagaagcatggagatgatttctgctcacctcagggaattctgtttaatgtgggagtgggcccagatggaaggggccatatttagtgattccacagaagggacctaggatggagatatacatggttctttgaagtccttccctgccctcaggtaacttcagatccaccactgctgtgtgttggtgagaagtgggctttttgtcatttgataccagagagaatttgagtaatcatcataaaacgtggtctgcgttcctccttgcccatgttcatgcagcaaagtgttaccaagaattaggcaatcacgtatcccagctgcatgacatgtcatgtgaaaaatgactgtaagtcagacagagaccagtatatgccatacaatatcattacacatgaaatctaaaaacagaagcagattcatagaacaaactagtgattgcagggtaggaggcatgtagggtgttgggtaaaatcggtgaaggcagttaagcggtacaaacctccagttataaataagtcatagggatgtaatttatggtgagatgaggtgaagtcgctcagtcgtgtccgactctttgcgaccccatggactgtagcctaccaggctcctccctccatgggattctccaggcaagagtactggagtgtgttgccatttccttctgcaggggatcttcccaatccagggattgaacccaggtctcccacattccaggcagatgctttaacctctaagccaccaggaagtaatttatagcatagggaatatagtcaatagtactgtaataactctggtgacagatggtaattagacattttaatgatcatgatcattttgtagtgtataaaaatatctactcactttgttgcataaatgaaattaatataatattgtatatcaatacaattcaatttttagaaggctatagtatataatgaatgggatgcctagaaggttcaagagcacttctcttagaaatggtagttctgcacgtggttaagataccagacctggcagatgacgtacttgataacaactcacacagaggactgagcctctgggaaaccagcctccctctgcatgctagctggagtagcgtccaaaatgaggatccctttgcctggtttcctgtggcaatctgatattctataataaccaaaaactttagtaaaagttaatagaaagaaaaatgagccaaggaacataaaaacagctcagctcacaagagcatgtagttctggtatcacacactctcacctacctgcctcacatattccatgtgacgacttctctccagcccctgttgggctggacctatctaaccaaggtccctgctttccaggttctcagcccacagaacgcatcagcttgttctctcataagaaaaatgcacaggacactgactaagacctttccatcccagggttgtttgtcccactccgtttctagtcaagagacgtttcacaactcctttgcaggcagtgacatcccatgagccaggtgatgatagagcccagccacatctagtttacctgctctacctctgaaagtattctgggaggcttcacttggactaatgcatgacctcttgtcaaggcattactgaaactctcacaaacctaagataagaatttcaccccaatacatgagcagaaggcttgttttctcacatcctcacaaatactgtacaattagaaaaatcaaaacaactcaaaaagaatttcaactgagaattaagagttgccattccataaatatatgttaatgtccaccacatgccagttccatggatactaatttacatatagagttagttttaggagaaaccagccatggttgttttcacagttagcttttttctgttttgatggggactcattgatggaatttatttatggaactaagagtttgttttttttttccatttgtttttcttgcttgctgacttgtgatttttcaggatgacaaggtaattctgattttttaataagtatcccccaatatacacagttgatcctttctggccaccaaatctactttggtatttacaaattaatttcttgtttgacctcttcctatttgagaagtcagtggtaaaattatggatgtcatagtttcctgtctggaacacagagaggcctccatgacttttgaactcatagtcagctctgtgaccctcagtggtggtaatggtgggcccccacaagcagggaggaaagcccttaactcagaagcacaagctctcacttctaccagctgtgggtttgttagccaagggtgaggaggagcctgaggagctgagcatccccttcttgggaagggtgggattttcctacaaggcgcagccctttcagaacttctggttcctgtcttggcagaaactctttgagcagtgagtaaggaacttcatagtgctggtagtctgagtctgatcccatacttacctgtttcttagctgaggtagaacagaggagggaaggactggctactttataccatctttcctttggactggctcactagatcaacttacctaatttactacaagttcaaaaccacatcatataggttctcagatgtcagagaatacatgtagcattatttaatatagaaattggttctttgagttatttcttaacactaaaattctgagtgtgaggaattccctggcagtctagtggttaggactccatgcttccaagctgcagggggcatgggttcaatccatggttgggctactaagagcccacaagccatgcagtaccggcaaattaaaaaaaaaaatctgagtatggctttttaagaacagaaagattttatgccttaataaaagagaaaaaaagaaacttcctatcaaatgtatagtaaaatatttataaaacatagctaaaatactttttaaatgctatatgtagtgtttatgtgaaagatttttaaagttcagtagaatataaattctttatagcctttatcatattttaagtatgaatttgtaaactcacaaaaggacagcattagcatataagtaagatttttttaaaaaaataaatactggaattcaatagcaagtatttatgggcctcttgttggcattaaagttatcttggtctctaagatcacaatatttgaagtgtattctattatctccactttactgtgagacctgggtttagagcaagcattgactaaaggattaggcatatactatttagacaaatagagtgggcccatggattctaaagggtgttatgctttagagactattagaacagttgttcttattgtctatttttgccctggtttaggagggatagagagtggctggagtagaagcaaaattttgaaattatattggttgtcagattagaccaaaaaagaaaaaaaaaaggaagtaaaaatgttagcagaaaagtcctttctatacaaaatcattcgtttttctgacctgctagatgtttatttcaaaagcttatatactattcctataccataacagagtaaaaaacattaaataacagtagatcgtagatatttccaaggagctatatccttcccatttatatctctctaaagatgtgagaaaaaactttagttttgctgaaacatataatctaaacaccacttttttttgtactgagtttttaacggaaaaatgagttttgtgtcaaacttttcatatttcttagggcatttgttttgttataatgagtccagaagtaaaagaaagaacagctttgtacattccattgaatactttcttggtgttcttgcctagtaattgttttaaagctctatatgctggatggatagatggatggatagatagatagaaataagtatatttaaaagtatatatacagcattagaatagtaaccaggcaagaacactgatatttatgtatgtatttcacacagcataaaacacacatggcccatcagtgattttgttttctctggaatcacaccatctttgtagtagagtgttagggattctcaagagagggacagaggtgcctcgagaggtgcctcgttctcttgactgcctgtgccccactctctgtagtcaccctggggctagcgtagatctctggtggggcaggtgtgttgtagaacatataaaccccctattctgttggaaagaaaaatgttacatgtggtccacagcttttgagttaacacttaatgtggaaatgtcttttcccctttagaacacaatgacagattccacaatacttttagaagatgtacaaaaaatgaaagataaaggtgaaatagcacaagcatatattggcttgaaagaaaccaacaggtaagttgatctttctttattcattttgatttaatcatgttgatctttagtcttcaagccagcctcttgtacagtgagtacaaatgtttttgcattattttgttagacatcagctgaccttcaaaagagatctaacgtttccaatatattcccagttaaaatctcatttataagacagtagcattactgataagaaattgaaaggaaaatgttctttaccatcaagggagtatatttctgtgtttttagggccttagccttgagaaagaaaatcaattgcttactctgtagcatggactctcttgggtagtcacttccatttgttattcaggatggttatttgtgaaggtttgtaggggcagctgcggctttcagtaattgaaatttaacgtaaagagaagtgatgaaatagctgaatcacatccatgttggccatataattctcgaagggtaccatgacttcccaggatgcgaccttgatatttgagaccaagtttttgtcatgtttcctaaggtgttctgagaaaatcctaacactggtttttatctcatttactctaaacatgaatgaagttgaggatggcacttagctcagtcttaagagtcttgggtgggctgagagtgcagatttgcacactcactaaatgactgaactttccccaaagctttccctgtagctaagattatcactgctcatttctgaaattcctcagcctttctgccactcctgcttcccaaagaaacttcatgctattaaactctgaacttaaaagactacatacttaaaagaacttggccagtgatgataacagagattatcagtgtacatctagatctcctgatgcataatatcagaattggtatacagaaatacttcacagactaaaaaatactgccatgcaagatataaggtatttactaccttcttttatggacaagagtagagaatgcttattaaagtatttggttaaacttaaattttaatttatgaatgtaagttgtaagcataccttatagctgagaatgtgttaatgtaaaaaaagctatattaaattgttgatccatctactcagctattcagtcaccagatatatattgtatacctgtttcatcccagaccatgcaccaaatactggcaatagagcattaagcaaggtaaatgcagtccttcccttcacagagtttgtagagtgttggggagatagccaagagaatttggacttccctccaatgacagtggaagctgttgaaagatttttagtaggagaatggtatgatgagattggaaagctagcctttgcttttatgttagagcatagactgtaatggaacaagattaaaatcataaagaccagttaagaggttactcccataattgaatgactggttatagtgactttgacttagttggtagccattaggattgaaagaaatgggacactgagaaggatacttaagaagatgaggtgagcagccttgcagtttactggatgtgtgatcaggggagagggatcatgaagagcaactccgcagcatctgtggtggatacttggttgtacagagatgccacttcacgacgctgggtctgggatgtagggaagtacaggaaattatcaatagatttacaaatatttaaggaagtaggaagacatccaagaagagaacttcattcagagattgaaaatatagatctggaacaggagtgacgtgtgggctgagatgtaactattgaagtcatcagcatgtaataatacagtcgagaccatgcaaatagaccaactctccagggaaagatggtaaatggaaagtaaaagagcaatctatgaaattcgttttatgtaaacatggtatcaacaacaaaagtctagtaagaggagtaagatcctgggctctgtagtcagatagcacctgccaggtatctaacttctaaactttggtgtcttcttctgcaatatggcaaatgatatatattgttactaggagaactaaatgaaagaatgcctgtggaaggatgtaaaacagtgtctgatacttggcaaacactcaaaatattatttttatatactctaatcagtttcatcagttttatttgttaattatacattcttttaataaaatgtgtgacttttctagtaaaaaagcactttccccgggtcttaaaattaatttttgacacaaaatttttttttaagttgtgtcataaaagctgggaactttggacatatttatcagttactcctataagaacttttaaaagcaattttaaaaatacaaaactagattttatcaagctaaaacaaattcctacccagaagacttaaaactttattttgaagtgaattataaagattgccacatgaagacaatagcttaaattttcattctatatgtgtatgactgttgtggttagtctctaacataatgtgtgacataagatcactctgctagctgaacagaatgttaaaaacagatgtctttctcacctcctgagtcatttattattttgcaggaaaagtagccctggatccttgattattttgttttaaattctccacctttacatgtgatgttacatattactcattagaaaaagaatattaaccaaaaataatttccgtggtaatgtcttgaagtcgtctgtaattaataaaggcagtcctagtgatttaataacatgttgaatgccgtgtgctcctgttgaccatcgtcatctcattaccgccctgtatcccttcctgttttgcattgttgttccttttgcatggaagaccatctgctatggactgccatgagttgaatgaggatggagagctgttgctggtttatgaagggttaaaacaagccaacaggttatacttgtctcctcaaaatggaatgttattaatttgttgtttttcttactaacagtggcctcctgactttaacttctatatcttttatacactgtcttcctgggtaaatttccgacactaaaattcgtgaatgtctcactaagagtggaagaaaacccaaacctctcaactagagcccaaacaactgtaggaaagattaatacatattacttagctgtttcttgtttggaatcatgatcagttcaaaggatacctgtgcctgggcattatagctacattctcatatattatcatcatgctgcctaacagcagtattcagtacatgacttggcattcagtgtggttattgtgaaattcagatttatgaaacagcaaaccaggagggtttcctgcacagctgtagttcaaaataattacccaaactcatcatgttaaacatgtttaggagaaagcaaataaaatggaaacagcaacaattttctaacatagacactcatctcctctagtgatacttgtgtcttaaaatcttaaaaatactggggttttttggtcctaaaaatactgtttttatgtcttaaaaatactgtttcagtgattaatttttaaactacttaatagactgttttgttcaaggagcttctacttattctgcttttttcttatcacatactgttgtcattaactttgtggtgttattggttcagatcctttggaaatttcgtaatccccaaaatatttttagtctgttgtttactctttgcttataatagtatccgtaagtttgcccagcatttgctaaccaaggggattggaatgaaaacatcttttctttcttcctgttagttaattcctatctgtaactttgtcttgtctttgggaaagggagtaaatgtagaatgggggtgcctgttagagggaggttgccagttggctctgctattctctggccagtgccctagtccatggcacagctgacctgtatgtttgctcaaagcccaagaacaaatctgttggtcccactaacagtgatcttccaaaaccatatcttgttaggattctcttactgataaggaagttataggggaaaagaagatgacaaatttaaaatataaacaaaatttcagaactctgcatttgggtaaatctgtatttcagaatagcactctagcctttctccccttcagagataaaagtgggaccctggtcacaaacccccacctggaattagtaatgctgaagatcttcaaggcagatttaattaaagtgagcatttgtaatcttgccctccatagtgattgttttgtggcaaaggcattatagtaatactaattttgccaacttaaatgctactttaaattaatgctactgcaaatgtagtaagccaggttaaagttatgtcttttaattgttttaaaagacatgtcttttaattgttttaatttcctatgaagctttcaaaggagtaaaattctcctgtttttcagggcctctgagaactttgtatttgtagcagggtcctcaattcagaaagacacatatgtgagtgcattcatttcgtttctggctccatttgagtttctagactctaatcaagtcagaagctacacagacactacagagtctccatttttctgcccttgcaagtgaacacaaagcctcacacccaccaggtagggactcagatgtcacctccgtttcctccctgtgtggcttctccgcaggctcctggagtcccagctgcagtctcagaagaggagccatgaaaatgaggctgaagctctccgtggggaaatccagagcctgaaggaggagaacaaccggcagcagcagctgctggcccagaacctacagctgcccccagaggcccgcattgaggccagcctgcagcacgagatcactcggctcaccaatgagaacctggtaaggacagcagagcagccctccatgcttttggagcaaaacctccttctggctggggaagatgccgttcactgccccacgcttatgaccctctttctctaggccagacacagtaaggaaaatacaactatgttggtagaagtgaaaaacgcgtgtcctcgggtggtagcacctcagcccttgcttggcgggtgtggaagatgctggccagctgtgtgctggggtcttgataccttgagagctcagcttcctccgctgcagccgcacagtctgtgccatccaggaggttgtgtggttgccacaacctttggtccccaggcaccactgaggccctcccagccccttctcaggcagacagcagggttagagttagtcagcgagcagatggcagaaccaaagagggctgtaggttgaccttggttgggactccagggtcaaggagaaacatcaggattcaagtttctacattcttgattctttttaatagaattcagacagtgaatggagagatttattttttccttgccagctagattctgagtaatggcacaaagtccaagttttttttttttttttctctttctgtccttctttcttttatagaaaatattttccaaaatatttctttctcagccacaaaataacttttattacagatttctacttaggtttgatgaacatatttattaaattaaaagtcactgaaaagttacatttccttttttttttttttttggcggatggtggtggggctttgccacatggcttacagggtttcagttctctgaccagcgaactcctaattccacatttctatataaaatctatactgaagtgtcagactggttttgagaaaagctgtttagggctagtggtaattgtttctttaattcagaattttaataacttgtgataaaatagtttggattttctctgaagatttagcaacctgaattatccattagtgatcatttgcattacaggtagttttctagtgtcacctgttcaaccaatttttatattagttggaagcaaaacccaaaggtattcttctcccagcctgtccttccttctgaggacagcatgctggtgagactgtggcaatgggagagatgggtgagggacttgaagtccagactctttccaaagtgcctgaaatatcactgatttgtggaggaggatctgaatcgtgatgttattttattactcacaagtatattgttgcttaaactaacagtgcttcagtacctaagaattgataaataaactcaataacataataattattgattagcatataaattctgtgcttttaaatcattatcttaaaatacaaggtgaaaccatgaaataaagatgcttctgggtggtagattctcagagttgttttgctaagttggttaagcatttcctttgcaatcatgtgtgcattattacttttctttttgattttgtatagctgatacaaaaataaatcaatcccttccatattctaagctggtgaaacctagtttgaattttaggaaaactgtaggttcataggcttctcctgcctcactgattgctaattcaggagaatggattcaaacttacctacaggggatgatgcagtttttcactgtcattagaatgtcttatttttgcatttctattggaagcacttgggcagaatattaaagcaccggtgggcctgggctttgtgttcttcgaaactctaccctgaaaacccttcccacaaaccctcccctacaaacgcaaacacagagatgagtgttctgcctcctctagtgagcaaacttcacaggttgccccaagctgcccttcagagaaggaaggcatacagcttctgcccagtccttccaacatcaaacaagagctccaactttgccattattctcacttttgtttgaattcccttccccactcttgctgctgctgctggcagcagagaaagtgcagcagcctaggagcaggtcagaggagtgaaataacagccttgtctggggaatatggaccacagctctgtttacctgctaatatcgcctatttcctccaagcatgtgaaaatgtatttgtggatatagaatcagaatcatctgtactagaaaagttagagggcaatgacagatgtcaaatcagagccgtttgagtctatatatatagattccttatctgtgttttaaaatattttaaaattgattttgctgagatagcattcccctcaaagacacagagaaaaacaaatgtccattgtgcctgttttttcagtattttgaggaattatatgcagatgaccctaagaagtatcaatcatatcggatttcactttacaaacggatgattgtatgtaaaagagtgcttctctgtcgtcttcctcactgtttctagccctctataagcgaagagcactctgcctgcccttcctgggaggtctcttgaggaactttcacaaaacctgtttctacccacagctgtcttttagccagtgatgtcgcctctgtcagtgtcctgcgtccattgtcacctttggtttgttattaacactaggcttacagtgtgatggaagcaaaatatgatttgaaaggtaaagtaaaaatccaagaagcacaactgaacactgtgaaatgttagcaactgttccttttgaatcattggtcaaatacctaagtcagccctgtctaaattggaaaaagaatgaatacttgtatctataaacgccttttaaaatccataacctgaataacaaccacaaacctcttaaatcattgctttatttctgcttgaagctcctggtttgctgttgcccacttttcttcttaaatattgattgtttgtctctgcctgtcatttgaaagaattcttgattagggagccaagtatcacaccttttttttttaacccctgcccatgaatgtactgcttttgttttctctttttgcacaaatcatatggaattatcctcttttctccctataagcaaaattatattacccaggagatttctatgggtgtgttatctaactgccacttagtctgtcaaccactctgtactgttctctgtggttattttttaacttaccttttaattcccgaaacctcttaacttttcttaagttacaggactagttttagcctctccaaagggtggaactcatagagacagtgcttcacacacataggtgtcagttaaaaacccccaggtgcaaccatccttaaaacttcacacaaaagtgtgtgcattcatcaaaatttaccttgcttattccccctttaaatgaaaaactttctactgaaatagcagtacgttttatgagcatttaattgttttgccccatggaggctactggagtctactccctccatagtgagcctgctgtccatcacgctgtaaaggagttattgcactgtatattttaacatttgctttcattatagctgcctttcctattgcctgccagttttagccaggtggggctccaccaatgagcttttatggagcttttatgtaaaactaactttttatgtaaaactaagtactgtttctgtaactttgtgtctgctttccttcctgcattttagatggtttattttgatctttctgttatatttcttattttgatctttaggatttgatggaacaacttgaaaaacaagataagactgtccggaaactgaagaaacaactgaaagtatttgccaaaaaaattggtgaactagaaggtatttaaacatgtttttatgacagttgctgaaccttggttttatatactatactcgtggcttaagagtgtggctcaatttgtgtatgaatattagggacaataacaaaaatgactttagcaaacctggcctccgtggagtagaaattttcattgctgagtggggaaaaaatggtcttttcatgatagtactaacttacaaagagagaattcattgaataaacatctaatggctgtcttctgtatgccaggcactgtgctaggcaatgttgcatgtcagttaagggcatggattctgtagccaagtttcttgggtttaaatactggctcttccactattaatcatctgatattgggcaagttactgaacctgtctattcctcactattcccacctgttaaatgggaatgataatgatatctacctgacatggtttgtaatgattaaattaattaatatgtggaatgaatttagtatggttcctgacacatagtaaatgctatcaacaacttatatttattactgttattcttagtattagggatactaagatgagtaagacagagtctgtgtcctcaaagaacttaccatcaaatggagaaaaaaaagagaagtaaataagaaaaaatgagttgtagttaaaaaggagattctataaaacaagatttatatatgatgatgatgggaaaacaccttgagaaagaatcagatatcagtttttattatatacaaacgattcttgtgggtgagcgtttgttccttcagtaagtaggtgccagggatgtagtagtgaacagggcgaaagccacattgtaagcttatcccagcaacaatctcattgttctagagatttggagcccctctttggaattgccttcagacctacgcaagctattaccattttgaccagaaatgacactgtgcagtctgactacctatctattctgtcattgtcactgaataatttttgctctactcaaagggtgaacattccccatcactgggaatgttcaaaagaatctgccacgattgactgtctggcttccatccctccaacatgccaggcctgccataactctcccacctgtttgatcttcccgcttctattagtcgaggcctgcttatcctttgagaccagagttatatgtcacatgctcaagagcagccgttcctgatcatccagacagaccctacggctgtaccctctgtggcaccacagttcatctcccacctttatggtcttcactgtcatgtttttagtaaatttgatgtctgatactggcttcctcaatggattgtgatcttttttgagcatggtgaccatctgttatttccccttgttttcacagcacctagcatattgtctgacctgtcataatcattccattagtgtttgttgaatgggtaaataagtgtcagaaatatttagaacagcaacatggatatttactttgaagaggataatattccctcccatgttcaaatactgaaatatttgtttagatatcagatagattactgatagattaaatctataatattatatattatattattattatataatcctttagcattatgtgattcatctattaaaattttgaacctccaaatcacatacatgggctataatgtctattggcagaactttaaaaaacctttattcagagaacctttctgcacttaactctgcattaattatatcatgagatgataattagacagcagagtatctgcttaaaagaaactgattttaagggtattaacttataaaattattttttaagctcctaatgattcctttaccatatgttagtaacttttgataaatagaaaaatcacttattttacatttttacttagctttttttgatatgtatatttttacttaaagggatacctgagaatatttcatgatgttaatgattttgagccattatcagtcagaattcaaccttatcagttaaactatcctgccaattgtattcttaaatctataacgacatttgagaaggcaattcatagtttaaacaaaaaagacatgatagtcttaaaaactgagctaaatgatacacagtctacagaataagatgaaattggcttatgcgtcttgagcacttactgagtgcagtgtccttcccctccccaaggcagagcataaaggctacaagctcttctcacacctttgtctcctgttgtcttatccccacggtgtgtagaaaacactgataactttgtatagcaaagcaccttctaatagctaaaagttttcttcttttttctaaatatataataatgtacttaaattcttcaggttgaaaatagcaagacttacctcctcctaggggctacacttaattaaagagacatttttagataccatctaaaactgtttttaatgccaacatgcctaattttagcagaaattataaatttaaatcaagagtgtttcaaagtttgatgtgctttgtgctatattttaatccaggagtgggtgttccatctcaattttcataaagtcagtgaatttagacctaaaagaattctataaatcagttaattacttcataggagaagagagctgagacccagaaacggtgaattctaaagtctcagccacttagtgaccaaagtggaactagaatccatgcctcctgagaaccactgacttctctcctttgtgttgtatttctcaacagtctttcttcttatagtaattcattgactgtctcagttaaacctgagatcaaggtcctccctgtaccaaaagtgagaggggcggaatcttccaatttcctttctttctctaggataaaaaggtccagaaatgtttttctctcaagtataaataatctagatgatagaaataggtattgcttcagatctttctagaaagatgtctgtattagatggagcattgggctaaatgacccccagcatcccttgagtctttaaaaactgtgtggtattctggcttctctcaggctttatattttcctgatactacataagggttgacattttaattaatatatgatttgttaaataaatcaaggttatgttgagctgatacctatattttatctgtgaatttttgtaaagactctaatctctgacaagaatttaaagacagagaaaattttaatgaaaatatagcaaattttatctctggcatttttgtacagaaccgaaaatatcttctttagagatatatgaaaggaaagtgaaggtttcttttaaaacatgtaatctcttagttaaaatattcactatatttcataaattctgaggcggacaatttttcacattttaacatctgaaattatgatgtttattatcgcagttgttagattgtagtttaattggcaatatttttccttccttggtgttatataaaataatactatatatcataatcaaatatgataaaattggtaggtttaaaatgttttgagttattcagagtccacatatgtgcattgttcataaacttaatatcaatacgttgaatctgtttccttcgtttcccctcatagaattgttcctgtggctcaaagcaactagttcatagatggcaggggttctattgttttacatacagaacatattcaggagctgtgagggccactgtatgctgattctgagatccccctggtgttgtgtttaaactgtctccagaaataatttatgtaaaactaaatagcttgaatctcatatctcttgtgaagatgcatgcatttcccgctagtcctgtggttccagactgtatcatacatctgaaacactaggttacggaaggtggccacagccctgagctgtccagttagagtatgatggttctctaggtatcataatattgatagacggtggtgcttttcagcgctgatagccccgatgtgtgatgctgcagcgtgaggtggacgaggagtcaccaggccctctgccacatgagcaagagcgctggcaggtactggtgttctctttgataaccttgtgctgtcaaactggcttctcagagctaacacaggaaattgctcagagtgactggagaagctctactcagcaagatagaactttctaatgcatctgatctgcattttgtttgcctacagtctctgaactcaaacttaatctgcacttaaatagatgtcttaactgctgctcttcctatagataagagaattaaaaatgtgcttgctagcatttagctccacaaacactgttgtagctcgtgttcccttgcatttcccagatgagatgaaattggagacttttaaccccgagttcttttctcacagctgccatcaacaatggtgattagttttaacatctgaaagggttgttcaccagtggctgtacatttttggttgcaactttgtggtaggattttaacactttactacaaacaaacaaacaaaatgaataaatttaggaaattattttaatattaaatacagagacttccccaggtggcccaatggtaaagaatcctcctagtagtgcgggagatatgggttcaatccctgggtctggaagatcccttggaaaaggaaatggcaacccactccagtattcttgcctggaaaattccacgaacagaggagcctggcagactatagtccgtgggatcacaaagagtcaaacacaactgaacacacacagacacaaacatattaaatacaggttgttttatctgctcatggtttcttcaaggaatgaggggtgcctctatagaatattgaatttccttctatgaattaaaatctaaatatatttagacatttatgattgatactgattagttaactaagaagtgaagtgacgtaaagtgaagtagctcagttgtgtccgactctttgcgaccccgtggactgtagcctaccaggctcctctgtccatggggattctccaggcaagaatactggagtaggttgccatttccttctccaggggatcttcccgacccaaggataaaacctgggtctcccacgttgcaggcagactgtaacctctgagccagttaagccacttactttggggacatttaatcttattacaaaataaaatgtattacaaagagatacttttgaatcaagtaagattcttgatgttgatagtaataagtactagttgttgtcagagtgacaataacatgtaattttaccatctatccatccagttttaccaaaaaaaattatttaaagaaggggcaattaagtggcaaatatggcaagtttctgttgttacagagttcacttaataggaacatgaaaccgctcatcttttctacctggaacacatttttcttcttttatttctaatgaagtgggccagatggagaacatatcgccaggacagattattgatgaacccattcgtccagtcaacattcccaggaaggaaaaggatttccaaggaatgctggaatacaagaaggaggatgagcaaaaacttgtgaagaacctgattcttggcaagtatttcctgtgtgacatgaagggtctttctggtacgtgtcagtggtgggagagattagtcactcatttattacatattcacaccggtttctttggtcaaccttgcgtgctgtgtgcattctgaccccctcatggctgtcagtcaccctgcaaggccaccagtgaggactgcctattagggtcacgtgaggtcttctcagctcctgttgcctgttataataacccaggaagcttttgaaaagtgttgatgtatgttcccccctgcagaccaattgcatcagaatgtctagaggaaagaacctggccatgtccctagttcttttttttttttcctgtctctcaatggattctgacgtgtagctagctgcagttgaacaccactgccctgggccatttaagtccctgaatttctcttgttccttacttccctaggaaggtatatggctaaatatgtcaggaaaaacagtttaatagtaggaaaggaacagaattaaggaaaagattccagcagtgggaagagaggactgactggacgatggagacgggaatagaagaagcctgtcagagcagcagaaggcctttgagtctgggtatgagcccactggctctgcaagaaggctttttaggggagcatgggagatagttcaggagtgtatgcagcccataagttgtgagctcaaaacactacaagcctctcctttcggcttttgcagagcattcctccccccaggtgcctgggtggcagcagtgtgatcggcagtggtttaatgttcctagagttcgcaatgttaaacttagaactatatataggtgcagaggcgcttaggtttcagtgtgatcttcattttgagaaaatggtaagaagccactgatttttaagcatagaattaaaaaagattcatcaattcaataaacgtttggggcattcctactgtgtgctaagcattttctaggtattgggtagtgaacaaattctctcttctcaaagagtatattccatgggggtgggaggaggtagataaaaacaaataagggggtgagaaagataaacggtgaaggcaggtgtgcaaatttatatgaagttgttaggaagggcctctttgacgaggtgatctcctttggacagagaccaaaggaagtaaggaagcaagtcctgctgatagctgagaaaagaacattccagacagaaagcctaggggtgggcacatgcctggcgtcttcatccagcaacaaggagacccatttaatgggggagcacagtgagctggaaaggggagcaggccagatcacgcagccacggtgaggatttcgggttttacaaatgagtgagatgagaagctacttggaagattttcagaacaagagtgacatgacccgattacattttcttatagaattactctggttgttatgtggacagtgtactactgaggagcaaggcgggagtcagggagaccagttgggaagctctcactgggatcccggagaagatggtggcggcctagactaggggagctggtagagaagtagcaggattattctggacatgtcttatgtgtagagccaacaggatttgttaatagattagatgtgtgatgtgagaaaaggaaagaagacaaagatgatgacaagatttatatcctgagaaactagaaggcagagactgccacttactgagatgggacaactcctggaagagcaggttccatgggggatgggctttgtgggacaggcctgagcagagatgtcaaaagccacttgttacatgagccctagattcaaaggaaaagtcagggcagaagatagacatttgagagttgtcattgtgtaagcaactaagattctcatgtccctacagtcatgaaatcctctactctaaaatatgcttttttaaaaacatgacctatttaccctgaatgattgaactgttacatgagaactgtgcttttatatctcaaaaagcattccttatgaagactttcaaagttatgtaagactgtttttcctcttttcttttttagagctgaagccacgtggtgtggcagtcaatttgattccagggttaccagcgtatatcctgtttatgtgtgttcggcatgctgactacctgaatgatgaccagaaagtaaggtcgttgctaacatcgacaattaacagcatcaagaaagtactgaaggttagttcatgttcaacaaatctctcataatgaatattaatgatgacagggtatctacagaggtatttttccatccttagacatgagctaagttgccagttatggccacattttagtcttaactgataccttccattataggaaatatccattatgtaatgtgtctgtgtgcattctttcaaaacagggctcagattgaacaataatcaaaattaattcaatatacttacatttagctgtgaagtaaaccaagtttcttcatagaaatagtctgctttgaggtctgtcttagaactaaattaaaaatacttagtgaagttcatatatacagggaatatgatgctatagttaaaataggtgtttaaaatatttagtgaccgaagcgacttagcaggagcagcagcattccattcatataaaaagctgtctgataaaatatttaaaattctcttctgacttctcttcccattattcttcagctcactccataattttccttgttacctgaaatgcctggtttcatgtgagcagcaacacatagatactaatcagagaggaaacttggaaaaggcagcgaagttacataatagaacagaaagccctacataactcagtaatcactgagtcacgttgcataatcatccttttgacaacctagaaaaacggtgaacgttattcttagtttgaaccatttttcagtgcacagttctgtggcattaagtacattcatattgttgtataaccgtcaccatcatcatctccagaactttttcatcttccccagctgaaactctgcacccattaaacactctcccccagctcctagtcataacttttaatgccagttctcagtccctactgcacagatactctatgtggttacattctgcagtggttactaaagtatggagtttctaaatatgttaacattcaaaaactgatgaatgtcttctgaatggagctcatgtaatttctggtatattgatggtatactgcatttattagactatgaattttactacttcttaagtgaacacctatgaagacagcaaaaccaagtcatgaagttttctccctctcatcttaattacaagaagaagtttatctaatttgactaattattgtaccagattgtttagagatttaaaatgagtagctacttgggacttccctggtggttaagacttccactttccaatggttaagagttcaccttccagtgcagagggtgtgggtttgattcctggtcagggaccaaagatcccacatgccttgtagtagaaaaaccaaaacataaaacagaagcaatattgtaatgaattcaataaagacttcagaaaaaaataaaataatttaaaaatgtaaaaagtgtagattcttgaacatagcactcttttggaacatccttcttttaaaattgaagtacatttgtcttgtgtcctgttttgatttagagctgttgtttgacatgtggcccaggaccgatgaaaagccagactgtccagtgctctgcacaggactccttccatcccatgtctgattcgttcctcagaaattgtatcttaatcactgacaagatttttaacctaatctgggttttagtgcttcacagtgcttgtgattctcttttgtacctttagtcctttcttattcccttcagtaacccccagggaagtaagtttgggtaagctagacttggtaaattgttttctgcctaaagggactagtaagctaatatcaacggaatgaatgggcatcactttctaatggcaagaaaacagatgccaagcaaggtaacaactaatgaattcagtggttgaattctgtagcagcaacatgaggctttacaacggtaatgtgactgatttttataattgttgttaacggtaagtgaaggaaacgggccttctagtatcgattcagttttttcaggcttttgtttccataaggaaaatactaatttaggcttattctctcttttagaaaagaggtgatgattttgaaaccgtctccttttggctttccaacacatgccgatttttgcactgtttaaagcagtacagtggagaagaggtgagaaaaccttggttacaaaactggcatgctatactttgtctgaactttttaaggaaaaaatttaaagcacaaaatgtttagtcacttgttaatttagaaacctgaattcagaagtggcttgacagcttataggtctatttgacattcattatttatgaaactgacttgggaagtggtgtagtttcttcgctctgagagtttgtattatgagaaagcacagcagaaataaaatgagcattggtcattgaatagttatcgcactgaaactttttgttaagatgtgaaaatggggttttcaaggattgatatatggagctgtttaaagaaatgaatcaattttagctttctataatacattaaaagtgatcatgttaaaaatatctcaagactttttcaaaaatatattttgcttttgcttatagtgatgtgttcatcagttagttgatagacttcctgtttcaaaactacatatttataattattatttattaatggctacatagtatatatcagacagcacccactatatattatgttgtttaattcttacatctctttgaggtcggaattctaacccagttttacagaggaagaaactaaggctcaagcagttcaccactttgcccatgtcctctcagccataaggagctgagctaggattttgggtctgcccaccttcaagagcttgtgcccgtaaattctgcccttcatgcctccccatcctttgctgtcaggacaggcagagaagctgagtagtggccactttctgagcactcacaggcttggagcagaagactatcctggcaaatgatgggaaatacagtatgaataagacatggcccctgagcaggtgggactgacagaccagaatcccccagagggcctgttaactgccctgtcagtccccagttctagaccatgttgtcaagtaagttgtagagaggcagatgcttgagtgtggccagaatccatcacgtaggcaaaagtacctgcctgtacagttggctttccgtgttaaccacataccatcaaaagattccattctaagcttggactgagaagcctgtatgaataccataaaatacaattaaggaaaattttttatttattcaccaagtctctgtagaaatgaccagttttaagaaaattatacatgtctttcaggttcggaatttataaataagactctatttagtgaactgaagttaagaaattggtgttttacataatttagtgtttggcagtaaaccagctgtttcataagtgaaaacactcattatttttttttttttttcaaattgagttcccctatctcatttcattgacattgctggtggaaaggcttaaatgctagactgccaagtttagatattattcaaacgctagtaagaagtggaagcagggatgtgatagaaacaaacacgcagaatttgggaaggattatcctggcacttatatggaggttggatgggaactcttaggagaaaggtaaaaaagatcatgaggatgttgatcaaatgagagagttaaacagacaggagacattttatttcatgtatgtcattaactctgcattatggctctagggctttatgaaacacaacacctctcgccagaatgaacactgcctcaccaattttgacttggctgagtaccggcaggtgctcagtgacttagcaattcagatctaccagcagctcgtgcgggtgttagagaacatccttcagccaatgatcggtaagtccagggcattgctgacatccaggtctgtcttgtggcacatgtgtcagagcatgtattcatgtggagaaggtaaagtagtaagacgcagtctcaaaattagctgaggaatctcagaaccgcagccatgactaactggggcacatcaaaatccctgcttctacgtgatggaaatggcaggatctattaacagtttccctctctaatgtgtaatgcctctctcttaagattgggttatgctttatatccagcaacagactcagaccttgtccagttttcaaaaacaaaaatacttgaaattttcattgagggcactactgcagagaactttctagggacccaactaaaactaaagagtctaagaagggtttgcagattacctgataggctatagtaacagggctggaaaggtaccacggcaacaaaaacaggtctcagacactccatgctgagtcgttcatctcatggccccagtagaatcattaaaggcaatttggtttaaagttgcagtttctcttggatgagcaactgatcagcatgtgtgtctatgtatatgagattccatgtacctctctttatatgtgtgcattcactctgggtatgtatgtacgtattatgctacctatattcctttggaaagtgtagcaggtgtgaaattggaattagagggcatgtgaaaattgcaggctgctgattttgtgcgaaaactcagggcaaggaagggcccagctctccagccccatgtggctactctctcccaagaccactgcctggtctcctgcttttcttactacttgatttgtttgcttctgaggctcgatactactggagaatacttatcttctccctaattgcctctctcttgaaaacctctctctcaaaaatcctcccaagaaactttacacatgtgctattaagactactgtttcatattcttgaaaataatccattaaaatttgatggtaaatttttgcttttaaggataattattttattaaatttaaaatccagatgcctttttacttgtagttcctctcccctctagtttgatgctcaaatcattttcctaagttgtgtgtgtgtgcgtgtgcatgtgcgtgtgtttccatcagaatcttcttctctgacgtatgaacttctcccttagtctccggaatgctggagcatgaaaccattcagggtgtctctggggtgaagcccacagggctaagaaagcgaacctccagcatcgctgacgagggcacctacacactggactccatcctgcggcagctcaactccttccactcggtcatgtgtcagcacggcatggaccccgaactgatcaagcaggtggtcaagcagatgttctacatcgtgggggccgtcaccctgaacaacctcctcttgcggaaggacatgtgctcctggagtaaaggcatgcagatcaggtgagcgaactccagcacccgtcgtggccttctcgggctgcctaactgtgtgctgggccgcacgtgaggcccaggcacctgacgtctgaaaccccccaggtgagcagtaagggcagaccaggcatggagccgcttcctcctgcctgcctgaacttcctccactgtcattcatggttgctcccagcatgtcttcagccactgcttgttggaacccagctccatgtaaagttaactcatttgagggagtaaatcttttactgatatttgaagtatgcccctcacagttttaagaaaagctccactcagttttgtccaactgctccttagcattaccttattaacataatagaattattttttggcaaataattcattttaaaacagctagaaaattcaccaagagagggggaaagtatttctcctataaaagtctatagttattcaatcttaggaaatttgaccttctttccaaattttccattctgactcatgttcactgtagacagcagtcagaaggtaatgccttccactcaagtcactgaatttatttctctgcaagctctggtcatacctacgaagcccctctttgcctgattacgaagtcctgactgtggatgcatttatctgactcctgttttgcaaaccactgtcacttgattggccacctcttaaaaactcagcatctgcctagtttctgtgtctctctccatattttctgtttgcctgttcctctgcccccacttgcccttcttgcctacatccctaaacttcctcaggccactacctccatcatccaggctcttctctgaaaagggtcagagcacagggtctagatggggatcttattatatccactagcttggagtttgacgtagaaacagagtaattagaggattatcaattctctcctctcaagttgtaaaaagctggaagatgttttctgctctgctgtttaataaggacacaaccatactatgtgttctattttttttaagcacactttattttataacttgctattatggcttcatttctgtcttccattaaagagaattatagtctctagaataatactcatataattatgattataaacctaattatttatagtgataaatttttaagcacagctaatgatttaaaaaacagaattcaactgaaattcctaacaaagccatgcacagaaaaattaagacatttatgataacattcggtaaatttgcatccccctcaacccttttttgacataggtacaatgtcagtcaactagaagaatggctgcgtgacaagaatttgatgaacagtggggctaaggaaaccctggagcctctcattcaggctgctcagcttttgcaagtgaaaaagaaaacagatgatgacgcagaagccatttgttccatgtgcaatgctttaactactgcccaggtaaggcaactttccctaatataaaattcatcaaaggtaacatttagggaagtcacaaaggcttctagctattgctcttgtctctgagctaacttcatctgtgtcagagatgatatatatcaatactgtagatcttgaagacaggtgattttaccacaaggtatatttcagtattgtcacactcatgcacatacaacattcagtaaatatttatccattctctacactgttctgtgtaacgttccagccactcagataaaaccaggaacaaggcaagtttctgtttttatggggtatacattctatatatcctatggaccttgaactccaaagagtcttgtatattatttgataattgaatgattttttagacttatctatttaagacagataattcttttttaattgaaatgtagttgatgtataatattatgttagtctcaggtatactactcagcagtttgacatttgtatacattatgaaatgataaccatgaaaagtctagcaattatatgtccccatataagattattatattataaatcatatttcttatattgtagattgtatcctcatgctttatttactttataactagaggtttgtacctcttaatcccttcatctattttgaacaccccatgtccctcccctctggcaaccaactgtttgttctcagtatcacttaagttgtcccagatgtctcttaaaaccatccttatttcatttttttttctataaagtttcagtgatttgatttacactactgtcttccatctcacattccctccgttgtatcgtttagtctactgttgatgccttccagtctttttttatttcagttattgtattattcagctttttctggttctgtatattttctaactctttgtgaattcatccctatttcccctgagtacagtgagcatctttatgatcataagcttgtactctttatcaggtagattgctcatctccacttcatttagtacttctgaggttatgtctcatccctttggttgaaacatattcctgtcttctcattccccaccctccttttttcttctttttttctatgcattaagtgagctggttatatttcccaatcttaaagaagcggccttatgtaggaagcatcctgtggagctcagaagcatgctgccctctggtcgccagagttctgtgcccatgggtaccccctgtgtgggctgtataggcccttctgttgtgacagggccacagtcgttctactgtgggctccctagtgggcagggttggcccctggcctggtcggctgccccaccctgctccctttggtttctgctggtccctttggtgggaccagctcctagcacagctggctacagggctagggaaacccagggctggtgctaggcccttggtaggtggttaagccctgagcactaataagctagtgggaggactccagatgttgctgaggatcaatagttaaccattcagggaaagtcttgaatttgaggcagtgaaagatgggaagggcattggaggacagtggctacagcatgaggcaaggcacaggcataaacatgcccgcttttcttttgcctagttatttttgtgctgacttttggattttttaaaaatgttcatcacttatctcaaaacacagaaatcttacataggccttacacatagaatatatatagaaagtaattagctgaatactcaggacactgataactgttgctactttgagagaatgagagcatgagagtgggagtacttttacttttcatgatttttcaaatttatattgcttcttaaaatgtacagatattatataatacgttcttattgtaaaaatttaaataataaagataaatgtgccttcagaacagctccctctcccatcttgtcctaaccaagccctgagtagaattgaaagcagtaggcaaagatccttctctttttcctgattagaggtacctggaatgtatgtatttgataatatggtaaaaattttgatcattttatttctcccagattgtcaaagtgttgaatttgtatacaccggttaatgagtttgaagaaagagtttctgtgtcatttattcgtactatacaggtaagatctcctaggcttccttttgcttcagtttaccaacacagttatttggatggaaattttataatttattgaaggataatgcagtttttgttatattattgtatcattttcatagtgcattaattttttgataataacttactgaggaaatgaagtgattttaaaacaaatataaacatttgttattcactgagggtttttggtagaattttgtctaaaaaaataagtttatagattcaaagattgatgttctggtttttttttttccctcagatgcgtttacgagacaggaaagactctcctcaactactcatggatgcaaaacacatctttcctgtcacctttccttttaacccctcttcccttgcgctagaaaccatccagattccagccagcctgggcctgggattcatatcacgggtctgaaagtgatatcaaggcaaatattgacaatacatttcttgcctgaaataagaacccattatttcaagtgagctactaaaaacacattttaaacgatagtacttattatctcccaaataagggattattgactagaactgcccctagaatacttttcatcatcttggaaagaaaaataggttcctttgtgctgtgttaccttcataacaacacttgtccttggtcagttaggtgtctgccattgacgtgcaggtgaatgatggaagaaaagaaaaaaaaaatgtgtcttcagctgccagcatttattttaaatccttatcactgcatctaaatgatataaaaaacctgaattccagatatgaatatgagctgttgttaagaaggcaccatcaaggaacctcctgtgtgctaaccagaagaactgaaagaaaaatcaccactgagtacatatcataccagcttaggaatcaattatgttgataatgtcaaactggaacaaacaa

SEQ ID NO: 184 - DNA, 44633 bp, Hippotragus leucophaeus
  source 1..44633: mol_type = genomic DNA
gtttggaggtggaagtgaggggatgtctggggaaatcaaagcaggccccaggcacccctggagctttctaaacaatgctggctcaaaccacccttgtctgacatcatttcttttgggattcaaaaaaggaaatcaataaataaatggcatttgcacatcatgaatctttgtttatattttacaaatacctaggagtctttatcctaagtaggaaaatcatgactgagaactagtttattttcttggagcagataaaagtttctacctgatgccatacaaaacagtacatataaataaaaaggcagtgtttccatgtaaaataaaagtacataaataaatactaaaaaaaaaaattaaaaatccttgtcctcttattttgtataaaaacacatttgttgaaaaaaagctcctttggtcggccccggcattcatggagcgcacgcacacgccccagcagggcttgggaaaggaagcgcagggtcctgggggcagccagctgtttacttgaatgcctccgggacgtgggcgatctgggacggcacgctggtgggcgggctggagatgccctcggaccaatcggagatgttggaatgtggcgaggagctggaccactggtcgggggactcgggggacggggtgaggaaggggtgctcgggcacctgtagctggtggctgggggtgttgtccaccggggaggacgagtagctgtgctgggagggtggcgtcaggaactgggcggtggtcatgggcggggccagtgtgggcggggccagcgtggacggcagcgacgtgggcaggacctggccgtcctgcggcaagacggtgtgcgccgccaggttgccgggccccagcggctgcatgtccgcctggctcagctcccctcccaggaagctccggcccaggtggccgctggcggccgagctcacgccgaggtgcggctgcggcggctgcaggtttggctgcggcggcatgctcggcggctgcatctgtaagctctgctgtggctgcagctgctgcgtctgcaccaggtgaggctgggaggccagccgcgtgttgggcagggcctggtagctcatcacctgggacagggcgggggcgtgcagcgggcccaccgtaccatgctggaggccggcagcctgtgtgctcagggtgcctggcgtcacgccccctcgcagcgggttgtactggttgggcaccaggccgttctgcagccgggacagccactcacactggccattcaagcctgcggctccacccacggtgaaattcacagccccaccgcccccactgccacccgcgcccaggatagtgctggtgccggaggccacgggcaggtgggagaggcgtggtggccctgcctcaaaggccagccggctgcccccgctcagcgccgccatctcgggtttggctgccacgctcaggtggctgacgcccaggtgggcctcgggcatcccgggcaggtggttgaggggcacggagggagacggctggaaaggggaagacaggaggggcggggaggccacgtctgacaggtagccatggggggactcgagggagtccacgggtgacagcacactcccgctatccagcaggcagcccttgccatcttgggacttcttcctccgagccttgaggtccttgggctccttgccgccgcaggccaggcccttggtgctgggcttgcgggccttcttgccctgcatggggggcttgaggttgcccaggtagccgttgggcgagcagagcgggggcgacagggtgggcgcgccacccagggtggcgccatgcagcggggggctgcgcaccaggctgtactcgtccagcagccgcacgatgtcgtggtgcatgcgctcctgcgcgatgtcgcgaggcaggcggtccatgtggtctgtgatatcccggttggcgaaatggtccagcagcaccttggcggtctcgtagctgccctcccgggcggccaggaacaagggcgtctcctcctggggggagcagatgggggcaggtgcaggggtcaccagtcaccagatggaccagcggtcagccccgcctccaccctgctgcggaggggaggcacctcatctccaccctccccctagggtcctaccatcactattatgtcttacaaacaaaaacaccttaaacccaagacccacccagaggacctgtgggatcctatattctaaaccagtggggctctaccttcactgggtcagagaccccacgggaaatctaacagaatgtgcccccccttcccctcctccaaaaccacacagctgtggggtcactaaagtgtgtctgtgggcatccgttggtctccgaggaaccctgacatcttagctccgtccccagggcatagttttctcatctgtacagtggacatgccacgtatgccccccgaggctgctgtgtggggtgaggctggacggtgtctgcctggcacacacgtggccttggccgcagctaccaccccgccacggtggtccctgccgccagtcaccctgtctccccagaaggaggcgggatgatgcctctgccccatggcagactcagaagtgatcgggcccaacagcacccctgcgtccctcccccaggacaggagatccttcaggggtcagtgaaggaaggggtgggtctggggacacaggagcccaaagacaagtgcaggagactcagggccaggctggggttgggcaggaaggaaagagcatacttagactgcggggacagactgcggcgaggctgagagagaccagaggtggtccacgtgtagaaggtggacactcaccattccatctgggggcctggcaacgcagagccccccaccccgcccaccagcctcttggctcagcgtgcaccatctgggtcaacccgccccggccagtgacagacaaggacagaggtgaggtcgcaggtcacagtgacattggcgggggaggggacagctgcagctgcccgtgccctgggcccgggaggggaccggtaatgtggccagagggaggcagggagcgccgaccacacaggcgcccacgtctctgttttcccgcggcttctcctgggactttatgggttagggagctgaggcccagaagctgaagtcatggctcgggggtcccccggtcgggaaggagtggcagaggggaagcgcctcgccagccagcccaccttgttgttctgcatgtccttgttggccccgttcttcagcagcacgacagcggcctccacgttgttcaccgcggctgcccagtgcagggcggacttgcctgcgaggggagcagagggcgggtcaggggtgggcaggcgggtcaggggtgggcaggaagccgtggcgtgccccctccctcgagccggcccatccgggctcacccaggtcatccacggcgttgacgtcggcgtgggagttgatgaggtcctccagcatgccctccacggccaggcgcgcggccagaatcagcggggtcgtgccgtcatgcatgcgggcgtccaggtcggtggctcggttccggatcaggatctggaccacagggaaagtctcgggctcagcaagtgtgagcacgaggcccccacccgcgccgggacacgtgcttgggacccaacccctgactcggatgcagccctcctggggtcgggcggccccagggagcccggacacacgtggtgtgggagcccggggagtgggcagaactccaccaggctctgctggaggggtggggccggagcacgagagagaaggacggtcactgtttcgggggcaggaggggggatgaaaggagctggggaagagccgtgtgtggaccggcctctccccgagaagcacccaagggaatgtctatgtgccagagaccgcccgggcaaactcggccagggcctgcctagaggagcttgtttaaattgtccccaatctctcatttccataaaagacaacatgtcggaaatcattagacttttgtgacaccccccatttgtgccccatttacctgcccgcctgcagagcagcatggcctggggcctgggggtttgtggccgggagactggcaggcagctttcaaaagctgcttctgccagggatgctccccagagacccaggcacccacatccctaatccatcttcatcctggaaggccagcaaggccagagcccccccccgccccccccccccactgctcgcaggcagcaaacagcagcctctagcccttctccccactgccagaagcgatcgatgcctccagccaaagaggggagggtgtgggggccgggaggggcaggcacaggggatgggcctgttttgggtgagggtgaggaggccctgcccctgtaggtccctgtggcctctcccgctttagcgccaccagcctggctgcctgaggggacgacacaggggatttgacaccctccctggcctcacaccccctccagggtgcaaaggtttggggtgcagggggaaccccagctgcccctgctctggccaggcttggaatcagggctctggggccagatcaggaaggagggaaggcaggtgagggcgtgcagaagggcacgtgagtggctgcccacctggaagacgccctgcgcatcggcagacacagccgcgtgcagcggggtgcgccccatgttgtcctgtatgttggcgtccgcgctggcctccagcaggcgcttggccgcgtcggagcgcgagtagcgggcggccaagtgcagggcggtctcaccagtgcggtccgtctggttgtgcaggctggcgccctggtagatgaagtccgagatgaccgcgggcgcgtcctcttcctcctcgctgttgcctgtctctaggccccctccgctgcaggaggcgatcatgaggggcgtgaagccgtctgcaggggggcgggacgggggacggggccaggtgaggaaggctggcccctggcagctgctcccagggataacagacctcagcggggacatggcccacagaagcccagtgcacacagccacactgcccaacgccagtgtaatccgtccaagctccccgagggcagaaccaagtcagggctccgcttcctgacttgcctgagaccttcacccaccgccctgtccaggagacacaggaggtaagctaacaggcactctggatgtctcaaaagacgcattttgaaagaagaaaccaactcagagcgcagagcgcggtttgagacctgcactccgggaggggaggccacgaggaggctgaccagctcctgggggttctcaccgcctccaaggcccagggagttttcaggtaccgaccctgaggcttgggacgggggcgggcgggtcaccaggtcagggaagcgcgggctgcccagcgccaccaggtgcctgggggtggagccctgggtggggggctgcggtgtctggccagccgcacctacccggcccgcggacgttcacatccatgcagtcggcatctgcctcgccctggggaggcgtgggggccatggcagacacgcgcaggtcagcggcgtccaggtgctgctgggtccactgccggtggtctgtctggtcgtccaggtcagggaggaccacgggctcctcgaactaaggaagggcgtggagcagagggtcacaccctatggggcgagcggggcggggtggggcggggcggggatcctggagccccgactcacccggaacttcttggcctccaggccctcgtcgccccactcgttctggttgtcgtccatgagggcgccgtccgaagagttcttcaggggcctgggggtgatggggtcggggggaggtgggactaagcgcggggaccgggggtccacggagattcccctccccttccaggccccgtgcgtgcccagggccccaggaggggccgcggaggaggggagggggcagccccgcctcccgcaagcctggcccccacccagacgccccgccgcgtccactgacttgaggcccacggagtcctcgccgaggggctcgcgccgcttcttcttgctggcctccgacaccttgaagccctcggggaaccagagctggccatgctgccgccggcgcttccgcgacagcagcaccccgcagcccacgaagaacagcagcacgaaggccaccacggccacgtacatgaagtgcagcggcgggggcgggggcggctccactgtctcacctgcgggcacagcggatgcgggcgggcgcccggacatcaggccgcgcagccaggcaggccggcggccgggggcagcgcactggctccacggcccgtcgcgtcctcgcccgctcgcctccatcccgccccccaaaataaggtcattttctacgtgattaatcagaattgcaaactatcgctaaattctctcctgcaccagccggctatctggagacagcttttacttttttctcctttaagggagaaggattaggcaacttcaaatcgctgcactcgcatcgagctgttaagacaaaggatttagggggattttccagatacaaacttcaacacttcacatgacatcgatcaattctttgctttctctctctttaaaaaaaaaaaaaaaaaaaaaaccgtaatgattttgaaataatacccaacaaagaaaaatcgggaggaaggggtggggcgagaaaagtctccacccgcccccccccaccccgaatttgctggtggatgtgtggactcccctgggccagcctcacagacagctgttgctaggggagcgagagcatgccgggtgggaaaccccagaaaagcgctctccgaactctggatggcgtgacacacacccccgtgggtggcaactggtgcaaagaacaagagcatcctggggtggggggtgacctgggagacggcctcccatgcacaaccctcccaggatggtccagagctcccatgggagtgcggctgggggagcagggccggccactcactctgcacagcctcgatcttgtaggggatgttgaggctgcccagcgaggccagcgcacccaggaaggcggccacgtccgtggcgctctggaagcactgggaggacgactggacgcactgccggttgtcaatctccaggtagacgatggacctggggtggcaggggagagcctaggtcaggggggcttgggcgccggcccactcctggcgcccgcccggccagcctgccccccagggatgggctctggctcctgtggtgtcaccctgatggatgggcggggagagagggtgctcccagaaccccaggggggcagcctggggaggcggagagctgggtctggacaggaacaagcctggaggtgcacactggccctgagggcccgccgtgtccagcaccagcagggcacccacggtgctcacatggacactcctcagagtgctcccctgccagcagtggggttcctgcagagccccgggcagccttggtccccatctcgggaggatggaggtgtctggagcccggcccctcgcctccgtgagagccgagcccgggcgggaatgccatctctgccgctcgcccgtcacgggagctgaaatcccaggtctctttccccatctcaggaggacagcgctgccctctctgggaggggggcatccctgagggtcagggcgtggaggccgccaagaggggctcgctcacccgcggacgtccatggggtccagctccctgcgccggcgtctgcccgcgccgcctgggagcagcggggccccgccgcccgcggagcgcctgacggggtgcttgtgcagctcctcctcgcggccgtagtaaggaaagatcatctgctggccgctggcgtcgcgcctgaagaccacgttggtgtgcagcaggcggctgagctcgcgcaggaagtgcagggagcggtttcgcagctgctcgggcggcatgagtaccaccagcactagcgtgccaaccgccagccgctcgggcacgtgctccgcgcagtccagcccgtcccactcgcactccgcactgttgcagccctggtcgcagtgtccatccctgaagtggtccttgcagtactggtcgtacagggggctgggggcacatggcaacagctcagggctccctccgcgcccaggtcccccagggccacgcctgcccctgtccacccggaggccctcggccagcacccggctgtggcgctgccctgcctgcgaagcccagcgtcctcctcccgcctgctctgctcctgctggtgagcggacagccccctcgcctgcccccaccagccccgtgggacaccatggacgcttagcggcgtccccgcgggcctcacttgcactggccttctgcacgctggcagtcgaagccgtcgaagaggcagccggccgagtcgcactggctgtcgcagcggccgttgctgaagtacttccagcactgcagagactgtgtgcagttctgccaggggtcgtcgaagttgagggagcagtcgccgccgtcccagccgcacgcgtggttgttgcactgcaggctgcagaccttgttgccggcctcctcgcggcagccagggagctcgcaggtctcctcgatctgcggcggggggatgtcaaggcccacgccgcccccgaagctgtagtccaggatgtggcacaggagcccgttgaacttggcggggcagcggcagcggtagaaggggctctcagcggtgggttcacagatgccctggttgtagcaagggttggcacccacgcaggggctgctggctgggaactggcactcggggccggtgaagggacccaggcacaggcaggtggggctgcgcgggcccgcgatgcacgtgccaccgttcaggcaccgcaggctcccgcagctgcgggcgtcgttctcgcacgtggcgccctcgaagccctgtgggaggggccgcgtgggtgtgaggggtgagctgcccccccaagtgctggggacacgcctggccgctccattgcgccccccaccccccacaagggctggcggcctttccttttaaaagaaagtcaacacgaaacgctcgggggtcgggagggaaggagggaggggtgggcacagtaggagcctggggcacttttagggcaaactaacaacctcctgggatcctgcacaggggtctcatagcactgcgtgtgtgtcagaccgaaggaacacatgacatggagtggactggacttaacgtgtcagcgtatagatcacttgctgctgctgctgctgctatgtcgcttcagttgtgtctgactctgtgcgaccccatagacggcagcccaccaggctcccccccgtccctgggattctccaggcaagaacactggagtgggttgtcatttccttctccagtgcatgaaagtgaaaactgaaagtgaagttgctcagtcgtgtccaactcttcgcgaccccaaggactgtagcctaccaggctcctccgtcgatgggatttcccaggcaagagtactggagtggggtgccattgccttctccaggggatcttcctgacccagggatcgaaccctggcctcccgcactgcaggcagactctttactgtctgagccaccagggaagcccacaggagagcaagatgttaataacgggaaagctgggtatgcagggggtgaggctacacaggaaccctcctgcaccaattttctactaaaccgctctaaacataaagacacaagaaacgctgtctcgaggggaacgcggagggtggagtctggacacacgagccaccttttgccctctagcttacccgcaggctggaggggcggcgggatggggcggggaggttctggccacccccgggcactgggtgtgctgagcaggggtgtcctcctgcccccttcagaccagaagccctctccaccacctgctgcccatggcacctaccgctgggcatttgcagatgaacccgcgggccgtgttggaggccaccgcacagctacccccgttcttgcagggtctgtccttgcagccgttaatgaccgactcgcagcggcgccctggggacaagagtggcatgaggcactgaccccccgcctccagcaccgcccaccccccagaccagggcggcacccaccggtgtggccggcgcggcactcgcagtggaaggcgttgacgcgctgcacacagttctgggtgccacgggcgtcgcaggggttggacaggcactcgttgacatcaccctcgcagcgctcacccacaaagccgggcgggcaggtgcagctgtagccgcccacctggtccacgcaggtgccgttgttaaagcacttggggccccgggacacggggtcgatgggggggttgcagtcgtccacgttgatctcgcagtgcacgcctgcaggccaggcgccatcagatcccacgcggccgctctcaacccccacgcctcccacaggtgtgccccggccgggggtcagatgcccaggagctggacgctggcaaccagcccaccagactccctccccaggtgtggccaagcctaccctgtgtgccgcgggggcaggagcacttgtaggtgttggtgaggtcgatgcaggtgcctccgtgccggcagggctgggacaggcactcgttcacctcctcagagcagttcaccccgtggtagccgggcacacactgagggggacagcgaggcgtgggcctgaggctcagcaggcagccgggttgtggcccctacccctgtgcgggctgacggggccccgtgagctgcccccttgcctcgcaaagccctcctaccagaaggacccagatggagaccctggtaagggccctggtaagctgcggttcactgcccacggtgggagtcagtgtagaggcgggtggatctgggggaggggaaccccgccctactcctcggggtcttcctcttgcaggcacccccagaggacagctcctccaggcagtctttcctgaccacccagccctcccctgatgggactgaacgcagcacacgtctatgggtctagtcttccctgccgcactggctcccagcccagggcctggccctccgtggcactcaggccagacacacacacccccgccccagggacgggtgcccacctcacaggagtagccaccggggtagtcggtgcaggtggccccgttctggcaggggctgggcgagcactcgtccacctgctcctcgcagtagctgcccgtgtagccggcctggcagtggcagtggtgtgtgttgcccgcgttcatgcagaggcccccgttccggcacaggtgggtcacgttgatgcctgcaggggaggcagcgggtggaacgtgaggccccagctcccctccccaggggctgcctcgcgccgtgggcagcacacctcctgacctcagaggtcggacgcctggtgggcacggagaagcctgggctggttaccttgctgccgcgcggccacctcgcaggagacgctgggcacgtcacagtagaggccggtccagccgctgtggcactcacagcggtacagcgcgttggtctgccagcaccggccgccattcttgcagggagatgagtcgcaccagcgcacgagggtctggggacgagggggcagcctcgctcgcgccccacccgccagcccccacgggcccagcccacccagcggcagacacacatgggcgccagagaccctcacgcccaaggtggcccgtgacctccccccagtccacagaagtggacaccgaggcccacggggtctcccctgctcaggagcaactgcagctgcgggggcccctctcttgctctgggcccttggtggtgaatccagacaacaggctgcctttccttgaaggaagatttttcttaagaaggaaacagctctcttctaattggtgttttgcgtgtgaacatctttaaagaagataaacctctgatacttgtacacagtctccatgaaaacactggcgtttagctgccttcccccgccaacagctggtcctttttgctccctaagcctctgctacctgagctggaaactaccctgctcaccacctctgcctctttatctgccccctgctcggctctccagggtaggagggccagctggaatccgagcgaggggccccgccgcgtggccaaggtgcctggcgtgcgcgccggggccggccctcacctggcagttgaggcccgtgtagccctgtgggcagcggcacttgtaggcgccgtagctgtcctggcaggtgccgccgtgcaggcagggccgagagtcacactcgttgacgtcgtgctggcagtagctgccggtgaagccgggtggacacaggcaggtgaaggagttgatgccgtccacgcaggtgccaccgttgaagcaggagctggaggtgggcaggcagcaagggggtggtgagttggaggcaggaccctgcccaagcaggtacgtccatgccagcaccctcaccgccaatcagggtggccacaggggtctgggtgccaggacaggccggcaacagcctggctgacctcagggaggccagaggagtcccaggggaccccagactctcacaccacaccacaccactccttcctctgccttctttagaactcgtgctaagaggagcttcatatcgcacacaggtgtgtcacgatcaagacaaaaatgagcagaaaccagactgcgtgggagataaatgctagaaactggggataagtgtgacggtccatgccgagcttcctagcagccaaggcaaatgaggacacacgccagttacgaggtccccggctgatggaaggaggaacagcagttcctgaggataaaccacagggctcctgcttctaagccacaagggagaatggacaacggccctttcaggaggagcagtgtctcgcactggcaacaagtgcccacccccaggtggacacccgctgggtacacaggtctgctggcgctgtgcatggccccgtagccggctgcatgcacccgtggcccctcgcacctctccgtgcagtcaggcgtgttattctcgcagtggatgccactgaagcccgtggggcaggtgcaggtgtacccgtccacgcagtcagtgcagttggcgctgttgcggcaggggttgctggcacactcgttgatgtcctcctcgcagaaggcgccctggaagccaggcaggcagtcgcagaaggccgtgttgacgccgtctgtgcaggagcccccgttgtggcatgggtctgcgaggggaccggagggcaggcctgagagctgggcacctctgccagggcgaccaaagctctgggctcctagcactgcccccagggttttctgccgggagcccagtccagcaggctgcattgtgagcttcgggtgtacgctaccccacgagctcccggtccccaggccataagggtgggcaggcttaacagtgagacccacacaggccgtggccacaggcttccgtgcctgctggtaatgccagataaggtacttggcctctcttggaccccaggtcgcgtgagccccattcctcaggggtcaggacaagaactaggttaagagccacgctggacggggcagctgcggccccggggagaggagcccgggagtccggctgggagatgctaggatggacgagttgggggcccatcagcctggcaccacagccccgggaaccgcccgcgaccacctcgctggtcgacagcagccacccagccccgccccagcacttcctccggcccccaaccaggtgcccttccgaaaggtccagctggattgagagggctgccggcgccaagcctgcacccgggtactgccctgcccagcctctcacgtaaccctggcacactccctgccctgcgcccgcctggggacacgggtctggacgtctcagaggcgggcggggccggccagccactcactgggccggcagtcgtcgatgtccgtctcacagttgcgccccgtgtagcccgcctggcagtggcagcggtagccgccattggtgttctggcaggaggcgcccgcgcggcacgggctcttcacgcactcgttgatgtcgatctcgcaggtctgccctggggaaggggacgggggagccactggctcagccagtacccacggggcactgcccgcacccccggagcaggccctctactgccgcaggacaaccctctgggggcgtccagggaaggggggctctccaaagggctgccccctgacttggggccaagcaggagacagaccttcaagcctgggaggaccccgcagcccactggttcatcccccaaggacaggggctcactagcaagagtcgcctgaagctcccgaccctccccacccccgtctccccggcccctgggctcaccctgccagcccgtggcccccaagcctctccgagcttccccaccccatccccctgggctcaccctgccagtctgtggccctcgagcctctccgagcctccccccacccagtaccagcgtcccctggactccccctgccagcccgtggcccccgagcctctccaagcctccctatgtccccccaccccctggactcaccctgccagcccgtggggcaggcgcaggagaagctctcatagtcctctgactcccgacactcaccgccgtttctgcagggcccgggggcacacggggccagcaccacctcacacgtggcccctgggagggaggggcagggtgatgagccctccgggagccccggccagaggtcaatgccccgggcaagtcctgacagaggccccggcagccactgtcaacgggtggttctaccgtcaaaacacgtctggttgccctgcgtgggggggtgagggggacatacagcggggcactgggaccctggctgtgtgagcgcctgaacgtgaaccaggggaacccttgggcccccacaggctgggggaacggcctgggccccaccccccgatagtgccaggagcaagggctgggctgggcctgacaatccccccacccacgtcgcaggggccctggaccggctcccagcctcgtgccctgctgatggcagagggccccgcactgagccggcggcctgggagctgagtccaggggttcggtgcctcgggcggctagtgcccatctcaggaggcccctgaaccaaggctgtgactgcagggaacgtgccagcctcagccctcaggatggctgcttatcaggggagcactggacacggcgtcaggaccccgggtgggagcgggagtctgcctggaccccggcactccgggtgacctttcctccctgagagcccaacacggggtttcctgtttacggcccacggggccatgtcccgagcccgcgaggaagcgttatcttcccggccgcctattatctccccggcccgcaggggtgaccgtcccgggcctttcattctatcggtttccacagtgaccccagccggcaggaaattcgccagggtttccgacaattgtgcagagggaagcaggaagcgggcggacgggaagcgggtcagcacaggccggcccctccccgccggccgccagccccgatggcagcgtgtccgaaagggactcgggtgcgccctgggcggccaccggggagggggcgtttcctcaccggcggaggagagaaagtccaggtccccagcttcagtcaaagaaaacactgctcgggccacaggccgccagtgtcgtgagaaccgcagtcacgggccccacccctgcctatgggggcctctcaggaccgtccccaacggcagcactccctgccccatccccggggggcctggtggcctgagcactcgtgacttccattttttaacacttgccaaatctctctttaggaggggacccacatcccgcctcccccagccgggccaatggcggcagctgagatgccagggacccgtctcccgccactctcagcaggaacacagggctccttgtttccccacacaaagagggcccgccatcaaaggactccctcaggcctcgccagcgatggggagggcagcctggcccccctacccccagggcagcctgaacgacaggcggggaggctgacagcccagacccagctccaccgccaagggggccaccctcccaggcaggtcccccaagtagggacttgcttgtgctcaaattttctcccaggcacctggttattttatgagcaaagacacctgcagggcaaggccctaacgcagccaggcctaaggctcggagtacagagcagggcctctgggatgcctgcagagggatgcagacaaggccagcccaggaaggccgcctcgcacctcagccacctgagccacctgccgaggccccgcccctgccctccaggccccgcccctgccctccagaccagcccacaccacaggccccgcccctgccctccaggccccaagcgcacagccccaggccccgcccatacctgtgtagggcaagaggcagttgcatttgtaccctgccacgtcatcgatacatgtgccctggttcagacacgggttggacgcgcactcgttgatgttggtctggcagttgggccctggagagagagaaaatgcagtcggtgtagcgtcaccccaggtgctatggccaagttctgcctggcatggagaaaaagccctgcactgagcctggggcctgggaacccacaccagccggtccaggagccaccggggttctcgacggctggcgtgtgtctgggctccacgcggcccccagggcctgcgctgggaccagcagcccccatcccactcaccactgaagccctcccggcaggcgcacacgtagccgctggtcatgtccttgcaggtgcctccgttgacacaggggttcgactcacactcatcgttgttgacgtcacagttggccccactccacccagggtcacagtcacacttgtacctgcagaggcgaccacacggtggctcaggtgtagccagagagggcggggcctaggctgggagcaacccagactctgccaccgtcttacaacctgattagatggagacactggtcccctctgacccttggagtcctttaaacgactttaaatagcctgcctcgactaagacagtggtaagggtttgggacagtgcccagttcagagcagtggtcaggagaccatccactgttcacttgctgtgtgaccctgaacaggcagcttaccctctctgtgcaaaacgagggcgtgtggtccctgccatgtccatcaccccatttagacagagccaatgccaggcacgtagtgggtgtcggaaactaaatgtcagcttctctacactctaatattctggcaccacatatatgggcagggttcccacaccagctgggtgtcccgcaacccagtcctggccctaagtgcctggagtcagcaaagactgtccccccaccccccagagagggatgggacccaccagactggccccaggtcagacactaaccccaagccccaagttgtcacctctacttctgaccaaacagccaggaaccagacctcttcctttgaaatttgcagaaagggctcacgaaactcagaaaaactgtttgacttactagatcaatggtttactatgagcaggaaaacttggaacggcccagtggaagagacgtacggggccagggatggggaaggctcagagctggtccctgccccatcccagcacctgtctgccaacccggaagctctctgaactcccgcatttggcctttttatggaggcttcctcacacaggagtgactgaataagtcactggccgttagtgattaacttgtactgcagcccctctcccgtcctcacggtcagggtgggacggaaggccccggcccccagcctcagcctcggatgaccttagcagcctccttacggaagctcagtggtggtttagttgctaagtcgtgtccagctcttgcaaccccatggactagcccgccaggctcctctgtccatgggatttcccaggcaagaatcctgcagtggattgccatttcgttctccaggggatcttcctgacccaggaatcgaacctgggtctcctgcattgcaggctgattctttaccactgagctgtggcccaaaggggctcagacacgacccaagacaccccttccactctcagagatctcagagatttcacctctggtctgccgcctcggcacagatgtgttccccgggcacccgcggagccgagggcagtgctgggctcagaccaggagccgagtgagcgcccgtgcatggcacccttcagggctcccacagcagacccgtccttggggagcacctggccgctccgcccaagacctgctggctccccactcctacactccccgcccccagggcggggctccaaggacgcacccattgaggctgtcgcggcaggccccgtggatgcaggggttgctgctgcactcgttgacctcagacaggcaggtggggtcgtggtagccctccgggcagcggcaggtgaagccgttgatgccatcctcacaggtgcccccgttgtggcaggggctgtccgcgcactcgtcaatgttgatgttgcacatgctccctgcggggggcccggcagctcagacaccaggaatgggagaggggccgggctccctgccctcggagcctcagtctccctctccgcgagcaaccccgccccccactccatcccaggccctcccaaggttcagactctcaccgagggcccacgctggacgcgctcggggcagagggcagcatgtgcaccggtagcctggccccactgcgggcctgccgggctgcttctcacccggcatgccaggctcaaggatgtccaccccagcgtcagccagacccaccccccacccccgttccttccagagcccctgccgccagctgccaaggctgctggcctgagagctgggcccccacagtcccgagaccctgacctgcgagcgcagcttcagcccctgaatcaaagccctgacgcgggcggcagggcagagccctccgcaggcccccgaatcctgggcggctcacctgtgtagcccggctcacacgcacactcgtagccgtcaatcttgtccagacaggtgccggagtcgcaggggttgctcgcgcagtcgtccaggttgatctcgcagttgggtcctgggggtgggagaccagaggaggtcatgcgctcctgctcgctcatcctcagcttcacctatccgcccccaaccctgcaccagcccggggccgggcacctgtggtccccttgaggcagaagcagaggtaggagttgtcacggtcctggcaggagcccccgtggcggcagggctggctgtggcactcgttgatgttggtctcgcagtggtggcccgtgtagcccggctggcacaggcagctgaaggtggccacgccgtccttgcaggacccgtagtggcaggggtcggggtcacactcgtcgatgtccacctcgcagtggggccccgtgtagcctgcaggggcggggggccactctctgggttaccaggctgtccaggacaccatcaagcagacccagggtcctcttgttcccaccagggaagcctggggatgtctggggcacgccccccacctgcctggggtcagagacgcaccctgctcttgttcccctccaggctgaggggccacccctcagcttcagcctctgaccagccccttccccggaccccaccgcctgcttctgccccccccacttggcctggggtcacagccccgcaccttctgtgcacacgcaggtgtaggtgttgggcccgtccaggcacttagcgccgttcttgcagggtgtgctcgcacactcgtccacatcatactggcacaagtgcccggtgaagcctgtggccagggaggggatggcggtcagatgccaggggcacaacagcaccacagccaagccctggctggccaaggtcggggggcagagggcgcccaggaggggcccccgagagtgctttggccagggctgggcaaatggcaaatgcccgtatcctttccttgccctctttcagagcacatccctggggtcctggccttcctgccctgcccccttcagaggaggctcagcccaagatggatggttgccatggctacagccgggctgggctgagaattcagttcctggctaggcgtctgggacagttgatttgcatctcaggaggtccagggctctgaccccccaacacctccccgggcctggcgtcccccagcccttccctgcgacagactctgggccctcacaggctccatagaccctcctagccatcaattccactgccgctggcagaagcaagtgggtgcggcaggccagccctcctcctgccggggcacgaaggcaggaaggagggtctctgggccccgggcttctcagcgaggtgggggccaggaaccctgcccggcccagctttgtcccctgggggctgaaaaccaacccacccccgcctccccacactccggaggtgaggctcttaggcacccttcccaccgtgggggacctgaccggctctgacgcaggggcagggttgggggacctgaccggccctgacgcagcagcagggtgggtggcggggccgtctcacccgtggggcactggcacacgaactcgttgaccttgtccaggcagcggccgttctgcaggcaggggctgctggcgcactcgtccgtgttcacctcgcagtgcagaccctcgtagcctggtgaagcgggctggtcagcaacgcccggcccctaccacacctgctccccggggccgacccagccgcccagcgctcgcctgctctctactgcgcccagagaccaagctcgagcctccccagataactgtggggaggctgcggcttgggcggacatggaggccgggggcagaggcgatgcggcttccgcacccccagggtcgggcggccggccggccgcgtaccaggcatgcagatacactggaactccccgatctggtccagacaggtggcgtcgttctgacacgggttcgatacgcactcgttgacgtcgatctcgcagcgcgggccggtgtagccctgcagacactggcactcgaacgagcccagcgtgttgatgcacttgcccgcgtgctcacaggggttggcacctggtgggggcgggaggggggtggtggatgcggcacgggtaaggggctgctctgggaatcctagcctctggaacagtcgggggtgtgcctgcctcccccatcagacccgcctcctcccatcggactacttccaacaggttccccagccccccggctgcccgtacccagcgagcactcgtccacatcctggctgcaggccggccccgtgtaccccgaggggcaagtgcagatggccttgccattgacggggttggtgtcgcagttggagccctcattgcaggggttgctgatgcaggcgtcattcagatggcacagcagacctgggcacggcggtgggggtcagcggaggcactgtccccccacctcctccggctgggaacactgcccacacccggctccccagggaggtgccccgccaggacacagccagtgaccctgtggagggccctacaatgccggagctattccgggaggctcatggccagccgcttcacaccaggaggcccctcttggggttccccccttacaggccccacaaagctgcagtgtgagcttctgtgtgaggcccctcgcccaggcctgaccccccagggccctccgcctggggacaggctgggtgctcacccgtgcggccatggggacactcgcagtagaaggaggccacgcggtcgtggcaggtggcgccccggaagcaggaggcgctggcgcagtcgtcaatgttctcgctacagtctgcacccgtccagccgttgacacacacacagttgtagtcgccgtgggtgttgtggcaggtcccgccgttctggcaggcattgggcatgagctggcactcatccacatcctctgtgcagtactgacctgcggggcccgggacggttggtgcctctagcccccgccaccaagccgagaccctcacctcgaccaggaagtcttcctgccttcctccagccccgccagccagagccagcctttcccctgcacccctggcacctgggggctcttgcctggctggtccgtgggcacaggtgcactggggtccaccctcacctgtgggcagggcctgtatcctgctggccagcatccctgtgtcctggccagcaagctgggctcaaaccggggacctgactgtggccaggccagcctggggccaggctgcaaatggctcacacagacgggctggtgccacccatgtctgtgctgctccagggggttggggggagcctcagaccctggtgggggggggcagtcagctgcaggtcacagcatccttctcatctcagatctcagctcccttctgcctgccccccatggggacagactccaggggcagaggtgcccccctccgagccgcccgctgtgtgcacctgtccactccggggggcagcggcagttgtaggtgttcacgccgtccacgcaggcgcctccgttcttgcagctgttccctggacagtcgtcaatgttttcctcgcagttctggccagtgaagcctgcagcaggggccagtcgcccggtcaggcctccccacggggccaggccctcaccgtcctgtcacgcttgcactgggttctggcaccctcctggctggacccaggacaccctgctctgggcgccgccttggagccctcggggtccctgccctataccctgccctcctcactcctgtgaccgggccgcacaccccagagccgatggtcagcacattcctaagcaatcgttttctaaagggccggctggacagacggggacccacggtcacaggctccccggggttctgtcagagaagacatctgcgctatggcctctgtgactgggcactgcctgccggcccagccctgtgttcggggttgtctgcacacccccacgtgtggctgcggataccccatttgacggggcagcactgggcctgggagcccccacgcacgaactagagcagggagacagagggaccctggcaggcagtcgggggtgggggtgtgtgtgcaggtgcggcccccagacttcccagcagcagaggcacaggcagggtggcagccccccaccctctccctgccctctcccagccaggccaacttctgcggcaccccctccacgtccagtcagttagctattaatccgttcgactcccgctggttcaataatcaacccagaaaggtgcgtctggcaatagccaaacctgcagccggttactaattaatgcccctcccggggcgcctttggaccctctcctgcccctccctcggagggcctccccactggagcctggcgcccacactccagtccctcctgcatgcggcaagcctaaagcgccgcctctccccagcctcagctcacctccggccggtggggccacacctgctccacgtgtgcagccccctctgccaggcccccacgcctcccactggccccccccagcccgcaccacagcccctcctgaccctggggtcccacagcccaccttccccaggaagacatctgaacccagaccccgaaacagccacgcagcccagctgggcagtgggtagtgccggggcgggcaggtggcgaggggagaatcagggaccggaaatgcacacgcctggcgtctgcacgcagaggcaacaggcccgggacttgcgggcgggaaaagcacttcctctttgcaagggccgggctgggcagagggccgtgtgggggccagagcgacctttgggtcagtcctgggtcagctggaccctgggccctcccctctccagcaacccaaaccccaccgaccccacctcctcatcgccccgccccaaaactccctccccttcccagtccctgcctaaccgccccgtgaaagtgacagactggaggctttcgaacctcttcatcattatcagtatttttagatcatcagcagcaaaacggactcagaagaaaactaaagtggaaagtctgggacatgaaacaggaacagtggagctgctagggggatggggagggctgggcccacctgtcactcctgccccggcagtgggcggcaggagaggccaggaggaagcgcccccacggggggaggcacgcgtgagccccggcccccccccggccccaccgccaggaagcgggaagccccgcgggcaacacgggtgagggtgctccccgcagcgggggagagttctgcagtgtgcacgtggtcccagggagctcgggataaggggcctcctggggggcctgaaggaggccggtgtccacggcccaggagactcggagcagggggccaggagagcagagtcaccccagagtggacggaatgctcaggccctccctggaggcggcagggtccctggcacaggggaggagcactagggtgtcacagcaggcctgtcccggggcggcacttggtgggtgggtgcccctatcccagagcatgccccacaccacccctaaggctgccctccaaccgcccgggctcgggtgacgcccccagacccagcctgcccagctccccgccccctgcacgcttctggcgggcagtacctggcaggcaggcgcactcgtgggtggtgtcccctgtggggcggcaggtgcccccgttctggcagggggaggggctgcagggcacgtagggcagctcgcagtgggggccggtgtgggtggggcggcagacgcagcggtaggagccgacctcattgaggcaggtgccgccgtggtggcagagcccggggctctggctgcactcgttgacatcctgcctgcatgtggggccgtggaagccgggcgggcaatggcagatatacgacgcctcgaagggcaggcactggccaccgttggcacaggggttggaggcgcaggggtcggcttgctggcacgtcttccctggggggcagggggccggggtggggtggttagccggcctccctggttcctatgagctgggggcagcgtccagacctggacaaggggtgagccgggcatgggcccagtggcatcagctcctcaccacccagggaccccaaccacttaggggctgagtgaccaccgtgggatgcacagtaggccagggcccctggggagctgacccagactgcgtccctcctgagccggcggtgacaccacggctcctgcaggggccgggggagtctccccttttctcacagagctgcggcaggggggtgccctcgagccaggaactgacgcctccagggctgaaaagcggcatggggacccccgagaggggactctaggcaatttctggatcgctgacccccacagccgagcccagtccaggaccatccacggccacgtggacgggggccgtcattggcggtgtgggcggctggaggaaggccactccatccccgcaaccccggggtcctcacctgaccagcccggggggcagaggcacttgtactcggtgagcgtgagcaggtcacaggtgccgccgttgaggcaggggctggcgaggcaggcgtggtcgcggggcgtcaggcacagcggccccgagaagcccaggcggcagctgcagacatagtccaccaggccttctcgctccgtcgtgtggcacgtcccgccgttcttgcagggggcactgaggcaggggttgggggcctggcattgctggcccgcgaaggccccactgcatctgtggcagacacaacagggaggtgagcgcccactccccagctagcccgccaccagccccggcatccatgggggtcccctcccgggcagcggcccccctcaaagggcccagggaggttctgggaccacagtgggggtcattgcccaatatcaccagggtgccaagcgccaatgagctctccgctttaaagtggttcctattacatcaagggaatttcatgtccataaaaacagtgattacgttaattggagacattagaaaccagagtgtttggcgggccccagcgacggtttcagaatccatggaggcgtctgtctgcaccagtgagccacggagaaggggccacgcgggccagacccagccattctccgtggaagggaatggtgttctgtgaaacattttgtttcagggacctgcctactctctctctctccagcttttctgtaacgaatgtgcgttatttgggtaataaaagagttcgcagattgctcttctttcagtacgaacacgagagcaaacagggcaagaactgcagacaccacgtggccgggctcccacatagtcgccgacgtggaattctctcttgggggtctgacgcgacaggaccgcgctgctcagtgctccaccctcacccacgcatggtgcccagacacagtctctccctttcgggggcgaaggcttcacatcggaagcccagcctgctgcacagctggagaaagcagcggccaggaagaccgccgctgcggcaggccctgtgccggctcccaggctaagacggcagcaggtaagccgggagtggggggcaccttgcccccacccctggccacaggcctggtcccaggcgctccccaccgggaagggctcggcacctgccacccccaccccggggccgcccttggccacctgttgcctcggcttctcgaggcagggcggtacactgccccccagggtcacctcgtggccttgcactggagggaaagcccaggagaggctctgggaccagccaggcctccctcttcccagcggcagagcctctggggtggaacgcacctgcggcccccagcctgcagcggcctgggaaggcagccctgacgctgggcccatagccccaggcaccggtgggcggggcccccacccccacccccaccgggcagccacggggaccctgggggaagagagggccctcctgggctccgaccatcctaccttcccgagacccgccgccccgagaagggctgctccgtggggttcaggccttcactccaggacccctacccccaacaaatgccagcccgccagggccccctccctcccctcctgcacaaagctgcacagggaggggggcgggggatccgtgagaagccggggctttcctctgaggctatggcttgggcagggcgggcaaggagaacgcaaaatggccactccggaccaccatctgtcgcctgaagccaaaagtcccaaaccaactggcttaaagaaaaccagctgcccttctgggaggggtgcaggggaggtaactcaggcctgagccggggctccagcccagctggctcagggagggggaggaggacgggtgtggctggctcctcttcgggggcacacaccccaggatgcaccccctgtgcgaccggcaccctggcaccccgggctccggcagggccataccctggagcctggggaaggtggcgtggcccccactgagcatggatccagttacaggccgcctggtcccagcctgagtggcactgggaacccagagccctggaggggagtggggagacccaggaggtagcccctcccccacctctcaatgccctccattgtcaggcaggagctggccaccgctcccggtggagaaaaggctctttttttttctttttccccagctactgaagagcaggcagaaagtgggagctggacagaggacgcttggtcatcaaagcggggtggggggtgggagcccgcctgccctgtccacacccagctccaaagcgtgggaagcccacccaggtgggtgagatgaggcaggcctgccccatggcctgggggaaacacacacaaggctgcccagagcgtcctccgtgtgggctccaccttcatcactggtccggttcagcagcgttcccaagtggaccagaaaggccccaccagggtgcacaaccctccagcctccagctacagggcagtgtgtccctgaaccccaccccaagcccgtcctgaatggggagcctaacacagaagactgtgggagaatccacctggattgagagcatcctggccaaggaggctgcatgaattacagcaagaggaaaagcgcgcccagtagatcaggctgcagcagcagggacaaagggcggctggggagcaggtgcgcctgtggccggggacgcgggcggcagctgctcccggccagcgcagcggcggctgccagccccggcgggcggggggcggggcaggagccagggaggctcctccgtggggagaaggcagcggctgagggggcccattgtcctccctgctcccgcccaggcctggtggacgctgctgtgaaggcacgttgcccgtgcgggccggctccagggctgggcctggccgccgtccaccacgaacaccccagcagggggaggggcagggtagcgagggagcggcagcctggggggggcgggggttgctgctgaggcaggtgctggggggggggtgctaggtacaagcagggcctggcttaactccatgggaggacgcctggggccaggtaggtcttgaggagggagggggtgggtaggcagggtggaggggccttacaggccatcacagaggcctgtccctgctctgggcggcctccggccatgccccccctcacctagacgtgtctccacctgccccccaccctggctgcagtgctggggtttcctggggaggcacccgtggcactcacacttccctgagaaggtggaggagggccggtgaggctgctcagacgcggccagtctgctgggaccagcgaccaagtccctcgtggccattccgtcctgaacacctgtcctggcagctcgacctaagtgcctggcggggacaggggcccatgcttggagggcaaagtcgcgcccaacacctgcctcaggattccgggccagggaccgtcggggaccctgaggctggacgagaaccgccccatgcaccgtgccactcagctcctggctcccgggggcccgtggcagcctccccttccttgcgcccctctggaaggcggcctcccagtgtctcctcctctgctcacctcccctccggcccacacagagcctgacggggtgtcctggcccaccacggcgagcagcagcagagggtcaggtgtggctgggggctccaggatcagagctgaagagaggcggcacacggagtggggggcggcagcgcggaacagctgctgggacgcccgcccgtcaccggcctggagctcattggaggcttcttcagtgtttcctcctagccggctcctccccccacgcccccaccccccagcgccgctccatagaaatgcagccccagaagcgtccagaggcagatgctgccttgacctttcaccccttcacccgggactaatgctaaatggtgctgttttcctttctgagttaagcgggccatctgccacccccaggggagagatgacagctccctctacacgcagttcgcagttcgaaggcgggactcagcacagaggaaggactcactcggtctgcccttgagcagtctgtggttgagcaggggggttgagtggggcagagctgggtgagcacagggccctggccgggtgggggtgcggactgggggtcgttggggggtgtgccacccccttccttctgcaggccagacagagtcgccccaagggagcgggggacaccaccgatggatgggcgagacggtccatcagagcttttggggggctctgcggcacagatgggcactgcctgccaggcctccgtttcatgcgagtcaggggatcaagggcacagaaagcccggtgcagaggcggcctgggcatctggagcacagtggactctcactctagccaatactgctggatttgatttgcacacagttcaccgacgtgtccctggggacacggtggctccaccagggtccgtgtacctgcttaaggaaagccgtgggggacacaggctccccagcaccgagggccccactcgaccctgctgcctggggcctgggatgtcagcacaagagccggtaatccatggctgggggccacatctgcaggcccggggcctgtgccccaaaggtgggcagggactgtgccacccaatgcagacggacagctctgcaggtccctgcccccagccatgcatcccatgtccctggggggctgagtcagggcctggggtcctacccactgcagctgaaggcccctcccaccccccacgcccggccccagctctgcctgcagtggggtgcctgctagaagaccctcctcacaccagcactgcctcgctcacaggctttctgcccaggaccctccaacacaatgttactggggcccggaagagagggtccagggagcaccgatggctcgtcagggtccccccctcctccccagaggtggtccaggatgctaaacaaagaccattaaggcccactaccaggcaggcaggcccgcccacctcggggcagcttgaccgggaggttctcagacccccagcccagcccaggcaactggggccacttgcagaccagaccaggcagaggaggctcctgcccgcttatggaacaggaagactgaggccaggagagagggggctgcattggacagactctgagcccccagctcttccctcagaggggccagggtcaaggagtctacttgtgctcctggataaggcttgccaggggtcctgggcccctctgggcagaggctggttcaagggccctgaatcccagtgggaaatcacagtttccaggatgctgtgttcgtggcaggttggggggtcgcgcagtgactgggggtggtgctcagtggcctctgctggtctcccccactgtgcccacccaccatgcccatcctggggtccttccctactgggcaccaccaggacagctcagctgtgaggaacggagcccctgggagacacaaaagccaggggtgcccgggaactccaacgggcagcgggcggggctccaggtttctctcaaaccctcagcatccttggtccagaccactgtctgagccacgaactctgctgtgcccgagggtacctggacgacagccctctgccctctcctgtctcggtccctttctgcttcaggcagggtgtgcccagggcagcccggagcctggccagccctgcacgggtttggaggccacagtgtgagacctcactccaccacctgcagccccaactgccccaggaagcgactgcagggacccggctggtgcctggctgagctgcagtctgcttccagcccgcatggcctctgggctggggcggctcagagctgcacggggagggcgctgccctggctcccaagcttcagagaggaggtgagcggcagccagggctgctgagggatgggggaccccggaaaaggaccagccaggtctgaggcagacagaccccaatccccaacagcagctgaccctcagtggagaacaggcagcagccgcagaggaggaagggggtccaggcggggtggggcgtggagccggcgggcccagcagctcccggctcagggctctttgcctcttttctcccaagttgcacctctggatggtttagaataggctggaaagaggaagtgcaggagcgcggggaagccctttgtgttgtgtgtggacggaagcggtcctccgggaagccacctttcccactgcggggaaaacaatgcttgcggctcgccacccccccgccccgcggcaatcagagctgccccaccctcgacgtgggaagtggctgcccgtctgaagggatggaaaggcagaggtcaagcggcttcctggaggtggcccagctgcagtgggcagagaacaacccaggcccacccacgggcgggcacaccgctgcttggctggcccctctggacattgcaaaaggcacagccaacacgctgtcccgagagccctgggggctgctgggcgagtaagaaaagcctgctgcctcccccctacccccgcggccctgctctgctgggttaattccccaaccatcacccccaaagatggagccaggagctggacaaaggtgggaatggatgtccttacccagggctcaccccaacggctctctgagacccacgtggtcgagcctgcagccccacttctgggaggccagggagtggcccctcccagctgccagggagctcggttccccacaagacggagctggacccgtgcccccagacactggatacaatgaagggatcgatgagcatgcagccggcgccatggggggggcggtgcgcttaatccaaactcgattaattaagtcagcaaccacagactgagatgggagcaaagccagaaacgaccctgcaagtgcccgcctctgctcggctgtgcggtggtgcggggagaggggaggcctgcccagcggctctcccgtcctctcccgctgacaggagtggacgctcggggcagccccgcttcttcccattctccagttgtgaatgcagcgcgggagaacactgaggacccccctcgacacgggtcccagaaggaagacactgtggacccccctccctgctccaggacctgtactcaggctttatcttgtctctttctcaaaatggccctgcagggacactggcccattgtacaggtgagaaaaccagggctctggcaggttatgcccacggcaccacctgggtttgaatgcagctgttaacctttgctgtccccagtggtggccagatgccaggccctcagtgtgggggtcgggggcagcagagcacagtgccccctggaggcagctgggaggccagcaggagctccctgggtggaggagggggtgtgggccctcagcacccccattccttctccccctccccctcccccaccccggcggcctgggtttctcgcctgaccgcctgatctcccagaccgggagggccagagcagacaatgtgttcttacaaccccacaagatctgctgaaactcaaaaccctggattggaggtggaggggagggtgtctgggtgagaagcctgggaattggggagctcccagccggcgcggtggggctgccctgggccccggcttccccgcactccttccttgtggcaggaggggtcccaccaacgctggacacctgtcaccaccctcagccacaagagctcatgtggccttccttcctgtctgttcggccctagggacagacaggaagcatggagcctacagccgccggccgctgggagggccagcagagggtgggccctgatgaggctcccatgagaccctctccctggatgcctctcccagctcaggctcaccatctgcccagtccccaacccctgcccgaggcagaccaccaggccctgtgtccccaggcttgcccacaagcccgcggccgccctggcccccaccccaggctcagcacagtcaccgaggcacgggaccacggcagacaccaggagacacaaccctggcagctgcacccaggccggcgtggacctgctgagagacagacccgcactgtcacagcctggggacacccgggcagcccgggcccgctggtgtgggcctagggctgtctgggctcaggcgagactcttctccacggggaaagcagaaggttcttgggctggccacgaccttgcgcccttccgtgaaagtgaaagtgaagtcactcagtcatgtctgactctttgcaaccccacggactgtagcccaccacgctcttccgtccatgggattttccaggcaagagtactggagtgggttgccatttccttctccagggtatcttcccgactcagggatcgaacccaggtctcccgcactgtaggcagacgctttaccgtctgagccaccagcgcccttccatgacctcacccaaatctggggctgggctggtctcttgagagccttctggacgaggcctgggagcactgggaacaggcccgcgagtggagtgaagccacgctgatatgtcccattgggacccacgtgtgttactgtttccaggggagctcagaggggcgagtgagcagcccccggtcacatagcccaccgtggcctgcgctatagagtacagcgctctttcagcctggcgggagcagcgagctggaacagggccgggcagatgacgtggaccatgcctgcctgtggcctggaggccaggccttctagaaacccggatgggctcagctgggtccacccctggcccaagccacgtcccagatgccggccgagcgccgtgctgggctgggcctgggccccggacccccaggcggaagccgtcatggcctgaggcccctgccactgtggacaccgggacacacagccctgcctggcctccccctcctcaatctggctctcaatcaggcctgaggccaccctcatcctgagccctggagggggaagtgaggggagccccgccctgtggggccacccctgggagccggaaccagcctggcgagagcaggagagaccctcaggctgacccggaaggcccagaggcagtcacctcccccaaccctctccgtggtcggaggggagatggaggccccgggggcggaagtgtggccagcaccccccacccccaggccccgcctcagcccagccttagctcagcatctcttgtactgaaaagctttcagggaaagacacacacactcaaaactctggcttctcccccagacctgtcatttccagtaaccgtgtagtttccgcttaccagcaaccgaaaccaagaggaaacggtgggaggcaggtccccgaaccccgggtccccgcgggggggccaccgacagagctctccaggggcagccgcccacctcctctcacacgcatcccccggtgggcccacgaggacccgccagggccccgctgcctgtccagcaggcctcctggggttgggcagtaggccagcggctcagctgacccaggatcaagaggcgaaggaagcaggaggccggcagggtccccggaggagggccggcctggttcccacgtgtcaccccgagtgcctgcccagcctccagtggcctgtcccctgtacggcgtggctcagacccccagccctcctcccggcccgcagcccagaccctaaggccgacgtgacgacatgggacttgcctgccccaggcctcggccgggctgggggaggctggactttcgtgctgcctgcagggcaaagagtttgctcagcaaatcagcagtgtcaacagagggacgagggaccgtttacccagcggagaagagcaaccgattcaagcacttcagagacaccagacaggcacacaagccctgtgactgacttgtcccacgaggactcccaggttgaggctggtggggcctggcgggctgtctgagtgcctctcatgtttgggaaccgccacgtgggcgttggaagtgcggcctccccagggcacccccccgcctccaccaaggcttgctgggaaccgggaccccggatgcaccttctaggaaatggagcaactcaggtgcaggaggctcaggtcagacctccagaggccgtccccagccccaacccaggagagcccaggacagcacagcagagggctgggggtcctgggggctgagccacagagggggcgggcgctgcgtggaaggggaggccaggcccttggagctgtccacacgccaccggatgggctcccatgcagaccagcagctcggtgtcaggaagggatcgggcaatgatgaacctaattcactcgcacgtgtggatgccggtatgatgatgacccctgcctccaagcctcggcagggagtggatggcgaggtcaaggccccctttcccagaacgcttccatcccaggggtagcgggggtgcaagtggggaggagacccccagccagaagggaccactcagcggtgaaaccctggggagggcgttctgttcccagagttccacgcgtctcagagacgcacagagagctgccccccacctgtgatggggggacccactcgagcctccccaccgcggccgagcaggtgtccagatgctaacgttgcaggagcacccctctggtgccctgcaggaaacgtggagcctctctgagccccgagagcccctgggaggggatcggcttgtggctaagagtgaggagccaggcccctgaccctcaccctctcacaccaggcagggtgcctcccaccaagggtacacccactaactccgagaggagccctgaggtttcaggagagatgtgctccaggccagcgcacggccgggaaacaggcagatggcgtgggtaggcgctcaggtctcagacttgccccccagctgcccctgacctgttcacagccagtctgcctgagtctccacagtgggctccctccaaaaggagggcctggggcacctgggcaggaggtgaagacatctgcccttgagtctggttctcaaacaacgagccgggcatgcgtctgccctgcccgcctcgccccagcacctagagagcattcagtaaacgcccgctgccccttgcattcctgacgccgagcaggtggtggggtgccggcagtggagccctgtgcgctcatcccctggacccgagggcacgccaccccactttaacaagtaccgctggatgcgccaggccccactcaagagggtcccatggctggccacgcggacacaggagtgagcgccgcctcttccagggagccttccagacatcccccacccccgacacccactgcctctggacttctgcccaaggccatactgggatgaccatgctgggccacggccagccaccccctgacgttctcaggcaggtcgagtccagcgagcgcccggacgagtgacgcacggacacgcaccccgagcaaaagaagctgggcgggagaggcgagcggcgcgtgcattcaggtcaagccagagatggagagcagatggaagcacgcggggctgggggaggggaagcagggcgcctgtttaatgcctacgggggttttgttccgggtggtgaaaacttggaactagacagacgtgctggtcccacaagcttgtgaatgtactaagcgccactgaaatgcagacttcgttcagtaatttactttgctgtgtcgcacagttcccaggcggcgctaatggtaaggaatccgcctgccaatacgggagatgtaacagacgcgtttgatccctgggtcgggaagatcccctggaggagggcatggcaacccactccagcattcttgcctggagaattcccacggacagaggagccccgagggctacagtccacggggttgcacagagtcggacacgactgaagcgactaagttccccgaccagggatggaacctgtgccttctgcagcggaacctgagtcctaaccgctgggccaccaggcaagtctcccgaacgtctaaaatcataaaacttatgatacgtgcaaccaaccacgaaaatacaaatataaattctcccttccccctgccccgcccccgccccaaatctggtcatcagcaacctgtgacctcggcggagcgaggcgggcggggccttgaggaaggagaggccggggaagaagccaaaagaggccactttggcaaagggctcttctctgcccagcggcccttcctctgcagcagcacctgtcaatcacggcccccgctctagcgggtgtgtccacggcccaccagtaggcccagggggtgggggtgagaccctcaaagccctgagctggccccagacaggcagaagccgctactgcacggccaggcctgactcctgggtcctcctccccctgactcctgggccctcctccccctgactcctgggccctcctccccctgactcctgggccctcctcccccggccacgctgcatccactgccgccacctgggcatctgggggcccatccccgggtcctgccaggatgccgctggaagggagatccgggcggccacccagccctgcactctcaggcacagagcaggaggcagtcgctctgtacctgctacagtccatgggactacagggtgtggccaccagagacagcccggccgggaacttcaggacccatcaaacgcaccctgacccacaagtcgcgatgcccccaggccagccgcttgttaaagcctctgggaagagtctgccaggctccggatgtgcccggacacgaaggcagaagctgaggcgagctagccccaggtcccccactcccgttcccagcatcttcagctctcagcctcagccgttcccacctgtaaagtggggactgagaacgagacgcagagccggccgccatcccgagggggtgtgaggccgctgaaaaaaacatctgccgcgttttacgaggctggatgaaaggggctgtctgtgcgtggagtgactgtcggcactttattgaggaaagcaatcaggacactcaatcgactctgcaaagccacatcctttcactactcataggcgagacgtgaaacaggaaaggtgccctcctcgagcccggcccggcccagcccggcccggcccggcccggccaatgtcaccatcagcaagggacagtgccggcttccacgggacccctgggctgccacccagccccaggggagtggagccgtgccgccccctggacctgcccccaccccccgccacctcggggcagggggtccctgcacccgctctctcactcgtggcctaggctgccctgacccagctcagctgtcctgatgaaaagcgttctctctcagctgtctgcccggctccaccctcttccagctaagggcacagctttctttttttttctctctctttttaaaaaaaaatccctattttttttttccagtggaaaaaacactggccgccatagaggcagagccaggcctgaggagggcaccttcctgtggggctcgcgtgttccctgacgtccgccccccgtggtcagaggcagcaggtaatggttttggtctgaggctgtgcattcgctgtgtttttctaaccctgcgtccttggcgcccaggcgctgacaaacagaggaagtcctgtacagacctggttcgttctcagcctggggtgggggcgggggcgagggtgagaattaacctgttcctcccccagcctcgcccgacacacgcaggtgactcagtggaaagacgggccaggtgacacagacgtagactgttcctcagcagccgggtggccgagtcacttccactcggcccctgaccctcttcttctaaagggaagtcgttgtccccgccttgcttcctcacaggacggccagcgagggccccgggggcaatacaggcaggatgcagccgtgattaggaacacacgtccccggacagagcgaagcggggctaggcgctacgcttggctgtgtgatgctgggcccggcgccgacctctctgggccccgctacacgcctgatgcccacggttccggggttgctgccagccacgtggggccgggccgccctgcccactgcactcccctccctctgacatgtcacgtgttcaggccgcctctcctaacccgcacactggaaagcggagagaccatgggggcaggggctgcgtcggacctgggcccacatgcccacagccagagcagcacccagcacacaacaggtgctcagaattgggaaggaggcaaggagggggtttgcgggtgccaccgcgggtgagaagccctcggagtcgccggcaggcccctcccaggcggtgccccggctcgggcccaccaggccgtatctttcgggttctctgaactcactcattagacaactaaaccctctcaaatgaggatcctgaaaccagcgctgtcagctcaaaaggagaaggcagcaagggagcggacactcgccccgcgcctgctgcgtgcctcttatgtaacctttacgcaccaccaaagagatcaatcacggatcaagcgcgaattagactggggggatctgggttcaggtgacccgaagacctgaggtcacgaggaccctgggcacgggagagccaggcctcaaatacaggatcgtccgaagctgaggtccaccacctgcccgacttccctccggcgtactctgggcgctgaggcggcagagggtcgcaaagacccacctgagcccgcccctgggtcaccggcctccccaggcaccccctgctggggccaccacacacagccaccctcctcagggcagaggactccgcccccagagactcaaggccatcgggtggcccggccccgctctctgggacttcctgaagggccttcgcaacaacacaaacctctttttccgaccccgagccccgtagacacctgacgggtggcttctggggaaggttccctctctctgggtggaaacagatgagtcacctggcatgaatgtgcctggcacatgacagcccgattcccacgccctggccacaggggaagcagcaggaaagtcacagaactttctgcgggtcccggctggaggctgcagagccagggttcacacccaggtcggcctgagacccagacaccctggagggaagacagcggctctccccttcagcccagagagccgggccgcccccgccaacaaaacctccgccgatcggtgggtggtgggtgagagcgagacggcgcggaccctgggggtggccacagtgcccccatcctgccctgggagcctggactggggcctccccacagctgggcctggccagccgtcgtggctgatcccttgcctccagcccgaggcgcccagagctggggcccgcaaggacggcacttccgttcaacttcccagtgggtctgcagggtgctcacaatggggtctctgtgggccgagcgaggcggggtgccaggccagacaggcaggcttcccgccaaagtggtggtaggggggagcaccaggccaaagggagggaaaaggccggcaccctagccctgatccagggcctggcttggggaggcaggaactcccaaagttgcccaggtttgggggtgggagagcctcccccaaccccgtccctttgaagcgcctcacccggaggccagcgggtgagagctgcagcagccagggcagcgtgtggccggagcgctggtccggggcaggggccccaggctgccccgtcccaatcccccggtgatggcgcaaggagagacggctcctactttccccagcccggcactgcccctgcccttcccagagccctctgcagaaacacggagactgcccccagccctacacgcacgcacatcccagtgagccgagccgagcggcagggaagggagtgggcattctgggaagccacgcatacttaatcacccggcattaatccgcctccccaacaatagcccctgcacttccactgaatcccagctgtcggtctctcaatggaaggaaacaagatttagagcatcaagcctcggcgaggcttctgcaggaggagaaaaaggccccaaaaaagcaaaaaaaaaaaaaagaaagtagtgcgcattcattagtgtctggacaaagacacaatgcattttgtccattaaactgctcacagacctgcttaattggcttcagtctggggccggggtagcggggaggagggggctgcttgcccactggctgggccggcagtgagcccgggctgggggttgtcaaggaaatgggccctcagcagttggaatgagggcgcgccagcccgtctggggacccacttctgcagcctggggagggggcgtttctccagccgccaggaacctgctcggtattcccatcagggacgaactcaagttgaagggcatcggccacagcagaaaaacttcccgagaggctggccagtactcacaggcgggcaggcaggcgatagatcctaaccaggttccctgacaccaccgccacccccgccccccgcccctgttcatagctgaagacccagggctgggaaggcgaagggcctgggaggtcagagctggggacagagacagagctcctggcaggaactcccacccacacccccggggagacgggcacggccacgacgatgagttccaacctcctttccccaacctcacctgaggccagggaaggcagagggtggcaaagggtgggtgtgcttttgaactagtcagcttctcgctgagaggcgcctcctgttcaggaggcgctcacctgcctggagcaagcatcacctgcccccagcagaggcactcccccggctggcagggcggggagggccctgcctccctgcagatgctctggagcctcccttcaggcctcagggactttgggaagaaatgggggagcagggatgcccacctagcacgccaggaggttgaggtggtcctcaaagcagtgctcgaacccccagcggccaggctgggctccacacgcagcgtaattgctggtgattaagtaattgccagactttgtccaataaaaccagcacgtgaccacgcccagccttctgggccatctccagaagacaatggcctagtgttctgcccccgctggcccgctgcagaaggcaggggctccgctccgacaaagcaacaggtccctgcaggggcgcgggggcccatactcacatgcaggcctcggtgccgttggggaacacttcacacttcccaccgttcaagcaggtctcacccggctgggagcagcgcaggcctggggaggggcaagaggagaggtcagcccggccagcacccccaggggcactgtccacacttcacctgctgtcatggggttactgggtgcagggggcccccaggaagccctgcatgaaccctaaggggactcaacattctgcccagagttctggggtcagagatggggcggggaggaatagactggctgggtggcaggtggagaggtcacgctcaaagtgggtagaggggtggggaggagtgacctgaaatgcattgtagacagcagggaagaaacgctgggatgaccctgggccagtctcccaaacttctcacccctcaccccggcttcaccggggaccttggctgggctggggcccctatccaagcaccaggattgtcttgctgttcaaacaagttcttccagggggtggcgctgggggggggcggcggtgctggccacactcagctcccccgctcgtgggaaaatgcgacagctgcaagggccgctgccccgcccgccaacaaagcaccaggcggaggaatcagagcagcccattgtcgcgccagggccgcctcctagggcaccaggactgcaccccagggacctggccacgcctccaccgacacccaacaccggctccccagggtgggcatcttcagtggcagcctcccctccacacacacagccaggggctgggggcgggggtgaagatgctccatttggaaggaatttgacttcattcccgggaagggatcaattaatctacccccctccttcttaccaaggctatgtaaattaagccccctctgggggggtggggacggggtgtgacatggaaccccatcttcaggaagcagggaactagctctccctccaacttttaggggaagagaagcattaatcaccatccgattcctcggagctcctctccatgggaagcggagaggaatgaccgccccggcaacccctgcaaagtttccaaacgtgaactccacaaagtgaaagtccatcagtagcagctgaatcttctgcacacacaacccccaccccgccccaaactgtgagccaggatagaggtagcgacctggtgtggggaggggacaccgcgggcagggcggccaagagccgggggaaacctgggtctggggtcctcgcccgggtcctgcgcgaactcttctactccgaagggaggccgagctgggccgcctggcccaccctgctcccctctgcccaacacgctgggcagccaggtcccgcagtgcggttcagtaaagacgatcgcggcgccctggaccccaggctccgcgccccaacatccgccccccgcgcgggcaagaggcgaagaaaaaagataaatggccccaaagcaacaggaaaccaaaaccgactcgattcaaatcgaaaagtagtaggcagctcgtccgcccgccccggggagcgagccccacgcgcggctggtgaaaggcgagcccagagctaggtctcccaggcccccagatgcccacgctcggcttcaaagccgacttcaaacccggcgccaaactcggttccaggcgcgagcagcgccaagtccgtccggatcgggcaaacggagcgggggagggtcagtccttctccccgagcccgggactctggctcctaccccggcccgggtcgcccggtccccctccccaccctggcagccagctcccaggcacccgagaacgcgcgcctaggacgccgccaaaagtttctgaaggcgcggaaagttgcgggctcgcggcgggcagtcgcctacctcgtgcggcgagcgcgggcagcagcgccaggcagagcaggggcgccaggagcggcggcatgcctgcccaccggctgcccgctgcgcccgggggcggcctcctgcgcccggccggcgggggctcgggcacacccgcgcgcagagggactgtcccacgggcggtgacggcccgctactgccctctccttccggctggagagcgtccctgggctctcgcggcctccccggcccggttccgcgcccgcgatcgttcctacgctgcacccgccgcccgcgcccctatcccagggcccgtgcgctccctcccgtggccgaggcactagtgaggcgcccggccgccgcgcgctccgcccccgccccgccggccccgcccccggggcccgcccccgccgatccctccgcaccccgcgcccccttgctggccgcgcccctccgctctcctcgaccagccccgcgcctcctcgggctggggcgcggggtcccgagcccgggtcctacgggggtgggggtcgcggccgtgcggagcggggtcggggcccatgccctaagggactacttctc

SEQ ID NO: 185 - DNA, 175202 bp, Hippotragus leucophaeus
  source 1..175202: mol_type = genomic DNA
cacccctggcagaggcccggccctgagagacgctccagcgccgagtgagttaaggcgcgtccggactcgacgcgggttggcaaggctgggggctgtctgaggctcatagtagatcactccgcgcgcagcccgggccggcgcttcttcctgcgggaaacccctgggtgccgaaggcggcggggcctggccgcggcgacagcggggcggggtttgcggtgggaggaggcggccgaggcggaaggacacacgaggctgcttcgctgcacacccgagaaagtttcagccaaacttcgggcggcggctgtggcggcggcccaggaacggcggacttggggtgcaggcagcggagacactgaagtctgagcttcggggcgccgcgcgaggccgtgagccgcggaagtaggaggaggggaggagaaagtgggggctcccctgtcgggaccccctccccatgtggatctgcccaggcggcggcggcggaggaggaggcgaccgagaagatgcccgccctgcgccccgctccgctgtgggcgctgctggcactgtggctgtgccgcgcggccccggcgcgtggtgagtatccgaccgaggggtgctgtccccggcgccccggctcacgcccctctggcccggctggccacctggggcgaccattcccacccttccgtcctccgcttggcgagaaggccgggctcggccgtcggcgtgcagggaggccacttagttcctaaagtttggacagcatcggaccgctccctgggtgcgccccctcctcctcgcccctcgccgcctgcagctcccctccgcctttgggtcccacacacgcctcctcggccggagggaggccgggcagcaagcctcagaagctccctttcttggagcatttgagttcggggatttgggaaatttcgcccatttggctccgtgtttcctggggtcgggggagagccgggggcgggctgcctgggacaaccatcgccggccgcggaccgcagatgggctgagcgcaggaatgccagattctggcgtggagggagcgggggcagggcgtcccaacccagcggcttgcaccttcacagccagactcagcaatgctgaaggaaggcccacggtgtgaatgggtgggtttggtttggatggggacaggcttttgcggcgcgccggagttctgacgctctgagttccacggttccccaagaatccggtgtgtaaagtttggctcgagtctttgaaaggtggaggcaggagcagtaggaaaactggtgtggctgcatgctgaaccacatgatttaaaaatctctactgctgttattctttccgaggcgcagagctcgggcgcagtttcagagtctgtgtccagcctcaggaatgtggtgtgacgatcaccaactcctccaacctggcagcagctaaggctgttcttttggcatggttgggggtggggcaggggcgggtgaagaagagtggatacgttaattcaaagtggtgccttctagagcttctttttggttggatatctgcaacagtctttctgaacacggttggatcgaggaaaggaaatccaatcgtatcgtacccatcccacccactatcgtagaatccaaatttctttccatagtgtttcctggaaagaacctgggctttggagctctgcgctttaatcctgggttcaaatccagctcggttgtatgaactcaccaataaaatgggaatgaaattacccaactaataggattaattacgagaatgtatattacactggtggcagtcaaaaggtattcagaaagtcctttgcaggcaggactgtgtgttgttgtttgtgaactctctgcttccagtgggatggtggcttgtgcgtgtttgttgaactggaagtggccccttcttttcctagcctaatctgaagaaagttttacctttaccaaaaaacttggtacttgagctatgactctttgcaaagagaaagtaatgaagatgatgggctttagaaagatttgctctttgtatattgttaacaggcagtcgacatgccaatcacggatgttgaaaagacatcaaagttatttatcacagtgctgggttgttcaaccccaaacctttcttggaaaattcaaagtccatacacctccaggtccctaagaatttcagaagtggaccaaggtgctgtgtgatgatgaaccaaaacatatgatagtatttttgtctttcctttttctttgagcaaaagctttagtaaagtgtaaatttagaatagaggagtataaacaatgggctagtctgaacattataatccttggtctaccattagcttgttttagtaaattagcttcatgttgtgtcatctcctcatctatgaaagagaaccagaaatcacttattttagagagttggagggaataataaatatgtttgcaaagtgatttgctaaattaagtgtttaatgataagacatgtcaggaataggataactctgacacacagggcttctctcattctaggacctatacttctgccctgatgaagtactgctcttactagctagctttagatggacaagtctagtgttagtgttagctcaaagacaggatttagatattttgatttctagacaggtgttcttcagaagctaaactacatgggaatggaagagattaaaaagcccttttcttggtgcagattttgaaacttttcagagtctagtagtgaaagcttcttgaatcttctcaatttattatcattgtgttttgccaaggtatcaattataacacacccttttaaacttttgagtgttcctgtattagtctagtggccagttgttaatttaaacatcactgagttcctgaagcagggagctgtcaactcatctgtctgattgtctaaacagctatccaagaccaccccttgctccttgttttcttttgctttgcaatgggaagtcactccctggttttgctgcctgctacatgatttctcagttgaattcttttgctttttttaaaaaaaatcacgaagagtaattgttttttctttcagatgaagataaaatttaccctagaacttgtttcttcttgttctttctgtttttttattatttctttttggggagggaggatgagagtgattttttttttagtttctctttttcctgatgtttttgattttttaaaactatctacccacattcttggtatctctgtgccattcccactctgctgcctcttctgtgagctgcttatagcctaaaacagtaacttttggttcacctgaactatagtcgctgacttcaggacctttagaaaatgtttgaattcagtgggatatgcttggatggttcagaccagccttacaatacatttaaaaaatatcacacccacagaaattctattttgcccacaaaatttgcattgatctagttcccactctctgatgccattcctagtggtctcactccttacgtggtccactatgatagaacaaagtccgcatcctggctgcatcaacatcatctgggctgcctcttggcctcaacacccaaggattctggcacagtaggtctgaaattccgtattttgagattctgcatttttcaaggtttacaggtgattctaatgcagtaacttggttggagcccagtcataattcattattctctatcaggtgtgtacctgggggtcttccctttttaatgttaataatttccagaacgaatgtatccttaatcagccattccagtttttaacccttctgacttccaaagatttttgaacttggtgacataaaagctgtagagtaaataatatcttataatgtgtaagaaataataagtactgtttcttcttgttcatctgagcacagtgggtccacattgtctctttagaagggcttcttatgtatatttacatgatattattataaactggcccctccctttcctctctgttatctctttttcttcaagtttcattcacatgtatcacttttggacacattgtctattggtccttaatggttttagggcaaaaaattctaagctatgatttgaatgagaatagaatcagattttacctgatactgatactgtgcatatacttttaagtgcttcctttcttgacctctcttttttttatttatttattttttattttactttacaattctttcttgacctctcttgaaccacaacttaaccttttatttcactcccactctttccttattctccttctttcatctttcctttctctgcagatgacttgaagccagagggttttcttctcctctacttttctttctttatctgtctgccatatgcattgtattttgggaggttcactggtctaggagccagaagaccaaaatttttcctcccggtcagctgttaattagtcttgtgatcctgtgggaggagcactactttggtcctccatttgcttaggcactttgtttataatcactgagcccattacggacaagttgagacaagaatctctctcctctggtcctcagtctagcgccttgtccactctccacacctcttccatcttttgtacaaatgagctcatgcacacacacacaaatcctcaagtgcttattgttagtgtgcctcttgaggaaaagaattgtgtctttttatttgtgtttgttctaatactcgcacccgaccgtggggttgcaaagagttggatgagactgagtccacacagcgcacacaacccttgtacctagaatggtgccttggcatctgataggcactcagtacatatttgtttcattgaacaattacttttagtagttttcttattctggactactacaatacttcaagacagtttttttaaaaagtagtatttgcaaaagttattgcttaccttacatttgggggaaaaccgaattttccccttccccagatgttttatttaaatttgccgttttgaatttctgtgtgtgtgtgtgtgtgtgtgtgtgtgtgtgtgtgtgtgtgtgttggtttcttctctctttttcctgatcacttctgcaattcataaaggtcacttttactttggaatttaacctcaaagatgctggcatccaccctctgcctctcagttgagttgcctcttttgcttcctgtatttctgtattactatggcagcaatttctataattttgtccagagttgccacacccttattgtaatttggacattttgaggattcttggaatatattatttttaaagttagaattaaaaacacccttttttatattggagtatagctgattagcaatgatatatagggcttccttggtgggtcagtggtaaagaattaattcacctgccaatgcaggagacatgggtttgatccctgatctgggaagatcctacatgctgcagagcaactaagcctgtgcaccccaactattgagcctctgctctagaacctgggaggcacaactacggagcccatgtgctacaactactgacgctgatgcgccccagagcctgtgctccacagcgagagaagccgtcacagcaagaagcccgtgcatcacagctggagaggagcccctgttctctgcaactagagaaaagtctctgtagccgtgaagacccagcacagccaaaaattaatggataaaattatatgaaaatgatctattagttacaggtgtacagtaaagtgattctgttatacccatacaaatatcttgtgtttttcagattcctttcccatgtaggttattatagaatattgacccaagtttccctgtgctttatagtaggtccttactggttatctactttagtagtatgtatatgtcattcccaaatttacgataatttgtttagatgatttttttttgagatttatttccttgtgagctgcatattgtaaacatgaactagaccgagcagatatttacatttagtatatttggttttttccctccaagaaggttccattgaaaatcaccatcaccaataaaaagcaaaaggtgacacatggtaaatacattttttagagaaccacagagggtgagctatctccagaatgaaatttgctacttgagggcagagaccatgtcacacgcaccccttccctggcctgtgcccaacatgtggtcagccgggcagcaggtccttcctggtcgcggcacctgtgactcctgctctgcccgccccagctttgggacattctggaagacaggtgatggtgagtcagaggtgtgtccttacagtcctttctgctttgaaaagatcagttaaaggtggaccccacctatacgcttttatgctatctctttttattaattaatgggtagttggaagtttcctctgttgacttatttgttgggaggaactttaaaaattcacctagtccttctatctgtcccatggtgattctgatcctcttagaacatcctggttaacatgtagcctgccttttttctccttgatcatctcttctgatagacagctccctctttctggaggcagatgagtctggatttggacagctgtaattctttgaaagatcttcttatattcagttgtaatcttcctccttatgacttgcacccactggcatcttcttaggaatttgtctcaaagagtcctgagccttttgtgttagggatccagaggtaccctttactgaactgacacccacccttccgtaaaaggagttaaacccagtgaggaccttgaagatgatcccgttggggagattgcttgggttaatcattgtagccctatatgttttgtaccacccttcccagatggcagtggtgggagggaagcatttgttgagcagtgtttccccaacctgttttatgataagaacacttgaggtcttctggagattccgattcagtaagtctggaatagtgtctgcgaatttgtatatttaagaaatggtcaggtagcttttatactagggaaattttggaatcactgcagagaatctaggaaagctaagggcttttctgttttgtttttgtttgtttattctttgataatgctagagatgggttgctttgactgtgggtcctgtggtcacttttttctcccttgaaagtgcctgcttcttattgaatgcctagctcactagggagaagaaagccactcttgtatccttaaaaggctaataaaattatttagttgtgaaaaagtggggtttttgggcagtctatccaaagtcttaggactgccatgtgtgtgtcacgtatgactttggtggatgcctccttgtccctccatcaggatattacctgagatgccagaatacataaaagttccagttttcttggtgtctgttaaggaattctgacctcagcccttgtgaatgatgctgggtctttgaggatgtctgtcttgttgacccatgaacacatatctggtgtcagggatttccctcagatatgttagtgaaaaaaatataaaggtcattcctttcaggcagtcctgcttttggggtgtctgggctgctgcagcaaatagaataaggaaggtaagataaagggggtctggaggacttcttgagcagaactgagcagtctgcaagaaggggctcagaagtgcgcctctaacagagacacttggtgttgctgttcatgataggaagaaggaagtggcttcagatctgaaaggatacgctcatggcctctagatgggacaaatagcagtgttcgttggcagtggtaggaagttggctgtaggtctgttctttcttttctcctcccctggagaatcagctgtgtgacaaaaaaatacattgtgacattaaaaagaatagtaaagtcaagaagagggaatgatacaaaccatagctaggagtgaacaaaacaaagcaattattgtgttaatttgcttatgtaagtaaatatatacatttctgtataatactctagtaggagcctgacttagctctaagctctaagctgtaagatttattatctgtgtagctgtgctgtcttagtggtgtgttaggaagggctgtggtgtgttgtcaaccttaatttgtgtgtttcccctagcatggcatggtaggcagtaagggtattctacttttctagctgtgtaggagtcattgaccaaatggaagatagagacctgcccccgaggagctgacatcatcatgacgacaagacagatgagcacacacagttaggaacatgaagtacagttacttagtaacttatctatacttgtggagagcagtttcctgcagttggggtgactaagagctgtagggtcttgggggggtaaatctagaagcaccagggaacagcgacccccagctcacccctgctgggcttgtctgctgttctgctctttctctgttgcaatttagaagtatcaaaacttgacttggggggaagacaaagagccctttgtttggtgggggtgtaaatataaatttggcacatgttgtggtgtctattatgtctgttcgtgggtttgtggcaagagagagggctgtgttctcagactcggatgcctagcccgatcttggacaagttaaggtggaaggagctcctttggaagatctggttctcagtggcggttgctgaaggagcctctggtcacagccaggcagtgactgcagtgccgtgtggacacaccccgagttgctgcctcaggtggcattgattaatcatgctaacatctccctcaccctcttgtgcttgtcttggcaaaaccttgtcctaccggctcctcagagtttgggctttactggatcattgaatgaactcttaaggggttcattttgctgtctcttggctctcttaaactgtaggccagttactaccgtccagctctggagcccgtgatctcccaatcaggcagtgaggggcctgtgtccctcttcccagtgcaccgaagggccttccccagagacctctagggagggcagtttctggtcttcaaggcagttccatctgcagggtattggcagtgactctagttctttgtatcagccaaacatcatgccaagatggattcatcatctcacaaaggcaggttgtatccatgggcgttgcaaaacctgtttctgggttaagagtagtgctctcacctcgtttatgtatttataggaagaaagcctggctatatttcatgaggtaaggaaaacatgatgataatgttttggttggagtcagatattgtctccctaataatatggtatcttttaacaaatagtatccctttaaaatacagttttgcttgctgactaaagcaagaagctgtggttacattctaaagtatactaccttgttcagagacaggtgcactttaacattggtatttgcttctttttcatctcttttcactctcttctctgttttgtgaggagattctgggaggcttttaagcctcaaagattaaataatctattttaacaagtacctaacagggagaggttgctatgctggcttacttcttccacattccaataagagaaaaattgatactgtttatcactaatatgttttgttgagtttctgaatatgaatagtcagaacactagatagtgttaaattgtttacttctctaaatggtaaagtggtatgctgcaaagaaacttttgtttaattctctgctttcatgtgcttttgtttataaagtgtagagactcactgaagtttaaggatgtgtgtattttgattattactttttactgttttctttgctgagaatatgcctttatttgctagatcttttaaaattggaacatgaaggacatttactttattagaacatttaaagcactttctaatctttatgaggattattagagaaaaaaacatgtctgtaaatcatgcacgtttgggatgttactatataaagtagtaacaatatgtcatggttcctgtgacataaacttttaagagattgaaggaaaatctggttgtaactgaaaacaaacattgtaacatttaaaggcaggtttacatagcaacagaattattccttatgtttacatgtaattaactcatatttatgctttgttgattttctctggcacctttacaagaatttttttgggcaggaggtattgggcttccctggtggcttattggtaaagaacctgcctgccagtgcaggagactggttagatccttgggtcgggaagatcccccagagaaggaaatggcaacccactccaggattcctgcctgggaaatcccatggaaagaggagcctagcgggctgcatacagtccatggggtcgcaaaagggtcggacatgacttaggaattaaacagtttttaaagtaattatatttaagggtggttaaggagttcatcaccagctcgataaacatgagtttgagcaagctctgggagttggtgatggacagggaagcctgtcatgcttcccagggtcacaaagagtcagacacgactgagcgactaaactgaaggacctttgaaaaatataaaaaaaaatccagttgcaccactgttaatattctggtgtacatcatttggtctttttatcgactcttaaaaattatagatttataatgtatatgtgattttctgttctgcttttctttgatttctcctttgctttggttacatatttgtctccatcatttttttctttcctgcataaatgacactttataaatgccagattttaaatctggcatttaaatgccattctgtataaatgatctttatacagaaattcccctctttaggatatttctattaagctagatttccagaagagaaattactatgccaaagagtgatttttaaaaattgggaaataagcagaaaaacataagagaaaattaaaatctccaataatcccatcacctccaatcaaaatctcagttaatattttattacatttcatacagttgtttttctgtgcctcttactgtaattaagattttagcatattatagttttactatatacttctgtaccactgaaaatattgtaaacactttcctatatatgtaaataattttcttcttcatatttctttgtttttactgaagtatagttgatttacaatcttgtattagttggggcttccttggtggcttgttggtaaggaacctgcctacagtgcaggagacctgggttcgattcctgggttgggaagatccgcagagaagggattggctacccaccatattcttacctgaagaattccatggacagagttgcctggtgggctatagtctatgaggtcacaaaaaatctgacacaactgagcaactaacacttttggtgtatagcaaagtaattaaaaaagaatatatatactctcagattcttttccactatagtttattataagatgttgaatatatatatatatttcctgtgcataaatattttttaagaacatggttttaaaggctgcctactgttttatctgaagattctattatattttatttaaactgagatctagtcttggtttccagctttcattgttataaataatgtgatgaacattctcatatgtaaataatggtaggaatatgtattttcttaacataaattccaggaagtcaaattattttatcaaagaagatggacctttgtgtggcttttgatatacattgccaaatttcttttcatatagtttgaccaagttatactgtattagttgaatatgagactgtccgtgtttccaactgtcatcaacactggttttatttttacaactctttaacaatttgataagtggtaaatgctgctgctgctgctaagtcgcttcagttgtgtccgactctgtgcgaccccatagacggcagcccatcaggctctctcgtccctgggattctccaggcaagaacactggagtgggttgccatttctaaatgctacctcatcctaattggtatctgtgcttatagtggtcttgaaagtttttcatgtgatcagtggccatttctattgccttttctttttatttattttggtaaattgtgtcttttattcatcaaggtatttcgtttttggttactgatttgaaatatttctttaaatattaaaggtattctctttatcttaaatgtgtcaaaacacacacggatacattaaactacataatatcaaattgctaccagtattaatatatcaaaaattatttaatagcttttaaaaaatcctttgatttctaatgcacttggtcaactttctgtatatttgttaactggtattttctgtaattactttaaaattctaatctgactgtatcataaatcaacaagctgtcagttgtgtgtgcccagaaaatgcacgtttactttagtgtcttataaaaagatactggaggaagcaaaaaaaaaaacagtctattttgaagcaagctctgtttttgggtgggtggaaggtaggctgcttctgtgttgtctttttggatatcgaggatcttggaccatccccgaaaggcagacctgatatccactactaaatctggcattctgacctaatttatagttgtgcagtggtctagccgctccatttgctgagccaacaggatgactaagattctttctcctctctcttcgcaaaattgattagttgtgggacagaactgactgaatcaacctgttgttttggcaccccacgaacaccacctgtttcttagatttctccctccagcctcccactgacctagctcagtgctgtgtgcacagtgggtaggagatccgcgtcgttgctgaagaatgttgtaataaagaagagtagattgctttttttccccatgcttgtgtgttcttaaggcatcctgctgcttttgacataagagttccagctgaactgctatatgtggcagctctgtgggtcgtaagtgtttgattcagagtaatttcaggcaatatgaatgctttcttaagtatcattggaatttactgggctggttgtttgccagctattaccatatttagcatgaggagacctggagaacaaggacatttctgaccaaccaaagaaggaaacctctctgaaggactgcaactttttttttttttaaggcataggttaagagtttgtgtcctctggtctttgatattctgccccatccacaaaattaacttatggatgggaagagaggtttgatggtgaagctctttctcaccctgaagtctattaatactgtttctgagaggaaattagagaattcttactcatagactgcactgagaggcttaatcagcaggtgaagttgttgcttaaaaacaggttaatgggtatttattctcatctttcttcttgaaggcttattacttttctgctttgtcatgatctgaatttattttggcccaatcgttttctccctcctacttttgaaattatcagccttctttctgtggcttaaaatttctctgcctcagtttttccattttaaagatgaagatagtatttgaaaggaccactcggtacaattaacataaaacataaaccgaccctaacatttacatagcgatgcggagtttacagaacactcttacacaattgcctcctttaatctcacaaaatcttggttgaaactgagcctctgaggggttagttggcttgtataccattgtttggccctagataataagtgacggagctgggacttaaacttgtggtttgacttttaaaacctcagctttttttttctttttaaatgtttgattcttactatgtgtcattctcttagggctttatatatcttttcttgtttaattcacatggctgtcctttggggcagacagtagttagctatactacaggtaagaaaataggagcttggagtcatagctttggatgttggggcgaataataaggtggttaaaggatggagtcaggatgcagacccctagctctcgggcctctgtagtcaaccatggcgctttatccccattcatacaatcatgcctcacaacaacctttgagatggggaggaggggaaactgagacctgtaactgctcaggataatggaattagtaagtgtcagagttgggactgattgaatgatgatttagtctacttgtctccgtaacccttgctcattgtatacactcaaaatacatgtttttaatcatttgtatattgataagattgtcagctcattgaacataggagccagctgttagaaatcattggtatattctgaataaaaggattgattttagttggctaatggccctggccgtttctcagttgatttctgtcatcaggacagacagattgaatttgggttgagagaaagggagttccaattaagggggtctttaagccagaatatgccacagctatgagctcttcagaagcctgctctcaagatcagtggcccggctcttgagggctctgctgggggacatttttgtgtgttttgagagacttctctttgagagggagttgtgagcttagagggagaaagggtggggataccccgggctcttaactcattggccctgtgtccctgtttcttaagccactctgtgccaagatttcattatttttaaagtgaaggtaataggagcatgtagttgctaggcttgttatgagggttcagtaagttagtgttacattcatggtgtggtgcctgcatatagtgacagagcggtaaatagtagttatgttggtgatgttattttgtgttgcagtatacactggctttttgttgctttcacttctttttaatcaaaagtggatgagtgattcagatccttggtgagaaataggagcttcatgtttgcagtatgtagattgttcactggtttccggtgagcctataaatatttaggggtattgtatttgagtctgttcctttaatggggtatacttccaatttggagaatttgtctaccatccaaattgtatcgataggtgctgaatcatttccccttatttattaaccagacatttgtggttggactagtttagtacaggaactatgattttttttgcccgaggtacagctttgaggagaatgtcagggggacactcttgttcccccctttcctatgacatgataaacatcggcccgtgccatctggtgtcaccatgcattcggtgctttaattacacttatagcactaaaggaactatctctgtgaaataacagaagtacctcatggtctgttatcacagctttgtgggctcccggagattttggaatctcagactgggaaccacccatctagtccatccttgatttacagatgaggaaagcaaagcctccaaactcattagtcaaatgatgtatctgtaggttgaccctctgtttttgaaatctgagaagggaacagtgaagcagtgggaagggtggggtgggggaaaagtgtggctatgttgaaaatgtcggtgatagcagagaatatatttgcctgtgagaccctgcctgtctctttggacttctttgtaatggttaagacaacccaacagggctggagtcgttagtgattcagaattagattagccaggactggtggagttactttctcagaaaagggtttcatattttaacatttgtttcccatgacagtttgcttattctcaagttttggcagccatgagcaaatggttgtcaggttttttgttttgttttgttttaaggcaaaactccaaattttattttgccaatttagtaaactgtattctacctaccactcctttctgctccctgtaattatttctcaaactttgtttttcagttgtggaagtactatgaaaggttttcttttgtagtctgaaatatttataattttgtgtaagcacactgtttacaggtaatctaactggtgcatatgttaactcaaatacccttaaaacacttaaaatattttccaataacttaaatctccccccaagggtagctgcagccacttacattaaaagagaggaggtatatactaagggtaacaattatttgaatgtaattaatgtagataaatgggaatgttactttggaggaactggagtatttgcatcaaaactgactggggcatcagttgagttcagtcgctcagtggtgtctgactctgccaccccatgaacctccctgtccatcaccaactcccggagttcacccagactcatgtgcatcgagtcggtgatgccatccagccatctcatcctctgtcgtccccttctcctccttcctgcccccaattcttctcagcatcagggtcttttccaatgagtcaactgttcgcatgaggtggccaaagtattggagtttcagcttcaacatcagtccttcacataaacacccaggactgatctcctttaggatggactggttgggacttcttgcagtccaagggactctcaagagtcttctccaacaccacagttcaaaagcatcaattcttcggcgctcagctttcttcacagtccagctctcacatccatacatgaccactggaaaaaccataaactggggcatgcttcttcattaatagagtgaaaaaaacaaaaactgccctcctggagcttataagaagtaatggtagtttccatatactgagagtttattatgtgacagatgcttggggggaaaagtgctttacctgtttggttttagacggcacagtaggtgttataattcctacttagtgaaagattaaggcatggtcatccaggttgcctagttagtgatatagaccagtaggtggtgtggaccaggattgggaaccccctttgcctgactccaaagctcacacatttactcactgtaagagatgccattgtctcttaagtggaatgctgtagccctacagataatgtaactttggatttagtaatattttctgcattaaattgacttaagttttgctcttcttaacatcctacctctgaatggacatttgcataatgtggaaacaaatgtcaaaattccattctgaggagttgcagttctttctaaatctttttgaaaatgggaaggatagatttatatttgttgtaaaccaaggaaagtggtttagaattgccctcctgattacttcttgatcttaaaagaaattctttagtagattaagactaggaatgaatgtgtagctttaaaaaaaaaatttttttttggaaaacttagaatagcaattcagagccatatgtgtgccagccttttaaattgcagatagtttttccttgactgggcacttgtattgttcttgtatctttctgaaagggatataaaagaccatgtattaataaactgattggaatgcctcagcaaatgaaagtggacgtaaccaattactaaaactgcccaggactaacctatcttggcctgggaactttgaaattaactgtgtgtactgtttctacatatgttattacagaaaaagcacggagataaccttggcttttcttcttttctgtgaatcttttccatgttatctcctttgtcactgaaaattggtggtcatctgtaataacagatgagagaagtatgtttgacatcaacagataatcccagataatgtcttctgttttaaaatgcaatcctaaacatgcatgctcagacatgtgggtcttttcagacatactggactttcttcttaagattcaattatgtttggctgcctgttgaatggtaaaggagagaatgccaagggatatgaaggataatgagagaatgatgacagtaaagattgattatttatgactttagatacccttccaactccatttggatgttcactttagcatagctgctgagttttggaaccaggtaggccttgctctgagtctcagctaagagtattatgcgagtcacttcgcttctctaaagtctcagttcccagttttatgtaacaggaatgataataataattaacttgtaggattgtatgtatgtattagaaacagcatacttaattgtattgttctgggtacaaaaatcggtgctcaagtgcaggtggccccagagtttaaacttgattagcatcttgtcagtttctcatttggaagatgtagtctgggaatacttgtcttgttttaatttcttttaatgatttcctttgcactgtttcattgccaaggcaggattatggaccacctgaagaacagactaaagcactatcatctagtaatggaaagtttacaggattaattgtgtaaattaaaagtctttctaatatttgtgtctgcccagtttacagcatcttgctcctttcacctcagaaaaaattggttcatagaaaaaattatttaatacttcaagtcagagtcagggaactctttcaataaggaggatctacttggttggcttatttgtttccatctttcaccccggagtcttcatggaaatcaggtttgaaatgttagaagcagttggttttcagcattgggaaagcttatctaatcaggcatgtgaagtggcctatgtcagatttctgtgccagagaaggttaggggaggtttaggagattatcgcttctgcttgtaattcttgagcattgttgagacactaggagagcagtggggaaatattttaaaaaattgttgaagttggctacaccagcctaacacacataataacatcccatccccatttaggctggtctcaatatataggtgtatgggacctaatttaatcgtgtaattttttatcatttggggactagatggtaaagcttttatgtttcacagatttttgaatttacatacaataatattttacattaaatagtgcttcctggcttatcatcacttttgtaaacatgatcttatttgagtcaccagtgaaatcaactaaggaggaggggctgttgatttttacagatgagaacagttaagtctcatagcttaagggaactctcagtcacacagtgagcatatggcagagccatgattcgaacctacctctaatttctagggcagttcttgtttcatcataacacattgcttgctctgtaatgttgctaactttgagctctgacccctgtgatttgaagggattctcttgccttctgtttgattagttgtgtcagttagagcttgacagcagtgaagcagaggttgaggattctttccccaggtggatcagttagcttttcttaaagctgttctgtgcctgcagtaaccatttgtctctgttgcctggaaaggatgttgatccaaagtgaaacaggctggagagtatggctcactcccctcaacccatcacaacttcaatatattctgccagtgagtacatattgttgtgttccttaacatgcattttatgtgttctgaagtctgtttcttagtattttttcctcagctgtttttaatgtctcaaaccttagtttagttctccttgaatggagaactttgttgtttcttgcatgctaagccgctttaatcgtgtccgactctttgtgacctgccaggctcctctgtccatgggatgctccaggcatgaatactggagtgggttgttgtgcccttttccttgttgttccttacagcatgggctactcctttgtgtaattttattttatcgctctcggcatttttctccttaatcatcataaccttaaacagaatgtaaattgtgtatacagataggtgtgtcagtcttgcactgtcacttatgtaagtgcattttagcatttcttttttccttttgatcaaaatgaggaaatagaaaatgttttgttatggtagttttatgcatacacccacaaggaaatgcatagccagcttctgtgggaactgtaactgatacattttagggaagaaaaggcatgatagctaaaattttaactctgccaaatggtcatggggaaagaaagcaaaatgatgaaacacatattgcacttcagtttagcttactaattctgaggctaaaaacatatgtctgtgacttgtttacatatatttggatatgaaagtatgctgggttttccacaaaaatgcatttcacaagttgtacttttcagtcaagggaaccacctcaacaactgttctttcaggtgtacagtgcaggaaagtttaccaccaagagtggccagatagttgaagttttgacatgtcaatgtcaacagactgccaaatggaccattttgtctcctccagcagtccggttggatatttggtcgtgccctgtggtcagctgagagcttcctcaataaaagccactgtgatccaaccacaaggggggtgcacctctttcaccaggatggactaggatggactaggaagagtttggcagttgtgtatcatgagagctgggattccccatgctccatcctcctgaggagagtgttgatagtagcactgttttaattcctgaggcacatagattattgcaaatgcatatcatttgttggtaggatattgggaattgattaattttttttaaaatttatgtcagattgaaatgagtaagcttgttatattcactgtagtaaagaaatatttatggttttggtaaagtttgataactgggatttttttccttaaacatgccaacttaagtgtgtgtgtgtatgttgggaggaagagagataaaccttgaaactgttttttaaaaaaaacttttaaaatagtgcctagtctcagttggcaccagagaataattatccagaatgctattcagttacagtgaaaaggtttagggaagttgtaatgagtttaataaccatctgcacagtgacatagagggacacacccagttacacaagacctgagtctgagaactgttgatgtgcagtcgtctcatcagcatttgctcatcattatcaacagcaataatggctcaagtatgtctttggggccacatgaaaagacagtgtactcagagctgagggcaaatcagacctgacgaaaacatagtcttccctgaccctttgtcctcaaaccaccattttgtgaggctttgaaataattcactttatttcttgtatggcattaattttcctttttagatactgtgtcgttccagttcaaatttttgctagaaccaggaagggtagtgtactgtgggtcatttttttaacccatttccttgtgatagagttcatgtcagtgggttcatgctgctgtatgtgtatgatagtgttcagtatcttttctagtttacacctttgttacacctgttgtcaaaccacgtatgagcactttctgaaataaatcattttgggcactgtgagtcagagggaaggaatcagttcataggaataaactggcatgttgagaagataatgtctaatagattgcaaagcattttcatgtgcattatatcttttataaggtcatgtgttcatttgtggagactgaggcagagaccttgtgagaccaagtccaaggtcatactgtaggtacaagggttagttgaagaactaaaatccagtcttctgtctattctttggtgtgtaacagggtcattattttattgacagaaatatgggatctttcttttttaaaacgatacccttttacctttggaaggtatgttagcagttctttccagagcagaaagaaagtagttaatatttttctgctttttgataaaaatcactgttttctctaaatgtttttgttactaagaatcttatggcactgcacagcttttgactgaaggcgctttttggaaaattaaagttttatagaaattaatgagcttttccatgtctttctgaaggagtggactcaatctagtgacacaaatgtattctttgacttaatctacagatgacagatttgattttggtgttctaatgtttgattgacttcattttggagcatgtatatctgtgcacaaaatggatgcttagtgggttctcattaatttggtaagtggtccaacacaaggtgagtgtgggtggagcagcgccgtgtgccttcagtgccgcggtcactgtgtgcatactggctgtgagacctagcttatcatttcagagctgatggaggagacgtgggttcgatccctaggttgagaagatgccttgcagtaggaaatggcagcccactccagtatccttgcctggagaatcccacagacagaggagcctgccaggctcaaagagtgaaacgtgactgaaccactgggcacacacgcacacagtttcaggaagcactctgagctctgcttcagaagtcctgatacgggacagtgtgaacctagggaatgtgcttaggtaagggaccattaagaaataggttttgctttgcttctaagaatgaggcctttgcttctttgttgagtttagactcctattggtgagctgaggagaagcaattcttgagaacttcatggaggttataactggctctaaagagtcttggttaaactacctgagtaactagttcctaggacaagcaaactttgcaggagtccttttggttgtacatacagctccctgggattgctgtaagttccaagtcatccttgtttgaaatagtagttgtccagcttgaatgggcatcaagttttagagggcacagattgctgggaccacctccagagtttctgattgtgtggcctgacgtggggaattgataatttacatttttgacaagtttccaggtgatgctgctgctgttttgggaacaacactttaagaaccattggcttagagcatcctcaggtgtctgagtttggggagctatgcaaggttagttgggatctttacataattcctccagtgtgtggaggtgagcttccaggtatattaattcattcagtaagtgtgaatgtttcagttgttagaggatactgtggagaaagcgcacagaaatgcctccattggtgaaacttttatgagtgtaggcagggattaacctgatagtagttcttctggttatcaatgcttacaggtgagcctgtttctcctcctagtttccttctacatattttactgtcttttggaattttcaaatttagcaataaggacatgatattaattatcaccatcacttttgagtatttgttcttgtcagatactgtgcagctaagtgcttttcattcattattccatttaatctttagaacaatcctggtgttttcatctagatctaaaagatgaagaactttaaaaaggttggtaacttacacaagattatgcagctagttaatggcggtgctaggtctgtttgactgcaaggccatccatactctttactaccaggcttttaaaattacagattgtgaccactagtgggtcatgaaatcagtttgttaggtctcaaactgcactttttggggaaaaaattgagtagaaaatcgcaaggtaggataagcattgtttcttgaaattcttgttttggctgggtatatacatatgtgagtattgagttctgactcaagaatatatttgttatagtagatcacagtaaaaatgtttgtatgcttctgccttcttggctatggaactctatgtcatttaataattttttaaaaacagtagaaaatttaggccttggaaaagtaattttttcaagagcaggaacattagtggcagcgcaaagacaagatgtcttcagtcgctgtgtgcgtgcacactcagtcttgtccgactcttttgtgatcccgtggactatagcccatcatgcttctctgtttatggaattttccaggcaagagtactggagcgggtttctactccttcttcaggggatcttcctgacccagggatcaaacccatgtctcctacatcagtaggtgggttctttaccactgagccacctgggtagcacatttcagctccttgtctactgctgtagtcctcacaccgtgctgcctccttaacagtgctctgtattacctgcgaattggggcttatctttccacgtgatagcaaatgtgccatggaacctttcaagatgttgacaaaatctgaaaagggaagttgaatctcagcctgttctgggtaggtgacagttctgccatggagcccccaaagtctacacataaagctttcacatttctcctgttacttctggtatactcaatgaaatgaggataataatattaactaacagtgccaggctgtaagcatgtttcatatattaactctcagtagtaattattttgacagggtggccatggctgggtcatgaacttggctgttttgagtgagaaggggcatcctaccagcatgagttaacacttctctatgccggctccagttcctcattttgttcctgctgacttcagagctattcttctcatagctgagcttaccggagagtgatctcagctttatcttcttgtttcacatcacctacctttaataggtggataatttaggttcctgttactttcccagagtattagtgcatcactgatttgcatcaggggcagggctgtggattgtcagcatgaacaggtgatggtagacattggtcccccatgcagaatgctgtcccaacactgcacgaaggagcttactacagtctctccaggagtactgggggacacgtggaaaccacttgagaatgcttacaaactcttccagcagacaatccatgaaggctgaaggaatgcaaagtcaaggctaacccttgtaggaaggggaggctaatacattccagttagaagaatgacatgtagaagcaagtaaggatgaggtggaaaccttcaatcatgaattatgaaattagagctagaaggagcctgaaaggcctggaagagtgaagtgagtggcagcttagatggtagagagccaggcatggaacctaggtcttcattccgtggcccctttcatcctaagatctgtttactggatttgtcttctgaagcacctgattacagaaaagagtgactctccttaccctagtgtgaatgaaataaagacaccaggaacatgtaccaggcttatttagtttctttgcattttccccaaatgctgtgatccccccagggctatgtgtgtcctagtttgtgaaatgctggggcagaggaacttcaaaacttaaaaaaaaaagtatgccccaagaaaaacttattttttggagtatggaccctctcctccatgtaagtaaatatttataaattatattcctgtacaactattaaaccatatgtgcatatgttaatcttagagttcagttatatggttttatattgtgatgtacacattgtacacattctaaaagttcttttggtacctcagtggatggtcttgtacctcttctacctctgggatatacagatctgattttgtagaccactggtccagactgaaaactgaacagttcaatgtcaagactattggttctttcattagctagattatttttcactcctggtaatttgaatgtctctctccaaaacagtttttgaagttttgagttaaaaagctatcttttcagagtagaagagataaagatggaggatatatgtaaattaggttgaatttctccttaagaaagatcactgtttttgatctaaggagaatgcagaattttcctttttatggtctgtattggtgcaaaacccttctttgatgacattaattaagccttccctcctcactgctattgctgttaacctgcttcatagtccatattagagatttcttcaggggtgctagtggtaaagaatccactggccagtgcttgagacgcaggagacgtgggcttgatccctgggtcaagaagatcccctagagtaggcaatggcattccactccagtattcttgcctggaaaattcaatgggcagaggagcctggcaggctgcagtccatggggctgcagagtccaacacaactgagcacgcacacacacacagttcatagtaaggctccataaatgtttgctgattttttaaaacaatactttcagcctaagccagttagaaatgacagagcagtaggatggagaatataccacacttacctgtggaatgctgttgaatactactggttgcatgaaagggttgttgatttgttttaggccctctgcaatattagagcaagaagttgagcaagatttgtaattagaagtaaagaagataaattagttcatttcatttcagagtttggaagctcaggactgtgaagattatcaaagacaaagatactttgagtaaatgcagtgagaattaatgttgataataagaaattccatttttgtagtaaaataataacactggtcattgtctgtggagagatgctggagagcaaattagagagagggataaaagtcactggctacacagcagagccagacaagctcaggggcatgtattatgtacatgcagatatttcctaatattatttcagttgtaaggatgcaaatcatttcaaaattagagcagctcagttcactgttactggaaaaacgagttaaaccaagcacatgtcctactgagggtgagtcaacagtgtcattttaacataaggagggatagtatattaagtgagttattccaagtcctgtggttttcctccagctgagcaaagagctggtgtttcagaaacagggcttagatgaaaaaaaaaatttttgcccatttcctctcttaattatagctgtttagttctcttttgcctgaaccttttcaaaaacccctcttcttagatttttgtcatcagatttcctgaattttgatgggatacttatttacagagactattttatttattatagaccaattctggtttaaaactttaatttctccaccaatttatggaccaggattggtgtatggtgtattggtatatggtgtcagagatcctttaaaaaatagagtaagagaaacagaaaagtaatctattttaccaagtcattatattctacagttctttagtggtatggatatgaaggtgctattttatggaacaaaatatcaaattgtagtgctgaaagttatccctttggttttggaagagaagagtcttatattttcagtcttaaggaaaaacagttctcttagctttctgaggttttctcaagtgagatccaatatcactatgggtatgtgtctgaatagtttatttcttggtttgggaaggtgaatttttgtctttttttcctctcagtggatatctttagttagagcagcagaccagatgcgggaaatattctctctcttacagattcttggtttgccacattagttattacccatcttctctgagtagcaggccacatttttcctgtttagtgattcagtttttattaacttcactgcgcatgtgttcttgaaggaatttatttctgatcagttgaattatgggtagcttcatcaaatgatgataggttgcctgcttttaattgggtcatcgtttgtaggagtaaaactcatcaagataaggtgtgatcattcttacgatctggttccttaatttccctttgcttctgtgatgctactctattattaagaagcagcatctggttacaattttacaaaggaagaactctatacaatttcacctgttctcttatagagcagtttgtttttgtctttttcctaagaaatagtacatggtagcatatcgaagcctagagttggcaagttttcaaaagtggggttctttggttgtggaggtaggaatgatactagtgagtagatgtcagtccttgttagggcatgtgcatgaagagtggctctgaaaggcagcattggtggcccttcttatcctggggactcagtcttgcctttgtttttgacaagcctgtggtcattagctgatctttggcatgagtgttctttgtatgtgtagctggtatgtgggtgcttatctacatgaaaatgttacagtcacacatgtgcatgatagaggcttgcaggtttttgtgggtatccagttcttctgactgcattgcaacaggtgtattgagtgaaaggatgctgaactaggaggtaaaagaattgtgttttagtcttggtttggccatcttgtcttgaatgactttgaataagtcccttgtttctttgagttgcagtttcctcttctgtaaaatggtgttaataatgatttacatactttcaagattgttttggggatcaaaagagatcatttttatgaaaatgttttataaagtaggaaggttcttttattaatatattatctttggccagttgatctgggtatattcagccttctcagggctgagaaattgaaggtgggagctgactttttgtttggccacagtgttcacattggccttagagtgcttgtaggtttgggtgggaggacataggtagaaataagatgaaaattcctgtgctgggatgttaatcctgcctgaagctgtgaaggtgttagttcctcagttgtgttttactctttccgaccctatggactatagcttgccaggctcctccattgtccatggaattctccaggcaagaatactggagtgggttgccatttccttctcgggaatcttcctgacccagggatcaaacctgctgctgctgctgctgctgctgctgctaagtcgcttcagtcgtgtccgactctgtgcgaccccatagacggcagcccaccaggctcccccgtccctgggattctccaggcaagaacactggagtgggttgccatttccttctccagtgcatgaaagtgaaaagtgaaagtgaagtcgctcagtcgtgttcgactcttcgcgaccccatggactgcagcccaccaggctcctccattcatgggattctccaggcaaaagtactggagtggggtgccattgccttctctggggatcaaatctggatctcctgaattgcaggcagattctttacagtctgagccactagggaagcctgtgttgccaatcaataccaactccatctgtaagtgcttgttgttgttgatgttgagtcctgtccgactctttgtgatcttgtggactgtagcacaacagttgcttgttagtctcattttactgggtggtggtggggggcactgaccagctaacttatttaggatacaactggccagtttctgaaattcacttctttagaattatcctttgaggggtaaggtattgcatctttggaaggttgatgatttggggttattttctgtggagggaggtttaagctcacctgcttttgataaacttgttctagttaacaattctaaagccagattacattgagggagaggatactggactcatttgatgtttttagtataaaacttagaatatttgagactttgtgtggtaactatatctaggcttacttccaaagtgattacaaagccttggtcttaatgttttcgatgaggtaatgtgtgctttggtggggaggaggagagatgttatttaatcaccagcaaacactaatacactaataactacattcactaaatcttttgtgcctgtgcctgaactgagggttacttgctttaatgctggttttccgaaagaacttaatcctattaatgtggtgaggtgatggtgagaagggcatcttcattaggcctggagtggtataactggtaaaactcccttggtaaatctctcttgttcaacctgagtgtcactcccatgttcccaaagtggaatgaatttttattgaaaagagcattttaagagtgataaacaaagagattaaaatatctcctctgtcaggtcattgtgaccttagaaagccagaacaagctatcattttgcagattttagttttgtcttcttttgtgggaaattaaggacttgtttatgttccctttgagggagatagaaagtgactgccctgctccttcaacagtttggctggcaaagattttccaagcattttccctgtgcctggcatcatagctgggttgaagctaggtagagcagacaaggtgcaggtgttgcccattctggagtctctctcctttgctgaaactccttggactgagtgcagcgaagcagatgaaatgagtggtaggccagggcatctacttaaaaaaaattcttctaggaatttatgactcatttatgagagtaggggaagcactgaactccagaaagtcaacaccccttactggatttacccctcaaattttaatttaatacattggagtttagatcattgcttttgctttttctgagaactctggactgaaactgggacaaggggagtctttcagcctctttagaatcaagaaaacctttgttaaaggcagtgtaacttttgccaaatcagatgttgctgcagatagagaaacctagatttccttcccttgtttgaagacacaaacaaattttgatatggtcacttacgaatatacagatataccttggagatattgtgagttcagtaccagaccatcccaataaagcaagttacatgaattttttggattccagagcatgtaaaagttacatttatactattctgtagtctgttatatgtgtaatagcattatattaaaaatataaaacttaattaaataatactttgttgctaaaaatgctgaccaccatctgagaacttcatcaaattgtaatctttttgctggtgaagagtcttgtctcaatattggtggctgctgactgatcagggtggtggttgctgaagattgggatggctgtagcaatttcttaagataatgaattttgctgcattgattgacttttctttttgtgaacaatttctctgtatatcgctcaatgctgtttgatagcatttgacccacagtagaacttttttcaaaattgaaatcagtcttctcaaactgctgttgctttatcaattaagttcaataaaatattctaaatcctatgttgtcatttcaacagtcttcacagtatcttcactaggagtagattctatctcaggaaactgctttctttgctcatctgtaagaagcatatcataatcatggtatgattgagttaaagttttatcatgaaattgatcaatataaccacatcttcaggctctacttctaatgaaagttctcttgttatatctaccacatatgtagttattttgtccactgaggtcttgttgtaagattgaaatatagttaatacacaatattttattagtttcaggtataatacatagatttgacatcagcatacattatagaatggtcaccatgataagactagtaaccatatgtcccatacaaagtttttgcagcattatttaccatattccttatgttacattcctgtgccttatttattttataactggatgtttatacctctgaatccccttcacttattttgtttttacctcatcacactctctcctctggcaaccatccgttctctgtatctgtgagtctgttttcattttgttttgtgttttagattccatgtataaagtgagatcttacagtatttttctctctctaacatttcacttagcatactactctccagattgatctatgttgtttgcaaatggaaagttttttatggcttagtattattctgttattattattattatgagtattattctgttattattctgggcttccctgatagctcagttggtaaagaatccacctgcaatgcaggagaccctggttcgattcctgggttgggaagatctgctggagaagggataggctacccactccaatattcttgagcttcccttgtggctcaggtggtaaagaatccacctgcaacgtgggagacctgggttcgatccctgggttgggatgatcccccggagaagggaaaggctacccactccagtattctggcctggaaaattccatggactgtatagtctgtggagtcccaaagaattggacatgactgagcaactttcattttctgttatatgtttatatataccacctcttctttatctgttcatctgttgatggacacttacattgcttctatatcctggctattgtaaatgttgttatgaacattagtgtgcatgtaacttttcaaattagcgtttttgttttctttgggtgaatacccagaagtgaaattacaggatcatatggcaattctatttttagttttttgaggagccaccatattattttccatagtggctgtaccaatttatattccaccaacagtttatgagggttcccttttctacacattctcaccaacacttggtatttgttgtctttttgatgatagtcattctcacaggtgtaaggagctatctcattgtagttttgatttgtatttccctaatgattagtcttgttgggcatcttttcatgtgtctgttggcaatttatatgtctttctccagaaaaatacctattcagagtctcagctcaattttgataagagttttctttttgtttgtttttgatgttgatttatatgagttctttgtacgttttggatattcagtccttatcagatatatcatttgcaaatattttctcccattcagtaaattgtctttttgttttgctgatagtttcctttgctgcgcaaagctttttagtttgatatagtcttattcgtttatttttgttttgtttcccttgcctgaagaaacaaattcaaaaaaatattgctgagatcagtgtcagagaccatattacctatgttttctgtgttttcttctgggaattttatggtttcaggtcttacatttaagtctttcattcagtttgaatttgtttttgtatattgtgtgagaaagtagtccagtttgattattttgcaggcagttgtttcattttcccaacaccaattattgaagagactgtctttcccctattgtatattcttatctccttttaattgactgtatgaacatgggtttacttctgggctttctattttgttccattgatcagtgtgtctgtttttgtgccatatcatactgttttaattacagtttgtaatatagttccagtttgggaacatgatatttccatctttgctctttctcaagcttatttggctattgagggtcttttgtggttccatacaaaatttttaggattattcattctggttctgtgaaaaataccattgatattttgataggggattttcttgagtttgtagatttctttctacagttaggacgtttaaacagtattgcttctaatccatgaggatggtgtatctcttcatttgtttgtatcatctttagttcctttcattaatgtcgtatagttttcccagtacaagtcttatatcttttagcattattcctaggtattttattctttttgatacaattgtaaatgagatggttttcttaatttctctttctgattattattagtgtatagaattagaacagttttctgtattttgtatcctgaaactttattgaatttattctaatagtttttttttttttttggtagcatctttggattttctacatatagtataatgtaacaatgatatatagtatagacatatagtataatgtaacagtatctgcaaacagtgatagttttacttcttttaattccttttatttattttttttcttgtctgattgctgtagctagaacattcaatactatttatattgaataaaaatggcaagagtgggcatctttttcttgttcctactcttggagtaaatgctttcaccttttcaccattaagctgaggccttgtcatatatggcctttagtatgttgaggtaggttccttctgtcttcattttttgagagtttcttttatcataaatagatattgaattttgtctaaaagttttttctgcacctatcaagatgataatatgatttctattcttcagttttgtttaattactgatttagtttaaattctggtaatcagtttggctatattttgtacttcctgattcaatttttgggaaattgtacagttttaggaatttatccatttttttctaggttgtccattttattgacataattacttgtggtaatatggttctttgtgtttctttgctgtctgttgtaacttctttttcatttttgattttggcgattccagtatttttcttgatgagtctggctgaagatttatcaattttatttatttttttcaaagaaccagctcctagtgtcattgatcttttctgttatttcgtagtctctatttcacttacttccactctgatctttattgtttctttccctccgttaacggtggattctgtacgtcttttcctagttcctcccagtgtaaggttaggctgtttggacttttcctggttccgaggtagagctgtatcactgtaaacctccctttctgaactgcttttgctgcatctcgtggattttgctcattgtgtttccattttcatttgtctctcggtatttctttatttttctctttgatttttttcagtaaccaatttattgtttagtagcatgttgttctggagaaggcaatggcaacccactccagtattcttgcctggaggatcccagggatgggggagcctggtgggctgctgtctgtggggtcacacagagtcagacacgactgaagcgacttggcagcagcagcagcagcagcagcatgttgtttagacaccatgtgtttgcatgctttcttagtctctctttttttttggtaatggatttctagtctcatactatgatggttagaaaagatgcttgatatgatttcagttttcttaaatttactgagacttgttttatggcctagcatgtgatctttcttagagaatgttctgtgggcacttggaatgaattatattctgctgttttcgaatgaagtgttctatatatatctattaaatccacttggtataatgtgtcatttaaggccagcatttcattcctgatttctgtctagtgatctgtgcattgatataagtggaatgttaaaagtccccagttattgtattactgtctttttctcactttgtttgttaatattttctaaatacataaggacctaatgtagctcagctggtaaagaatctgcctgcaatgctggagacctgggtttgatccctgggttgggaagattccctggagaagggaaaggctacccactctagtattctggcctggagaattccatggagtgtataggccatggggtcacaaagagttggacacggctgagtgactttcactttcaaggacctaatacataaggacctaatacctacataagtatttaggtcctcctttgctaagtgcacacatgtttacagttgtcatgccttcttcttagattgctccctttatcattatgcagtgttctaatctgtctcttgttacagtctttaaagtctgttttatctcatgtaagtattgctaccccagctttcttttcatttacacttgtgtggaatatctttttccacactctcactttcagtctctgtgtgtctttagatctgaagtgactctcttgtagtcagcatatatatgggtcttgcttttgcatccattcagctactctgtgtctttttattagagtgtttagtctatttacatttaaagtaattattgataatatgtttttattgccatttgttaattgttttctggttgtttttctatttctttttgttcttttcctttaaaatttgaccagtatcttttgtattgtatttggactcctttctcttttgttgtacatctattacagatttgtgatttgtggttactctgaggctcatatacaacaacatagatatctatatatttcacttcttttgtcttttaacctttatactagctttataagtggttgatctactacctttactgtatttttatctttaccaatgagattttttcttacataatttttacatttttagttgtggccttttctgcttagagatgtccatttaaccttatactgtgaagcctgtttgtgtgggttagttgctcagttgtgtctgactctttgcgactccatggactgtagcccatcaggctcctttgtccatgaaattctccaggcaaggatactggagtgggttgtcatttccttctctaaaaagcctgtttagtggtgctgaactctttcagcttttgcttatatgtaaaactctttatctcgccttcaaatctgaatgataattttttttgggtagagtgttctttgttgtaggttttcccctttcatcactttgaatatactgtggcactcccttctggcctgcaaagtttctgatgaaaagtcagctgatagtattatgggagtttccttgtacttaattagttgcgtttttcttcctgcttttaagattctgtctttttttttttcccccaccattttaattatggtgtgtcttggtgtgaactctttgggttcattttgtttggggactctctctgcttcctatacttggatgtctgtttccaccctccgtttagggaagttttccgctataaatcttcagataagttctgtgctcttctctctctttcttctgggatgcctataatgcaaatatcgatatccttgacgttgtctcagaggtctcttaaactgcatttttagaagttttttcttttttctgtttagcttcagtggtttccactactctgtcttccagattgctcatctgttcctttgaatcatctaatccagtgttgattccttctgttgtattttttatctcagttgtattcaactctgcttggtttttctttatatcatgtaactttttgggtgaaattctccttgtgttcatccattcttctcctaagtttgttgaacatctttatggtcattacctgagctctttattgggtagattgcttatctgcacttttggaattcttcttctaagatttttgtcttgttccatcgtttggaacataacccctgtctcctcattttgcccaattctaaatgtttatttctctgtgttaggtaggtcagttatttttcccgatcgtagagaagtagccttaagagatatgccattgggcccaacagcatgctccactctgatcactgcagctatatatcctggggtagcacctgtgtaggccgtgtccaccctactgttgtatcagggataactcttatgtgcaggctgattagtggggctggtccctggcctggctgactgcaaggtcacgtctcatgcagtacatgtaagccagcttgagggcaggttagggttcccatgcaattgactatgtgacctgggggctctgaggctggcactggcttgctggagggcagggcttccactgaagtcttgaacctcccaaagtcatccaagagggtttgaatcagtgtattccaaactcctaaatgttgatattttgacctcttcccatgaatcacagatgttctcaataatatttaaaaatggtgaatccttcctaggtggttttcaatttgcttgcctagatccatcagagaaatctccatctaaggcagctgtagccttacaaaatgtatttcttaaatagtaagacttgaaaatcaaaattacatactgatccatgggctgcagaaaggatgttgtgttagtgccatgaaaacaacattaatctcattgtacatgtccatcagagccctacggtaacttcagatgaattgtcaatgagcagtggtattttgaaaggacttttcatctgagtagtaggtctcaatggtgggcttagaatattctgtaagccatgttgtaaagaggtatactcttatctaggctttgatccatttatagggcataggcagagtagatttagcatatttcttaatggccctaggattttttgagtggtaaataagcattggattcaacttaaagttagcagctactttagcccctaacagaataatctgttttttgaagctgtgaagtcagatattgacttctctctaactgtggaagtagtagagggcatcttctatatagggatgtttcatctactttgaaaagcacttttattaattatcttagctagattttctggaaaacttcctgcagcttctacttagcactctgtttttatgttaagagatgacttctttccttaaacctcatgaaccaacctctgctagcttcagactttgtttctgcagctttatcacttctctcaggtttcatagaaatgaagagagttagggccttgttctggattaagctttgacttaagggagtattgtgactgctttgttcttcttttccagaccactgaaactttctctatatcagcaataaggcaattttactttcttattcctcatgtattcactggagaagcacttttaatgtccttcaagaacttttcctttgcattcacagtttggctaagcatttggtgcaggaggcccagctttcagcctatctcagctttcaacttgccttcctcactaagcttaatcatttttagcctttttatataaagccagatgtatgactcttcctttcacttgaactcttaaaggtcattatagagttattaagtgactcttattaacaatgtcagttttgttatgtctcagggaatatagaaacccaaagagagggagaaagataagagaatggctggttagtgaagtagtcagaccacacatatttattaagttcactgtcttatatggggacaatacatggcactccaagacaattaaaacagtaacatcagatcactgatcactgatcacaaatcagcataacaaatacaatgataatgaagaaatttgaaatgttgtgagaacgtgtgtctcagggtacagagatgtgaagtgagaagtagtagcctttggaaaaatggcactgacagattggttccatgcagggttgccatatactttcagtttgtaaaaatgcaataaagtgcaataaaggaaaatacagtacaacaagataagcctgagtacagaattttgtgtttgctgtctttctggctcttgcagaaacaattagatgagcaagaatggacacaagcacttgcaggccaaatggtgactattagtgtgctgggctgtttttattaaaatgcttggtgtgactccacagaaatctaagtcatcttagagataaattcttgcttatactcacagtaaagaaagagtatgagtagatgaaagtgttttggagttgaaggactaggatttttcagacaaattgattgaactttgaaattagcagctcttcatcaaatatttttaaacatgcattattattattcttttctgttgattgtggagccaaagttttgtttgtgtgagttgacatagatttgtgtttgaagaaacaaaagaagggagagactgaaaataaaagtaaataaaagtagaaatttgggtctatgtttcatgttttcatttccccttgacatttaataaagattttttattttccttctgttacctgtccctgttccaagattgttgccccaggcatgttctctggaaatggggattatatgcacttatcatctccagacttagatattttccttgcagtactggtttgtgggcttatctggaatattttgggtatgaacctatggttcaggaccttctgaactcttgggtttagacaattctcagtgaggtgtgaaggaattttgagttgaatattgtccacaggtgaagagggtttagttttggctgtagatatagggcctctgtgagccagataataatagagaaataaccgaaatgttaggaatgtatcctctgcaaaccctgacttcagaacatttcgtgggactttgtataagattcagacctcctattatgcattagcataatacactgattatagtgttccagagattgctgccaaatgatttttaaaaatccttcatgtgaggagggatgcccatggggaaatctgaagctgttctctgggttttccctgtttggtttggggaagtttccataattctatataataacatatacagtttaggttttttaattttcatttttgacataattttgtccctcatttctttctttttaggatatacctctaaattaacaaacagtaggaattgtctactctgtttaaaaagcattctgaacaatttaagttaaagggatgctttgtttcttttgggtgggtagcaagaagattatatgtatttataaaattcttttccagcaagggtagttaaagcatgtatttagaattaagcactttttgaaaaatgaactgtgcttaacaaaacagtcttttaaaaactttaaaatgggagtgtttactgaaagtacaggaaattggtgacaggcagaatttgtctgtgataacagaacagatagagaccatcgaacaggaaagatgatagaggagatgacaatggagtaatacctcagctggcctcttttaccactaaggaatgcaaaaatatttagtcctttgtgtagagaataattttattccaaatatgatataacttcttaccctctgttgggttttattacaccaagatcctgatccttttggacatgaaaacctggcaactgttttggtcagtgacattttacaaaaagataccaggtggtgctagtgggaaagaatccacctgccagtgccagacccaagagatgtggtttcaatacctgggttgggaagatcttctggagtaggaaatggcaacccactccagtattcttgcctggaaaattccatggacagaggagcctggtgggctatagtccatgaggtcgcaaagagttggacatgactgagcaactgaacatagcacacagatacttacagtgaagaaatacgttggagctactttggaccatgttggtgcttattgttttgtgggtgtttatcagtgaatccgggcatcccagatggcgctagtggtaaaggacctacctgccagtgcaggaagtgtcggagacagaggtgcgatccctgggttgggaagatcccctggaggagggcatggcaactcactctagtgttctggcctggagaatcccccatggacagaggagcctggcggactatggtccatagggttgcaaagagtcacacatgactgaagtgacttagcacatgtgcaaataagtgaatctagtcatggggaaaatggtactggaaaatggtacatgtatcttagcttagcattcacttggaattttttataactatgtttttcttcatttgccatttagatgtaaattatttggcttccattcaaacaatttaaatcagttcttaccgtaatacacatggcttaagattcatgggtgagggtgtatcttcattcatgcagattttaagacaggaacttccaaaaatgttttagatttgtgaagatctctctcaatttttcatccctgttaaaggtcagaaaatttgcaccattttttccttcttctttttacttttctactccttatacaacatgaagtcagaattagtcaacacagtatccctacacttactaaaattggagctttagaatgtttaagacacataaaccggtgattgagtttttaaataggtttgtctgagttatagttagttagttcattgaatatcttatgagtgttgcgtatacctcctacggtcgagacactattctaggttctggttatacaaagacgagccaatcatggtcactgcctttagggaatttgcacagagttggagagagattggtgagcctatacttataatgcaactgcctaagatgtttaggggagtacagaggagggacatatagattagactggatggacatgtaaatcagactgcagagtctctgagggcttcttaaggaaggtaacggtttatctgtgctttgaaatataagtaggaatattcagcattcttgccaggaattctccaggcaagatagaaaaggaagaaaggaatgagaagtgttttccaggtggaagaatgtgcatgtgtgtaaagattattaacaaattggctacatctgaattaaaagtatatatcttgcatttcatatggaagagtaaagtcccttttcgcccgcaaactaagaaattaaaatttaactcataaattaatttttctgcagtcttaaaaaatacagcaaaacagaacaaaaaggaaaaaacatagcgtgtagcatatgtcattatagcacagcaagtgttaatgaatttgtttttgcaataaatccaatattataaaatagaacaaaactggaattttttaaagtcaaagattattcaagattcatcaactcactgggatgaatatctttataaaacaaaaatgctagaaataatttttaaaatacctttatttataaactcaatttttcgttggttatattttcttaaatcaagacatgtgagtgtgtgtatgtgctcagtggtgtcagactctgtgactccatggaccaccgggctcctctatccatggaattttccaggcaagaatactagagcaggctgccatttcctactccaagggatcttcccgacccgggaactgaaccagtagtctcttgtgtctgctgcattggcaggcagattctttaccactgcgccacctgagaagtcagatcaaagcatcagttcagttcagtcgctcagtcgtgtccagctctttgcaaccccatggactgtagcacgccaggcttccttgtccatcatcagttcccagagcttgctcaaactcatgtccatcgagtgggtaatgccatccaaccatttcattttctgtcatccccttcttttcctgccttcaatctttcccaacatccgtgtctttcccagtgagtcagttctttgcatcaggtgtctgttgcatcgcgaagtcaatactttgcaaagtattggagattcagcttcagcatctgtccttccagtgaatactcagggttgatttcctttaggatcaaggcataccagttttttaaaagtggaaatattttgctatgaatcttatatcttaagtcaatttctgtgcgtctggtatcagtaactcttaagtagaaaacaaatgtcctattagctatacctgtaaggggcatagaaatcctccaaatgctatcagggaaagaaaattagtatctcccttgttgcatttatgtgcctttttatcaaggcagatttcaaagaggaagacagatgtttctccactttgtttttatttaaatgtactacttgggatttgaagcttctgcacttcttctgtttgtttggattttttttttatggcttgatcccaaaaaaatggaatgaaaaatttagtgaaagctttgttgtttgaaattgcagggtgctgtgagacttactgcaaatccctgatgtctccctgtctgccttcaattctcctatttttggtaataatgcaagcagtcattttagaaaactttgctttgttcattttactgagcctcttccagacaccatgtgcctgaagcaatagcagccagccacagccaaggtcttagggcgtaagctcagacttcatctttctcaaatgctgcctcttgaaatttgcataaatgttgaaaagaaaattaaaagggcccctctatacctcctcttcacatattttaggaaccccagccattcaaggcactgaaatgtcttttgagtcatctgtggatataaaagcacaaatagataccatcctgcagatagagggagcaggatatggagaaaaaaaaaatcatgtgagacagacaacagacagaggcttatttgaagaggctacaaagcagcaagtaatgccaatttaaagcgattacatgttaatacaacaagtgaaacacatttgaaggctgctcagattacactggctggggtgcagacttaattactcatgttagagattctgaaaacaaagggaggcttttagaccagtgatatgtacctgacatgatactgaaaagccttggaaaaacttaggtaaatgcctagagaaatttttaaggacgattccagtaagttggatacctgaggtctgtccctaaatgggtaaattcctgaggcactggaactggttaaaatcaatgacagttcattttgttgtttgctgtatttatatacaagtgaggctgataaacatgaataaatactagaaccttgtctggactgagttatacttagagttaaacaacaaaggtttgtgttatatttcttaaaggttctttccggagtgattctgaaattgatattgagagaaggcctgccaaagtatacaataaaaacaatttttatttcatttctgtttatcttagagtaatttgggcaggtcatattctgtctgtccctactcctaacttccctagactgtgtgggctgtgaggataggaattttttctccgtttgactttcttgcaatgattagtaatggactgtgcttaagagtagttgtttaacaaatattgaaagcaccatattaaaactaaatgacatttttgcttatatatagtgttaatttacctttcatgaatcacttctcaggcttgcagtgctataccttttttttttaaagcaatgggtgactggtttttgtttttgtttttttagatagtttagtatctcttttattagaccttaattggtgacagctgggaagaatttattccatttatttatagtatgacctaaatttcttaggactcttgatttctcagtttgtttaaagtagagtctgattgacacaagaagttcctttaaagtcaccatttatcatgaaatcaatttataaagaattcagctacctactatgtgaaagtaagtgaagtgaaagtcgctccttgccaccccatggactatacagtccatggaattctccaggatagaatgctggagcgggtagcctttcccttctccaggggatcttcccaccctggggattgaacccaggtctcccacattgcaggtagattctttaccagctgagccacaagggaagcccaagaatactggagtgggtagcctatcccttctccaggggatcttcccgacccaggaatcaaacttgggtctccctgcattacaggactcctactatgtgagcaatccttttttgagttcttactatgtataagacattgttctaggctctttaaatgcattaattcagttaattcttatcagggctctggtaagaaatgaaaacacaaagaggataagagatagtaaatgggggagctagaattccagctgagatcctgattgcagcatttttgcttcaatcactgaattagattgcctcagtcatacagaagagaagtagtttctatcctctaggaacttagaagtgtgaaagccgagagagttagaagacagtacagagttaaatgctaaacttcttagcatttattagtgagttattagtgttaaagagtaggggttggcctgagaggacagaactgtccaggggaagctttctgggccaggcaggaggcgagctgggctaggaggaaggagcagaatttagatactaaaggggaagtagcaaccagaggaagctgagatactagtggaggcaaggaactgagttcatggtgatctatttgagctaaagtctgcattcaaagcggttcctggtaacgttggacccactgtgggctgtgatcttgaaggcacaggtgagggcttagactggaagaattaagaagtgacttgtccctggaagaaaaaatgccaccaggcttggcactgtatccacccaaggaactgcactgacctttcagcgggttcttctgaagccaagctgagaataacttctgagaattaaataagaactgaaagccactatatgtagatgggcaagtggtggaaggacacgttgcaagtgatacttctgggaggttagaggtgattaaaataaaatccttaccacttggggggagctgagaaaacgggtagcttcagcctagtctaaaaaggaataccttgcataagcttatatcagaaaggaaaaaaaaacaaaaccttcattacactggagcactgaatggtcctgagtttttcaaacccagatttggctgtattattttccttgcttagggcagcccagtagtctgtgcttacccctaaagtagaagctgtagtctaacccttgcctgccttccttgctatctcctgttagtctcccctttgtttaataatttctagccttgcaaacatggaataccagtctcattccatcttcgggcttttatacttggtttcctctttttgggatcacttttcacctgtatcatcatgatacttgttcttaccacctgagagaggccttgcctagtcaccgtatctaaagtaggtccctatacctctggccttcctggttatgttgtattccagaactgggttctgcttctagtagaatctatcacttactactgtgagtgaactttattcattcatttattatgtctttgcctagtggaaataaggttcatgtggacagggactaataaaacatgatttttctgacaccacggcctgcatctcacatattagatacactgtaagtatgtttgtttcttcattcttccttccttcctttctttccttttctttttgcttttgtggctttcgggatcttagttccctgaccagggattgaacccatgccctgggtggtgaaagtgcaaagtcctaaccactggacctccaggaaattccctctgtgtgtttctgaatattggaaaactagccctcaaatggagaaggcaatggcaccccacttctgtactcttgcctggaaaatcccatggacggaggagcctggtaggctgcagtccatggggtcgcggagagtcggacacaactgagcaacttcactttcacctttcactttcatgcagtggagagggaaatagcaacccactccagtgttcttgcctggagaatcccagggacgagggagcctcgtgggctgccgtctatggggccgcacagagctggacacaactgaagtgacttagcagcagcagcagcagtccccaaatacacagaaaacgtggggacttccctggtggtccactggttgagaatccaccttccaaagtgggggatgttgattcagcccctggtcagggtactaagatcccacatgcagcagggcaactaagccctcgaactacaactagagaaaagtccaagagccacaaaattaaaaaaaaaaaaaaaaggaaaatgtgtgaaatttagcatctagatgttgtgtcacattgccgagtgatgcagtgatgaaattggaatctactgctgctttttgtttttgccttttttggggcaggggcatgcaaatacagatacacagtatatgagattgatatttatcaagcagctccaaccagtaacactgaagaagctgaagttgaatggttctatgaagacctacaagaccttttagaactaacactcaaaaaagatgtccttttcattatagggccctgggatgcaaaagtaggaagtcaagaaacacctggagtaaaaggcaaatttggccttggaatgtggaatgaagcagggcaaaggctaatagaatttttccaagagaacgcactggtcatagcaaacaccctcttccaacaacacaagagaagactctacacatggacatcaccagatggtcaacaccgaaatcagattgattatattctctgcagccaaagatggagaagctctgtacagtcaacaaaaacaagaccaggagctgactgtggctcagatcatgagctccttattgccaaattcagacttaaattgcagaaagtagggaaaaccgctagaccattcaggtatgacctcaatcaaatcccttatgattatacagtggaagtgagaaatagatttaagggactagatctgatagacagagtactgatgaactatggaatgaggtttgtgacattgtacaggagacagggatcaagaccatccccatggaaaagaaatacaaatagctgtgaaaagaagaaaagcgaaaagcaaaggagaaaaagaaagtattcctgtctgaatgcagagttccaaagaatagcaagaagagataaagccttcctcagcaatcaatgcaaagaaatagaggaaaacaacagaatgggaaagactagagatctcttcaagaaaattagagataccaagggaatatttcatgcaaagatgggcttgataaaggacagaaatggtctggacctaacagaagcagaagatattaagaagaggtggcaagaatacacagaagaactgtacaaaaaagatcttcacgaccaagataatcacattggtgtgatcactcatctagagccagacatcctggaatgtgaagtcaagtgggccttagaaagcatccctacgaacaaagctagtggaggtgatggaattccagtggagctatttcaaatcctggaagatgatgctgtgaaagtgttgcactcaatatgccagcaaatttggaaaactcagcaggggccacaggactggaaaaggtcagttttcattccaatcccaaagaaaggcaatgccaaggaatgttcaaactaccacacaattgcactcatctcacacgctagtaaagtaatgctcaaaattctccaagccaggcttcagcaatacgtgaaccgtgaactccctgatgttcaagttggttttagaaaaggcagaggaaccagagatcaaattgccaacatctgctggatcatggaaaaagcaagagagttccagaaaaacatctgtttctgttttattgactaggccaaagcctttgactatgtggatcacaataaactgtggaaaattctgaaagagatgggcataccagaccacctgacctgcctcttgagaaacctatatgcaggtcaggaagcaacagttagaactggacatggaacagactggttccaaataggaaaaggagtacatcaaggctgtgtattgtcaccctgcttatttaacttctatgcagagtacatcatgagaaacgctgggctggaagaagcgcaagctggaatcaagattgccaggagaaatatcaataacctcagatatgcagatgataccacccttatggcagaaagtgaagaggaactcaaaaacctcttgatgaaagtgaaagaggagagtgaaaaagttggcttaaagctcaacattcagaaaacgaagatcatggcatctggtcccatcacttcatgggaaatagatggggaaacagtggaaacagtgtcagactttatttttttgggctccaaaatcactgcaggtggtgattgcagccatgaaattaaaacacgcctactccttggaaagaaagttatgaccaacctagatagcatattgaaaagcagagatattactttgccaacaaaggtccgtttagtcaaggctatggttttcccagtggtcatgtatggatgggagagttggactgtgaagaaagctgagcactgaagaattgatgcttttgaactgtggtgttggagaagactcttgagagtcccttggactgcaaggaggtctaaccagtctatcctaaaggagaccaatcctgggtgttcattgggaggactgatgctgaggctgaaactcccaatactttggccacctcgttagaagagttgactcattggaaaagaccctgatgctgggagggattgggggcaggaggagaaggggacaacagatggctggatggcatcaccgactggatggacatgagtttgggtgaactccgggagttgttggtggacagggaggcctgtcgtgctgcaattcatggggtcgcaaagagtcagacacgactgagcaactgaactgaagtgaactgtagcttaagatgaaaattctggaaaaagttactccttttgtgagtgactagtttctctgagtctcttaaaacaatgctttaagcatgatttctttgattagtatgtttgaacgtttcactttctactctacagatacaaagctgctttaaattttatgaagcttaactgttttacattggtaaaaagtaaactgaattttgaaatgaggtctttcccaatctcaccgtcatggttttgagttatcaaagttttaacttctgtttttatgacgaataatcacagtattcttttaggaataaccctgaagaaactagtgtccaaattttactttttttttattggttgttccttcattcaggccctgtattgccatgtgcctcatccaagacttccaatgtattatacattcttaggagagtccttaaagtggactgtcatgccttaatacagctgttgtctccaagtgtggttcctcaaattagcagaattagcatcacctgggaatttgttaggaatgcaaattcccagacctgctttagactgattccctcgaaaactgtgggaatggagttggacagtttgtgttttagcaagccctccagatgattctgatacacactaaagtttgagaactgtggcttagtaaatgttaaaagttcaaggtagcatgatcctgcagatcagtcacatagcattaattattagccttgtaagcccacctcctttttggtcactgaatttgattggttcactgagactaggctataaagttattttctatattgattgccacatattgactttaggttgtttatatttctctgaacctgtcagtgtaatgatttgccaggacacttaataggaacagactgatcttttttttttttttctttctttgcatccatggctttctgagtcacaggtgcctggcttctatccttctggataaatctttctaggcaccaggcgtggcactcatgttctgttaatgagggagctgtcactgttggatcacaggggaccctccaggagtatttagttcaccccgatttggtttacaggttgggaaattgatcccccatgaggttctgcttttcttgcacgggtgcagttcatttgtgttcaggacagggtttcaggacttctgactccctctgctgcaccaagattcctgtagagggaggacagagctgtggcttgctctgtgcctgcaggacattcctttcctactatgaggttgcctttttttttttttttaagaaaaaagcaaatagaaaaaaaagtcaggaagttctcattgaaactaataaaagtgtctaaagagaataaaaaaatcagtttgagaactttggtatggaggaaataacctgacattaactgttttaattatagttgttgcattgggcttatcagtgtgggaagagggagcatttgagccctacagggaagtgggatatggacaacaagatgaccctgttcctgcatatgcctgttcggactacaacctagtgactgcttgtgtgatcccaacagctgtcatggagatggggctggattcagtaaagccctgcagtgtcatagctagtgctagggtggaatgccccaggaagtggtctctcaagctccttggccttcactttccaatatgtgggtataataatacctgttctgcccagcttgagaagaaaaatgtcatagtagggagcagcatattactgtgttcagaggatggactctctcatgagatccagactccctaggttcaaatcttggctctttaactcacggttgtgacaataagtaggtcactcatgctttctgtggaaatgagtttaatgaaattaactacttcatagggttgtggggaagatttaattagtctgtgtaagtgctttaaacagtattgttgtgtgttaactattgttgttactagttttaaaaaacattattaccttaacagatgagctttttataaactttcatcagtttgatgttgataacagtagtgggcaagcaaagggttctcatgcagtaattgttagtagaggagttgttctgatatctagcttgtgcatgggccctgctgtgagaagagctggtatcccccagaagggcagacctagagcctctgattttgtaatttattcatagagtgatatgcacagaggaaactcagaaccagggccttcttgattttgctttcaggtatttttacatgaaccatcctaggagatgaatatctttataatcttccagaaaatgtttcatggatttccactttggttttttttgtttgacaaggtttctttctgtcttgcctttctaattgttactaggattcttgataagcattttggtgatgaaaattctaactctaaaagctaaatgatcaaggtattgtaactatctagcaaacaaatggcagcctttgggtagacttcctcctctttcggctgaaactcaatgaaagtttctactattgctgtttatttctgagcagtctcttttgggagggaattaggatggtgaagtgcctttttactacaggaatgaggattcaagaattcgagaattattattttatttatatatatataaaattaacttttcattttctttactttgatatcccccctcgtctccaagctctattcatggtctgtttcccatctttgtgtgagccccttgaagttagttagagattatgttttatttatttctctatgttttctatttccgccttttcttctggatcctaatacagtatctgctacacattggtggtggtggtttagttgctaagtcatgtccgactcttgcgaccccatggactgtagcccaccaggctcctctgtccataggattttccaggcaagaataccggagtggattgccatttccttctccaggggatcttcctgacccaagaatcgaactcaggtctcaggcattgcacattaggctcttaaatatagtttattgaatgaatatcattgatgttcctatttacttcttgaagtggcatgttttgaaacttaatgtgaaggcttaagtaattcattgatatcgtggtgacctagtatctacggtcttcctgaatattcgtcgatgaatccttacattgcttatcagaagtatccaaatcccaagatgcttgtggtatattgtgggttggatagaataactttaattctcttagtatcattgggaaagggatgtagtagcctagagagatagaagcacagagaattaagaatgccattcaggaccacagagcagttattatgggaagagactcttgggataagcttttctatgaccccagaagccaaaagataaaaagatgccctgaattggttgtttctttaatgtctaagggttatgattagtgacttatttctaatgtgcatttgtttttatttttagcattgcagtgtcgggatggctatgagccttgtgtaaatgaaggaatatgtgttacctaccacaacggtacaggatactgcaagtaagtttttctcttttttttttttttccattttcatatatcttatttttcctcagtaggaaattgggtaaaatttggttctaccatcctatacttaatactgctgtgaaatgttactggttcactaactttcctgatgtagttttttggaagatgaggatttggatgtcagataaatggttaataagaacttactgtcttacccttatctttttcatcatgataaaggctttcagtgagtagctcatgtgtgtgtatgtgtgcttagtcatgtctgactctttgtgaccctttggactgtagcccaccaagcccctctgtccatgggattttccaggcaagagtactggagtgggttgccttttcctcctctaggagatcttcctgacccaaggatcaaacccatgtctcctgtgtctcttgcattgcaggcagattctttacccactgaaccatcagggaagcccagagagtatattctttaacatttttcagtttaatcgttaagaaatctttcagttaagaaaatttcagttttcagattagaatcgattctcaatgtgttagctctgatcttgtttttaagttagaccaaatgcatgttaactttaattctgcctaccataggtaaatattatagccatgtaacactttttttcccccgaatgtaaaatatccaattctgaaggagagtctgtgagagaagaaaatacacacatgcctgtagggatggagtagggagcagcggctgtgggtgaaggtcattatatggatttaaaagaataagggttagggttaggaaatggcagcccactgcagtatttcttgcctggaaaattccatggacagaggagcctggcgggctacagttcatggggttgcaaagagtcggacatagctgagcatgcacacactagccacactagagatgaattaggatgaggaataggtctagggagtagaggccagttctcaatagtgtttcttttcttcctgtctaatcgtgaagtgtagccatactttttgtttgaggaagcctgtgaggtattcttttaaattgcttctctggatttcctatggataacttcccccgcttatacctcaattgaaaatttttgataggaacatgtatccattctatttccttaatagaaaataagatttggtaatatgacatttatcttctttaatattttttttggggtgtatttgttttttactttggtagaagtatgtgcttgataagcattttaagtgattttatctaacatagttttgtttcttttctggatatttagctgaataacttaactgtaataattacatttgttccaatcaagtctattctgacattgcgatttaagttctttaatgttatgaacaagaatttttccaagtcagaaaaaattttcttcaccaaagtgaaaatattttaagctgtgatgacagtaaagcttaacaataggttatttggattggaataaagataacattggaaatgaaattttttatgtagctcattataggctgttcacttagtttttctagctgggaaaaaaatccaaccaaaaacatgtgatgtagtctcctctaagaatggaaacacaactggagataataaggagaggaacttaatacgttagaattggccactgaaatcttgtttagtctctttttggcatctggtgtcttagttacttgcttcattctattatttagctatcttgtggtagttaacccattatattatgatcatttgttgataatatttgtttctcccactagagtatgagaggtcctggtcttgtgcattttcagtctagtatgtagctagtgcccaacaatatgtttcttgaatcaaaaaatgctcaataggtattatcattcacttatttatttatttattgaaggataattgctttacagaattttgttgttgtctgtcaaacctcaaaatgaatcagccataggtatacatatgtcccctcccttttgaacctcccttccatctcccacccccatcccacccctctagattgatacagagcccctgtttgagttttctgagccatacagcaaattcccattggctatctattttacatatggtaatgtaagtttctatgttactcttttcatacatctcacatgtttttaaatgtatttgtcttaaataagtagagactggacctttcctcagaattttgtttgcttcatgtagtgttcaggatgtcggtaccatacagagaggcaatttagttctatttagagataattcaacttggtgacttatgtaaggagaatttcaagtacgttccaagtgttagcctacatatttgtggtctgacatggggagagaagattctagaggagactaaactctgagcatataccaggaatggacactaagggtcattttgggagagaaaacagatctgtgagtctcaggctctccaaccaaggtgagagacacaaagttgcccccagttttcggaagaagcattgctaggaaacaggggactcactttgtgattgacagaaatggagctgccagaattctgttgctgaatacttgctaattattgatggtgtggattgcttatggatatgggtctagacatagttcctagacatccctcaaatggcttccaatcctgttgtgagggaaacaatcttctagtgaaaagcagagtaaggggaaaaataggtaaggccatcttctggggagaccagtgtggataaccaagcttataaaaagtgattgtttctctacttcagtaaaagtaatattagcaacttcgggagtagaagaatcaacataagtggacgcaggaatgcaagaacagtgtcaggggtgcctggtcacccgtctgcagtggcaccccagccaccatccacagaatgctaagcaaaatttaaataaaaataacattcacttagcagacctttcggtatagcttcaccaccttttatttttttcccctagggaaagaagttactcctgcttgctcagtaaatattattttcacaaaatggtatatgaatattagaacatgtagaagatttataaaaatcgcatttataaaaatcatatcagatatataggacttaatgactgtctttttattcatgagattgcttagtggattaaggaaagagagctgaggccaaacttcttttactggggtgagtggcttggagttaatggaaaatgttttaaagtagaaggcaactgactgtctctttaaagagcgtaatgttactgacttagctaaattataatggttgtttatggaaattatagaaatccttgataagatcacactgacagatgaggacaagtactcttaaaggttagttttgtatacagctcaactgtttttttctaactgttaagtattcttgtcagtctgtgattagattgggagctaggcaagaagaacctgtgtaatcttgcaaaaaactcaattattgctcctaaatagttgttgtcagctcttaataaagccctctctcactacacagaggtaagatatttcattctctcccttgtcctactgggaggtgtaaatatataattaagtttggctgtcattaatcactttcaagttgttttctcaggctttcaaatataaaccactccaaatcccactttgattaaaactcatgggcaactcaagttcactagagtgttgggggtgggtgaggttacaatttgcaaaattcacaaaatgtgtatttttaaggacacagtatagttatttaatgtccttgtctgccagtttttaacatatgggttgtctttgggtgtgtttccatcaatagctctttcagttaccttttactttatgtttatggtagttttattgatttttggacattgcaagtgatgcattttaaaatttatcttctactaaagaatgttactggaagatcagttttatgctatggaggcttgtatttaggttctggtatggtgggtctgttttgctcttagtatgatcgtgtgtcttagtcaagacttggaggctggatacagtccttattcccaaagtatgacccttcagtgaattcagtggaaagcaagaggtgtttactacatactggggtgtatctcaagcccctctaatttggtaggacttgaattcaaacctctgacccccaaaaccgtgctcagcttttcagccttccagcgcttgctttctgttgtgttcctcatatcattttgttgtggagttacatgacatgttttttaacatgtctgtttaaaaaactggttctgtctggtccaggatttctcttcctcagttttcagaggaattttgacaattccagatacctttgacttcttagctcttacaggacttcccttcacttgtgcttcatgaactggggaataccttcagggaaaaaggtatataagtgtaggtttcatatatgtagtttgttttttcctttgaggctaatatctcttctagtttctgcctgctttgattgctctctggtactttttaatattttgtctgaagtttataataattgtaaatgagagagttgatctaagttactctgccattacttcattggaaggactgatgctgaagctgaagcttcaatactttggccacttgatgtgaagggcttactcactggaatagaccctgatgctgggaaagattgaaggggacagcagaggatgagatggttacatagcattactgactcaattgacatgaatctgagcaaactctgggagatagtgaaggacaggggaccctggcttgctggagtccatgggcttgcaaaatatcacatacgacttagccactgaacaacaactctgccattatttttaacagtataaaataaaagtttaagagttttcaaagttttctacatatcacttaagaggtaactagcacagtatttttgaaataatagaaagtcaccgtgagttatatagcttctgtgaatggttgattacttttgagaatctctactttttgccaaagtatctaagtagaaacattttaaagtaaattattataaataaaaaatgttataaaacataactgtcacatttcacctaaaatttatctattaatgctaacaaacattaaacttaactaacagttttccttgccaggattaggaaggagtgttggtggtccaggcctccaaaagccatccaagaaaaccagagccattgccttcttcatcctcttgagagaaggaaatagcaacccactccagtattcttgccaggataatcccacggatagaggaacctggtgggctacagtccatggtgttgcaaagagtcggacatgcctgagcaaccaggaatagagatactcaaaatattccagagcctgacttatagtataggatgcatcaccagtgtgttgtggtggtactgccctagaaaggcattttcaagtcatgcctgactcagcattttccactttcactcaccttgctggtgcactcagtgctgttcaggggcagtatcagatcaaagaaaggcactgggaaaatatcaactattaaatcactttctcttttcctgctgaaactggttttgtcagcaaggttccttcaatcttgataaataatatttgaaggcaatagttcaaaattaatgcaaaaattatgattaaagtatgtacatttaaaaaaggatgaaatcagaactgttgattttttttttttttgccccaggctcctgtatggttagtttggctctggtgagtaaagtaacatatttgaaaaagccctgtttggtgacatggaaaggacaagttttcatgtcagatagacgtgaagttaagccccaagcactgtcagtaactagatctttggcaagttaaagagtattatactagctagcatttattgagcatttattacttactagcctctgtgctcagttaagctctttacatgtatttttctagtcctgagcatgctcagtcgctcagttgtgtctgactctgcgaccccatgggctgcagccccccagtcttctctgtccatggaattctccaggcaacaatactggagtgggttgccatttcgtcttccagggaatcttccaggcccagggattgaatctgtgtctcctgtgtgtcctgcattagcaggtagattccttaccactgagtcacatgggaagcctcctcatgtaaggtagataattttaatatccctgttttaccagtgagtatatgaaaactcaggttaaatattttgcccaatatcacataactctttaagtatctgacctgaggtgtgctctttgaaaatgtattgtttctctgagtcttagtttgcttatcagtaaaatgggacaaaattacctattttaaagtggtagtttaaacaggatcttctgaaaaggcagtgtggaacatttgaaagtgcatgaaaggtagcttttcagatcaggattatgattaaaattccatatagtttcctttaaagtagagacctagataggcctgggtagctcataatattgggttggccaaaattttgttagggtttttctgtaccatcttatggaaaaccccatatgaagttttttgccagctgaatacatgggccaggcttggctaatgctgcatttctgagaagtggccttgaccatgagaactcagtgcagttaatgcagatgaaatataagaagagagcactgaaggcgggggtggaggatattgtgtgctaacatgctttttagtagaaaaaattaaacttaaaaccttaaaacttctcccttttttcctaatggaagatgagcaagtccagacagattttatgcagctgtgaaactgagacaggttaaattctaccacttctgataaatgatgctgccatcacaaaaatcacaaattgttaaatgcacagccttatgcttgcagtgtgagttgtagacatatagatgtgtgtcctgtgaggctttctttgtttaggacttggggtctggacctttcaacagaaccatttctaagctgttgttattattaacatttatgtccttgaaaaaatcctttaagaaatatgttgtgtccctgaggaatttttcgtgaggtatgaaaaattgattaatagcttcttatcaatatataacagcagaattcccgtgttctgttcaactgatctttatattctttaggttagaaactttacaaacttcggtgttaggtggagaagtagaaaaagatggttcttaggctctgcttgtatccttttgcctgtcttgggtcattgccagtaagttaaaccaactaatcttggcctgcaaacctggcacaaatagttaggagtttagctaggcttctttcaacacagtccccataacacaggttaaccataatcctaagtaaagtttctttctcattgttccattgtggcatgtcagcaccattaatttcatgtagtaattcctttatcccccttttgttttgactaagcaggatgagaaatatttctctttcatgatctggagtaacttaattaaatccttcatttaaaattttggctatctatcttttatcaaggctagcaagattgaatacaaagggtttgaggaagtcagaatgtgataaaaatgtaattatctaaaaatttccaagtacttttttctctgttaagctagcttaaatgtgtgggtgtgatgaagcttttcattaagcctccttctcagcgtcctgagctaggaattttgtagctaggaatgaagtttagtgtttcctctaccccccatccctctgtgtgtgtgtgtgtgtgtgtgtgtgtgtgtgtgtgtgtgcgcgtgcgcgtgcgcatattatgtgttttgttttcatagttttttagttgttttgttttacatctcactgtcatttatagtttctctggggcgtcccgaagttttctatacgttattcactcatcatccgtaatcttcactagcacttcatcctctgtgtctgaatatgtattactgactctcatagtgatgccttcagtcttctcttattaatgcagctaccttctttttaactgttctcctaaacaatcttctacttggatccagaagaaaaggcctttatggaaagaaagtgaaagcaaagactaataaaggcgttatttaaataacaggtggcattactgaggatacatatccaactggaatgttatatccattttttctttacataagtttgaggagaaagtaggtgttaatgagaaaagaggctgattaaaccttctgtagaatagtagcatttagggcacggagtctatgtggattcaggctacttttcaacaggtactatatgtatagtcctgtatcctcaaccctgaaagtcagactctaaagacactttttaggatcatcactgtttgtcttagccaactcaggctgctatataacaaactgccaaagaccaggtggcctaaccaacagacatttatttctcatagttctggaggctgggaagtccatgatcaaggttctggcttcttcaattccctgtgaggacttcctgctttgtagccagccagcttctcactatatcctcacatggtggtactaatcccctcatgaggaccccgccctcttgacttcatctgctgcgttatttctcaaagtccccagctccaaataacattacattggggatgagggtttcaatataaggattttgaaggggtgcactcagtccatagccctcttcaaagggaagtttaattttcatcaaactggtgtttattggactggctactgtgattaagcactgtgcagggtattgtgatcaaacataaaggctgaggagatctgtgctctctgactttcttattcagaagtagctagacctcaggggtgtctgctaatgagtgttgtgtttcttgcataagacatggtggcagttctctgatgtcttgccatcttattggggagatgaggcatacacatacatacacatatatgtatacatatatacacatacatacatacatacatacatacatacagatatgtaatatatgtatgcatatgaactggagattgagacaagggaacgactgctatggaagactaaaatcagagaatatcttgtggttcacttataatctgagaataaatatgagaatattgactgtgtcttaggaaatggataggcagaaggatggaagtagagagactgaggtgactagaaaaggctgtgtgtgattaactgaaataatcattaccaatattgtcactgttttttccttaatgacatagttttaaaacttttttttttttttttttttacatcgtgggtgttctgtgtctgtacttcagtttgtgtgaggttttgctcaactagcttgtggatttttaatctgtttcacaatgacagctaactgatttgaaaaatcattcctttagcacatgttggcttgaatgcctgagataggctgtctggattaaggcatgaggagggagacccaaggacaaagaagagggggcagttgggagcagtcatctctccttccctccgccttttggccttgactgttgagtcttgtgctgcttccagaacagagtggccaggtaggcttgtggacatcgtttacagggaaagtcagaattcaaaatctctgaggcaagaaagaaacaaagggttaggaggagtgatggaaaaacagagatgtcaggagcaggatcagtcttcatataaggcatagtgcattcttgatctgaggcatcccaacctcagatctcttctgtccagcatatcattgtcctgatccagttcatttcagggatccagcgtaagcaagcatctggttaccccaaattagctcgtgtccttttctgcttgtttcctctgattatatagtacacatccaaaccctcaattatacagaataaaccagggatgcctattctgtgtggaaaacatttaatagtggttatgattcctttgcctagaccatgccagtgacttggccatttaaccccctgtccctttaaaattttgaaatgctggtggttattgtgtaagccagagacatctccttaaggaattattttactgggcaacttgcctcttctgaaatctcactcagcctgaaaagtacctcaggaacctttttgactttaattttcctcttagctgcgtttgtaagtaatatttgtggtgtctcattctctgtctcatgttgttaacactcatggccttgaatttctgggtcactcttaaaaagtggacagaacttgattactaatgaaaagttgactcatttcctcctaggcaaaggctgacactgacaatcagagttcataattagtttttagagaagcatactctctaattatggaacataacctattctttcttaaattttataaagattaatgagagcattatgagttggggaaatgagtaagataggtacttatgctgtgttgagatgatgtataaaaattatgtctggaaaaaggtcctacatgaatttaattaagtggttgattccccgcaagcttaaatttggtacagtctcttcccagacacacacagtcatttttagtcttgtgtgacttgtcagtggatcagaggccataaagggagggactgcagtgtctaccactgttctgtgctgaggaaaacaggctttcatgttggccacatgacttggggaagaggcctttctttcccttttaggctcacggttcctcttaattctccatatcttgtttaaatatatcgctctttctcttttgcttattctttgcttccttatgcttcctgcaaggggttagctgaaagtgtgggttgtgcaacagttcctttatacaagtgtgtattgaattgtctgtgtgcttagaagggtgagagttaggtagcatgaagaatataaaagaagagacgcaggcacagttcttgccccagggagcccctgcttagagtgggttgatggtcaagacatacacaaccactgaccccaagcattaccatcagcaaacatcactgcattctcgggcagtattgctgaagaaactcaaaaaccaaaattgtagagtcatcagactcaggaggtggaagggattttgtcgagcacctttcccactcatcttgttttataagatgaggaacccaaggcttaaagtggccaagtgacttgtcctgtattacataactgatgggaaggtagagtgggactgaaggctgcttctcagcccccattaggtgacctaaagattcagcactttttcttttcattcttggtaccaactctcaagggactgctgttcagggtgagagcagagaaggggaagagggagaaaagcagaattaaaaacaagcaacttagggcttttatgaggcagtttgaaagtcccagaattttaactctagctatatattttatttttttaatattccatgaaacaaaacaaggtggaaattcttttgagttcctcctaaagtaggtctttaatcctcctaaaggatattaatatccacgggggctatagaacatacctaaatggaatcatacaattttagagttaaaggtattattagaggttatttggcctaacatcttgttttaatacatgaggagactgaggctcagagaagtaaagtggctttttcaagattcacacctagtggaagaaccagggcttgatacagaggaaaggtctgtggggagacactcaatcaaaagctctaagaacatgctccagtctttggtgagagtttttgtaaaataatatactagctacatttttattctcattcagataagaaacagactcattacatatctatctacctacctgtcttcaagtatgccctgagtatgtctcacctaccagtagacatgggcttttaaagcagaatgatgcaggagaatgtggccacatcaggtgcagctttgccttgcttccatttaataagtgacgtgcctctcaggatgcatttatcttcactttgtgtgaacttgaatgcgtactttcaggattcttctttgatattcagtttctttggtttggaaggtcacaaatcattgtaataactttagcttaaaaaaattaaaaaaaaaattttttttttgaccctttgagcctgatcccatcttttaagggaagtagtagtttttgtcttgagtcaccatatttttaagtttgtacactctaattcttttccttaatgtctgttctttttgttattattggttctaattatgcagaggtataacaattgacaatgatgattctctgatgattgggttgcctttctgaaattaaacatggttcttaacaagtgctcctaaagtggcagacttctaataaacaaaaaaaagttaacctaaattgcgagcatatgttttgaaggtgtttttagcctctgttcagttcagtcccttagtcatgtctgactctgcgaccccatggactgcagcatgccagacttccctgtccatcacgaactcccaaagcttgctcacactcatgtccatcaagttggtgatgccatccaaccatctcatcctctgttgtccccttctcctcctgccttcaatctttcccagcatcagggtcttttccaaggagtcagttctttgcatcaggtggccaatgtattggagcttcagcatgagttcttccaatgaatattcaggactgatttcctttagggacggattgggactctcctatgtacactttaatattgtcctggccttaaagcaggtatcagtgaacttttttcttaaagtgccagatgataaaggttttaagctttgctggccaagaagcaaagtaaggatatgatgtacatacttatatacctctttaaaacataaccattaaaacatgtaaaagccagttttagcccctgggctggaggtacaaaaacaggtggcctgtagattttgcctagggcagtatttgctgacctttatcttagagtagccatttgaaatgcttcatgtccttggatggcatgagatatggaagaaccattctttgtgctaagctttttttttttaatatacaaaaggaattcttaaatcagctgttgctgaaattagaacaaagaattatatctgaatcttcctatatcagtttttagttgatacgagttttctagttgagatgatctatactggaggtctgcagcaaagccaagatcctgttaaataaagaattttttaaaaaataaataaaaaattacattttttctttgacaataactgttctcttattgtcataagagtaataagtgttgtgagatgtcattaacttcatgagttatcttttgtgtggaaaattttggggggtgattattgtgatgatgatgattttaataattatctttgttctcaaaagcttataatctagaggaaaacagataacaaaccaaatccagtcccagctgtgtagttgttgatagagcatgtttccaagtatagacaccactaggctaagactttcacatgtactaccagcatcagctatgtagtgagggattgaaggttttgctgtttttgttaaagaatgcaagagtacataaaataatgatagcattgtatttttaaaagaaatcatctttatggtatctgaatgtatggtatataaatcttctcattagaccgctgtttagctttgcaagatttccactttgtccctatggaagcataaactttgatttcatacagcagatcaagcatcagttcagttcagttcctcagttgtgtccgactctttgcgaccccatgaactgcagcacgccaggcctccctgtccatcaccaacccctggagttcactcaaactcatgtccatcaagtcagtgatgccatccagccatctcatcctctgtcgtccccttctcctcctgcccctaatccctcccagcatcagagtcttttccaatgagtcaactcttcgcatgaggtggccagagtattggagtttcagctttagcatcagtccttccaaagaacacccaggactgatctccttatgattccaaagctgaggaacaattttttataagtcatgtgagtttgaatatatacaaatataggcagcatttgtaggaaacttttctgtttaattcaactaacatttatgagtgttatgtgtgccagatactaagctaaaaattactttatttggatatgctatctcagtgtttctcaacctttttatctttatcacccccttgccccaaaggagcatttttagagttttttcccctaatctctctaccccaaccccatgcaattttaataccgtagattatgatgtatcagtttatctatcgtagccctttggaagatcattataatatctaaggttttgtttttttttttacccccaagaaccattatttttatgctttgggtcacagccctatcttttatgggaactagtggttttggtcttgaagtaggattcaaggcactgttatttatttcctcatgctgtccattatttttattacctgtggttctagtctaagtaaggccatttaaatgggattttatagtgtttcagggcatttttaaattatatttttctatatattatatatatttcaatatattatattattcattgaatggtcttgcatacctctacatgtgattattacattttttgggagaatgatgtattcagaatctacaaagaaatattttttatttctcttcaaacttatctctcaaagttcgaaaaaattcaggtttttctcctgcctactctcgcattcacgtttggtttgatatgatttgagtacagttatttttcaactaggaatccttttaggccaaactataagcttttggaactttctgccttcagatattttttggacttcagaattttacaggtggtcatttcctcatgttagagaacagaaagcaaacacactcagttttttttctctgaaattttgtttaatttttactgctcagtgtctgaataatctagcagtttatgctactgaggccactttgtaggatgttctatcactcaggatcctggtggtttatggagtcactgttttattaaagattaataaaaccacaagagaaaatgcagactgtgtgtatgtgagagagagagagagagaggaagagagtgttcttatttggggagaaagtatgatttataaagtctactccatataggtttggctgactcactttgaatgatttagaggtaagtgaaggttaaaaagtcctgtatgtatcaggaatcttaattagtattgatagtcctttgggtaaacagctcaacctagtggttcccaaactttgagtataattaaagtcttttgatattgaaaagcagagacattactttgccaacaaaggtctgtctagtcaaggctatggtttttccagtggtcatgtatggatgtgagagttggactgtgaagaaggctgagcgccgaagaattgatgcttttgaactgtggtgttggagaagactcttgagagtcccttggactgcaaggagatccaaccagtccattctgaaggagatcagccctgggtgttctttggaaggaatgatgctaaagctgaaactctggtactttggctacctgatgcgaagagttgactcattggaaaagaccctgatgctgggagggattgggggcaggaggagaaggggacgacagaggatgagatggctggatggcatcactgactcgatggacttgagtttgagtgaactccgggagttggtgatggacagggaggcctgttatgctgtgattcatggggtcgcaaagagtcagacacgactgagcaactgaactgaaggtgtaaggattctataggcccttgcattttgccttttggctttggttaagaatatgagcactgaatagttgaatgtcttctgtacaccagttcctgtattaggcaccatgagtatagtgataataattctcagtctcttggggaagaaataaataatcataagataatgaataatatatgttagggttatgggaatatacagcagggggcatcaagcctatttctcaaaggaaataaaatttgagcggaagcttaaagaaattttaggtcttaactatgagaagagggcagggaaaagtgtttggactgaatgaacagcacgtacaaagttctggaggtgcattagaacatgttctaggaactaaagaacctgagcctagcgagggtgtaaggaatgaagggatgatgttcttgagatgaagccagttctcagtctcttgtttgtatacaatgcataatgtcaatatctactgagaattcagtaaccctttataatgaatgtttccacattttaataactgtaacagcatttacagtccatttcatgtggagaggacattatttaatagtctagaaagtgatttataagcattgcaaactccttgcagtaactgtacaatgtttggggacaactagcttaactcatttgtttttgcctattactctgaagggtgctttttgtaaactcatgtgtttagaatacgtttgccatattttaatcacaagtagatgctttctcagggtccactcagtgaaatacggtaaaggtacagattgtatgctagaagacaggaaagaccaccttctgttatggcagcaacagaagttttccaatgctgtttgtgtgcccttgtccactctttcaagtgatgatggaagaggctaggcactcagttcagcttttgagttctgataaatgagcccagactataaactggaagataagggtgtttgcaaattcttgtgtaaataaagcatggtttccattgcagtggtcactgacttcatagtttctgatgaagacgaacagtgctatgaattaacagttttgaagtgtataccatggcagcttctttctggtttggatttattaaaatcagtgtgtgtttattgctttattcatatggggggtagtgttgaaaaacctaaatgcatggaaaccaagtgaggtggagcttcagaagataattcccagcctcacaattccccgtgaaattcttttcctgtgggaaacttttaatttggaagcattcagcctaatgtgggaaccaagattaacattttctgaaatactacaagaaaagcagaaatgttctgctcaggaagctgaatttacatagtagaaaaatgggctgtcctacagtattttgtagtctttattagttgtggtaaaaaaaaaaaaagtgcgtgtgtatgagagagaggagagagagagagaaagaaaatgagagagaggagggagaaattgattgtatattggtctttgtttcctttacatcaaaccagcaaagccctagaaagtgtgttttaccacagacagcccagcactgagccctaactctgtacatgaatatttttttagttctttttgtttttctttcttgctgagtaagctatagtatttccttttttttgtttttttgttttttttaattttctctttcttttctgggggaagggaggtgagaagggtagtggaatggcaagaagaagtcaacatctcagaactcttccctttctccctctttaccaggaagttagcaagatgtcttcctgaaccttttttttttttttttggtcagtaattagcataacccagtggttacctttacacggagttacagaatcaaaaagctggcagcctgatgagatgttcaacttggaggtactgagaggagggtgacagtgaggttagactagtaggctgggcctcttgaattccaatccgagagtttagacttgattctggagactctcgggcatctaggagcttgtaagccaggaccttgggatataggaacttttaactggttacagttagctttggctgttagcaatcatttttatctactttaacaggggcctggggggcggggagggggcaggaaactaagctggcgttatggtcacaggaaagaacagactgatttgggaccttttcagactgcagacctttgttactgaccaatgcttaatttggtttctggggtttgtaatcttttttccctctgcccttacctcatttaccttaacaacagctcccccctctcgagctcagctagggcaggctgccactgcggattggggggccgagaggcctagagcaagaagaaagtgggttgaaagcagagttctgtttaaagaattttctgctggaaaccagcccagagggagtaaagaggagctttaatgaggagcagctgcagggccgacgcaacccacatgagacatttttcccccctccgttccacattctgtgtagtttttaaaaaatcatgattttgaaatagctgttttgtaaagcacgcctctctttttcttcttctcctgtgtgatggtgttttgctttgttgttttttttgtttaatgaccaaatcctcactaaaagaaagctgaagccagagctgcagagaagccctgggtgccgcttgggctcaccctgctgatacagaacagtctgtggagaaaacaaggagagagaacattggcttttatttggaaaaggggcttatttcctgctcaaactttggtcatcttggagctgacacaagctactacagtattttaagcttttctctagacgagtggctattcacttaggaaacttgaaagaacagtttttttctgtcctgtattactagggagactgatcctgaatcacagccactgctagatagattggaattgctattcaaatcccagcttcgttgaaatctgtaaagtggctacatgtaaacgagtccaggctgctggtgacatgtgagagttggggtctggttttcatctgtttcattgagaggggacttacgggcatccattcagttggcatggtttctagctccattaggaggaatcccctgtttttccctatttccccctcatttctccccttcactttgttccccacgtgtctgtttgaatagtaacagtgaaagagtgggcctcttcgtgtcagacgtggcagactttttcagaaaaatgcctgactgtatggagctgataaagttcagattagtttatgaaattgttttacagggaaaaagcaccctcccacaaaactttccctgtactcaaagcatcctctatgaactatgttatttcagagatccagagccagagaagagaagagactaggaggaagtcactgagaaaactacttaaataagttataaatttcctccagaggagggcattcatatagtttcaggaaccaaatgcaatttttagagggttttttttttggttatatttttagaagatttttttttttaacatacacctttagttcaagatataggctattttccaaaaatggtactggggtgacttaatagaactatagatttgtaagggaacttggataataaagtcaacttgagccatctcgagaagagagctctttaatctcttgttttcagtggagagtcccagttcctactaacagggcatatggcgtactcctattacagttgaacgtggatttgcaaagttgaaagatctcctgtgttaggagatggggtactttatttctggctgtctcacttacccatctctcccttttcttcctatgtccataatttcttcctgtgtccatattcacccctgggctgtgagggatgaccttgaaccccaggatggtttttttggttgccttgtgttctaccaggcagagccccacgtgaggttgagaggggatgttgcaacataggtggtcatggtgttcaagccaacagccccagggtctgaagacttgctcttccccacaaaaatatcagtttgaaagagacacagggaagacctcactatggcttaatgaagaagagccatattggtagaaataatgtagtatataacatggaggacaactactgttagatcagagatgggtgagatggtttggagaaagcttagtaaaggatataggttttgaacagatctttgaaacaaggatagaagaaaggaaaataaattagagacatatcagatggtaaaatgtggtacctctcactggagattagttagaagatttttatataaggaacagtagacctgagtgtggaaataatctggagtgcttaagttatgggtcactaaggagtaggttggatgataggagtagggcagacaaataggccataagaagggctgggcactgaaactagcttctgagcagaaaagtgagtgacatgatcaaaattatacttgagaaggatcattctttaagtagtgtgcttactttcagggagcaattttctccctgaatttaatgaagaggtgtagacagaatgctggtgtaattgcgataatagaactgactgaataggagccaatcttggggtaagactccatagaatactttcagttaagtgatgctttatattttgataaagactaggtaaagatagaagtacagttgtaggtgatccaaaactaggggaaattgctgggtctacagacaaacttgcggcaggtcagtttggtgtccttatcggtacaacagaggttcagaccaattgacttctgagatttggtgcagtgttgaaattctgtgattatatgaataaagtgtaaagttatctaaataaagaaaacttggggtaaagattcagcatgttgaaaggaaagaaattacaggaccaattattgcattcaaaaaacatggtgtactaatacagggtgggctgaatatggcataaaagtagttcatgtggaaaaaaaagtgtgaactttttaactgaatctggattttgtaatttttataaaagtgaacccagctttaagcagcaatagtagaaacaatagtgtccaactctatgctatagtggtaaggacatatgtattatgtgggttcccccccaattttgggtcctatcttttaaagacgtttttggtgaactagaatcatctagttgggggtaggcagatagcccagttttgaagtatgtgggctctggaatcatacttgcatttgagatctgcctctaaaaaatcttcatctagctctgaaatcttcatctttctaagctttaaggtcctcacatacagaatggacataatgctatagcataactgttagagggagtaataaaaacaaaatgcttagcaaatacataatacatagtaagttcttcaaaaatgttggtcacttttattattattactattgttgtctgaagcataggagagccactaaaatggtgaagaagtctggaatagtccaaagcattgaatcctggaaaaagaaaacaaagagaaaacaaaataattacctgtaaattcttgaagggccacatgtaagagaagcttgttcctttttgttctagaggacaggcatagccagaaatggaaattatagggaggcagaattatttttttaaataagatataactcacatactaaaatttttttaattaaaattttttattgaagtatatagttgatttacaatgttgtgttagtttctggtgtacagcaaagtgattcagttatatatatatattaatatatatatatttttttttatcttgtggtttgttataggatattgagtatagttccttgtgccacacagtaggacctattatttgtctatttttatatatagtagtttgtatctacgaactctatactcttaatttatcctttccccactctctttcccttttcatttgttttctacatctgtgagtctgtttctgttttgtaaataagttcatcggtatcatataataaattccacatataagtgatatcatatggtatttgtttttctcaaacttcactcagtatgacaatctctaggtccatctatgttgctgcaaatggcatcatttcctcctcttttatgtgtaacattccatcatgtatgtatatatactacgtcttctttatccattcttctgttggtggacatttaggttgcttcaatgtcttgctgttgtaaatagtgctgctatgaacacagaggtacatatatcttttcgaattacagttttgtctggatatatgccaaggagtaagattgttggatcatattgctcatcatattgctctattattagtgttttaaggaacctccatactgttttccataatggttgcgccaatttacattcccaccaacagtaattcatatactattaaattgacccttttgaaatatacaattcagtggattttagtatatccacagttaagtataactatcagcattatagaatttcaaaacattttcattaccttccagagactctccctattctttagcagtccctctccagttcccctcttcccagctcttggtaacactaatctactttctatctctatagatttgcctgttctgatctttcacaaaaatgaaattatacaatatgtggccttttgtgtttagcttctttcgcttagcatgatattttcaaggtttgatacatatcacagcatgtatcaaatcttcattcctttttatggcaaataatatttcattgtatggatataccacattttatttacccattcatcagctatggatgtttgtgttgtttccacttttgttattataaataatgctactatgaacattctttacaaatttttgcattgatctacattttatcctttttggtatatacatacctaggaaggaaggcagaatttgaagacatcagaaagaaaggctgccggacaatgagatctacccacactgaaggcaattctattgttgaagtagtgagccaatattttatcttacttaacaaatgcatggcatttactatgcactagataactgttctaagtgctttacaattgttttaaaccctacaaggtaggcactgtgattaactttattttacaacaaggaggtttaaaaacttgctcagggtcactctcagagtaaatgagattgaaatccaggtgatctaattctagtgtctgcacttttaatagcagaaagaagataacttcaagtatttattaaattctgtttcttagacatcatacttaattgcttttattcacatagaggctgtgatcatctttcagggatattttagaaagaattatcttttggggtagaaattacattaggatgtcttgaatcccatggttctcttattattatacagtgataaatggaagtggggggggaaagccagcgacaaggtgtctgacctgaggctttttaattgatcagaatttttatcagaaaggagacagtgagtgtctatgataagtactataggaattcagtttaacaagacttcagaacgtagtcataagttatgtataatgtaaaaggattaaccaaaagtaacttttgagatggtgaatggaagccttagaaaaatggagaaattaagtttcatgaaaatatgactgtacttttgaaatgtagtttcaggtattggcaggatatgttagggtaagtagatgacttttagtaaactgaccggatgaaactggcgcttgataaacgaaggtagttgctttaaactaaatgaacaacaaccaaaataacaaatgcataagggaggaaagagcagtccaacccagacttaaacttcaagtggccataaattgatggggaggaagaagaagattccagaatctaaattaagaatttgcccggctttgaagtacagagggagtcatagaagccaaatgtaaaccggttagagtgatggaggtatggccagcaatgcttcctctaagaacttccttatgaagaaatctcaggtgagaccactgaactggacaagggaaaggtcattgctcttaggacatgttttctggccaataagaagaatgcaagttttactgcaaaggaacaaataagatgggaaagaaagggaaaatagctgtgaaattaggctatagttatagaagtttgtttgtgaaggaagtatttagaaagggaaatgaggcttagtgaaaaatgtagattaaaagagacttgtacatgttttaaggtaaaagaataggctgatgtctagctatctagaacattttaaataagaaagtctttattattatatcagaagtgagtctagtttcccataaaaataagttgtgtttctatagatggatttcaggagaataactcagttgtacatcctgtcttagtattatctcatttagagtaagaccctgactccttctttgcagtggcctaaagtctcctcatgatctgcctcctacttgtaactgtaatctcttttctgctactctttcttaatccctttggtggaaccacagaggtcttctggctattcctcaaccatgctaggactgttccctattaaggggctttgcatttgctcttctctctgcctttaacatgctttccctagatacctcctgagctatctcttccctcatttagctcttgactcaaatgtgcctctcagtgagactgtctgcttttcctatttctaactgaaacacctcatttatctacctctgttatccccaattcattcccttcctatgcctctttcttgttttattgtttttcatagcacttaactccacgtagaaaattatagatttcatttattaattttgctttttgtcttctcctactagaatttaaactctgtgagttcaagaattttcctagctctagaacagtgcctgatacttaataggcacttagtaactgttgcatgaatgaacgagtgtaatattctttgtggaagctgatatgaaaatatgttcttcatcatcatcattattaataagcattttggatgctatatatagaattctgctgctgctaagttgcttcagttgtgtccgactctgtgcgaccccatagatggcagcccaccaggctcctctgtccatgggattctccaggcaagaatactggagtgggttgccattttcttctccagtatatagaattagccttcatatattctgttattcaggagttggcaaactttttctgttaagcatcagatataaatactttttggagccatatggtttcatcacaactactccaccctgttattataatgcaaaagtagccatagacggtccctgtatgaatgagtatgattgtgttccaacaagagtccatgtgtggacactgaaatctgaatttcgcatacttttcattgggcttccctggtggctcagaggttaaagcgtctgcctgccatgtgggagacctgggttcgacccctgggtcgggaagatcccctggagaaggaaatggcaacccactacagtactcttgcctggagaatcccatgggcggaggagccgggtgggctacagtccacggggtcgcaaagagtcggacaccactgagcaacttcactttcactttcactttcaaatgtcataaaatattattttcttttgattttccccccaactattaaaaaatgtaaaaatcatttatagctctcaggccataaaaaagaacaagcaatggaccaaagcagactcacaagcggtagttgtcacctctatttttactggtttcttaaacatatcttagttgaaacatttttcctttagtggtaggaagcaacaatgtagattaaaccttagtaacagataacttgggaatacttttgtttggctccagaatcttgtctggtggctcagatggtaaaaagactacctgcagtgtgggagacccaggttcgatccctaggtcaggaagatcccctggagaaggctatggcaccccactccagtactcttgcctggaaaatcccatggacggaggagcctggcaggctgcagtccatggggtcgcaaagagtcggacacgactgagcgacttcactttactttagaatcttccatattgcttcatttttgtttcttgggaaccttatgctttcgttatgtttatgaagctaatatttaagggaatttgtgttctctgagcagatgccacatgatagtgttggggaggtggtgatgatggtagcaaagcttgggcaaagcccacccaggcttaaaagtttgtcattatttataaggtaaataattcccatatgggagaatcagaagttgtcagccaagcttaatgcccagaggactgttaccgtgaatgagaattgtgttgcagttttaacatcatccataacagatttcttaaataagttgcaaatgcttttaataatatggttaattttagctatcctacattggcaatttttgctgctttactaaaaaaataattagaaaataacctattctattataaaatcaagctgtgatatgaataaagcattatattttcctcagtaagtgcaaagagagaaaaaaatgtttttcatttgcaaaacttaaaaaaatatttataaagtttttcacatactttgttcagttcttacaagagactcatgatggaggtagctttattaactatttaaaatgtgaaagagctgatagtgaaattatttattcaaggtcgtaccaccaggactccagataggccttctgatgataggaggtggatactcctcactggaaacttcagccatgcttggtttcagtgctgtgcccttccctcactgcctctcattctctagctttatctgttcccaaggatgctcagagctctagctgctcctggttctgctgtgcttgctgtacagagctctgagaaaagactgaggaggctgggactctccatcactgccactgaagctacttactagcgctctttcctcttccgttcttagtccccagattattagtccccactagaccattctgtctggtcctccttctttcctcaaaactatgacctctaaagaccttatgtggtcaaccagtgactactaaacattgtggacaggttggcaaagacaagaaggaatgaaacagaaccccagggctcaaagtctgagtggttgggagagtcaagacacagtgactgagcttcggaggatgcaaaaggagctggttttgagggggagaatttagtttggtttaaatgtattatcttcaaggtaatggtggaacagccttgtagttagttttctatcctccaaaaagtctaatggagaaataggttgaaccaagtatctggggcgacagccaagtggcaaaatttatagttagaatcaaagactttttgttccttttaaatgcttcttagagatcctgtttatcattatgaaaatagagactttctatgccttttttatggtgtttggagaaaactcttataaatattacacacattttgggatggttgtgcatcttacaaatcagtggtggcatgtaaaaagatttctcaatatgtgggaaatgttgtagactgttgttcttgaattgttttcccttcttcactttggtgtttgtgtgctaccttacatatttttaatgttattttaatgttatgctttgcttttttggttaggaaagctgcttgctactaatatctttgcagatttaagtttctgaaaagtctcttgaattcttccccattcctgtacctccttttcctttgtcacagtcttgaccccttgaacatgatccagaagtctagatatgggccaactgatgtctcagtggaaataagaaaaacttattattccttagtgcttaattgaagccacccgatattttacagattttaaatttgagagggtaaggggatcagtccatgcattatcatgcgtgtcttaactctatcaattgacttagtcaaaaggagaaagttactgaatttgaagacaagtctccacgatgctgcacaaaacagtgctgttaccgcctaccagcctgcgcctacatgaaaaaggctatggttgcattttgcctctgaataaggatcaaggtcaaaaagacatgagagtatgtggttaagtactaaacacttcgcctaaagtgagacagtcttatagattgtgccttcaggtttctcaattcacagtccagtattttcttgaaagaactgcattatcttgtaagtttgtggacttataagaagtccacgttttcatggactcctctcttttccatacagatgtccagagggcttcttgggagaatattgtcagcatcgagacccctgtgagaagaaccgttgccagaatggtgggacgtgtgtggcccaggctatgttggggaaagccatgtgccgatgtgccctgggcttcacgggcgaggactgccagcactccactactcacccctgcttcgtgtctcagccctgcctgaatggaggcacctgccacgtgcttagccgggacacctatgagtgcacctgccaagtcggttttacaggtaaccagtgggactcaggcccacattttcctgttctcagcaggtacttccatttagtgtcttttagatactatcacctggtcctttagggtctccctctatagtacatgtttatcattatgggaaggaactggaatgttccagtcagctatccttaacttccttttgaaaggggagaaagagaaagcaaaagggtcaaatactccgcagtggctgactgaagtgtatatatcaggactggggatcataattactgccctgtcactgggagaaaagttgttagtgttactggtaacttatttcttaaaaactcctctccccagacgttcagggcactggcttttctggttttctaaacaggttgtttcttttgcttctctgttgtcttgtccttgtcctcatgcatttaatttttgttcttggaactctgttttgagccttcttttgagccatatgacagctttccccagggaatctcgctctctccagtttcctcagctgtcatcatcttcatcccctgctgatgactctcacgatcatcctttttgcttcacactgacactgacattcaggctcgtatttctaactatctattgcatattatccttggaaattcaacaggtacctgaaactcaacatgtcgatgtagatagtgacaccagtgtaccctccaaataccctaagctagaaactccctctcatttatctgtaccccatgtggactcaggcatgcattttaatctgagttacttctcacctgtctactcccctccatttccccttctgctctgtagttgacattcatgtcctttctcacctggactcctgcagttgtttcctaattggtttcctcacctttactttctccccatcttgtttacctgtcacattgccacatctttaattatacatgcaaatcttctcacagacttatctgcttaccatgcctagtgacttttcatcatctgcagagtaaactgcagactcttttacttggctttcacagcccttcacagtctaggccttgcgtctttttatagcctcacctccccacaacatctcgctttagtgacgccagcgttctcatcatttcctgaaaatgtcatacttcctgttgcctccatgctattgcatacccctttgctggaatgcccttttctacatttggagattgcctaatgttattgtaacctctcagtgaccctctcatgattcctttacacagttagtctctgtgttctattattttatgtgtcatagtttgttgtaattaatttttacgtgtttctcatctgactgtattagttcttcacaggtgggtctgagctttattcaaaatgaaccataagtgtttattaacttcgttgtgaaaaggagaactattcactgttttgtcctccagtatatcaacaattctgtaaatctaattagaaaatgaaaaacacactcagaaaactagactgattcattcagtttggaatgcttgttctattggcttttcattaaaaggtgttacagttatatctccatcatgactgtgacagcattgatactgtgagtcactgaagagatttggtggttgagagaataatttttcctgattgtcagtttcaagttgttttgctccacaaggcaagggagggcatatccacttaaaagattttaatcctgactagtggaaacggcagtgataccttcttcataattaaaacgttattctgaaataaccctcaaattaaagtggattccttggtatcaaaaagatctcttcttggtggtcctcagggtgctaatcatctttatacatctgccacttccatctaccactttaggaaccaccacaggtcaagcttacccttttagtttagggatagctcactaccctacctcatcagaccttatgagctcacatcactcagatgaaaaaaacagaggcagaaggttagtgcttgtacaaaacatatatgggaaaccaaggtcagcaaccttcttgtttcagttggaggcaaatactctgaaatacactgttggcagaagtaaccatttttatctgttctccactgtaagtactctcagtagaacaaaggaaaatagaaaaatgaaagttccttcactctgtcttccctgaagtatacatgctgtacctggatttttgtttcaccttttccctttgatttgatattcctggtagacagagagtacttttgcgtacttatgtgtcacctttctcccttttagagaatctgtcatgactcttacttgcttttctacggggaggtggggtcaaagatttggatgtttacctagacaaccaattggagtattaatacattcaggggattctcagatctttagttttgaaaaaactcgaactcatgaaaatagaaagccatgagaataccaaatttactagtagcataggactattttttcccctctctctctctacctcagataatctgttttgattccttgagatcgaatactgtcttcctgattctttctagtgctttcctacctgagagagtccacaagaattgcctttctagatctttattcttatgacagcttctagtttttttttcatgcttaagaagccagagattcttcatcctcttcaaacacatccagcactatttttgtcaagaccacaattaacaaaatgtttcccggaatacgtgtgcgtgtgtgttgtgtttaagggaagcagaagtcattttgacttgtttttatcatctaagaggtctgtttagtcacagtgtattgtggaaaatatcagtacactttattttcattcaaaagacatgatttgagagcctactctagggatcggagccctgctcgtgtgacaggtgacaataaaagaaaacagcaaactttggggtatgtgtttgcacgcgtaggggtgtgtgtttgagggaaagggagcgggtgggggtttgggtccctgagtcgagcattaaggatgagtttatggcagtggtgacttatgagtagagttgtcaagacagtggagcccactgggtgaacaacaaggaagacagccttccaaacagaggagtatcttaggcagaaacagaggtgtgagacactaggtggatccagacccttctgtgctgcagggattcttgtagctgcctgtgattcacctacagtcactcctgtgcttcactgagtctttgtgtctcagctaagggccctggagagtgctcctgtccgatgaacttggggaggctctgatatgggctcctgtacagttcagagagcttagggattctccatgcaatggccttaacgtcgcctgttgggtgggagatgtggggtgggatggggctgacacccatttctgtgggcagtgcttacttctgttatctttcctgtaggtaaactgtgccagtggactgatgcctgcctgtcccacccctgtgcaaatggaagtacctgtaccactgtggccaaccagttctcctgcacatgcctcgcaggcttcacagggcagaaatgtgaggctgatgtcaatgagtgtgacattccaggactgtgccagcacggcggcacctgcctcaacctcccaggctcctatcagtgccagtgcccccagggcttcacaggccagcactgcgacagcccctacgtgccctgtgcaccctccccctgtgtcaacggagggacctgccggcaggctggtgacttcacctttgagtgcagctgccttccaggtaaggagtccccctggcgtcctggcttgggggtgcacctccagcgggaaggaaggggatggggtgtggttcagcgttccttgaggaagtgtccttccccgcacggaaaaggggaagtgagactgttgtgtggggtggtttgctggtgagagaggagttttatgggcccagtgtggtccataaactgagcagggggtaattcaacatgtcagagtttatgatgatgagtgacttggaaattgtttattgtcctctttggaggaacagtgagaaataagagaaacagagctctgggaaaggatttataagtctatagaatggaaaggaacataaggagaattagacattgaaaaatttatatgtgtgattaataaaatgcttcaaactgaattgatagtaataataaatgatcaactttcttatatgcttttacctctgatggaataatggattattttactagttacctgatttcacccccctactcttttatagtttttcttgaaattctggtctttagaaccctctctaactttggggtagccctacccagacttgaagctgaagccttttgcagctggcgtggtggtagtgctctgttaacgagtgagcactttttgatgaggactgatagattatgtatggcacaacgacatataacccaagatggaagcaaaagaggagtaatgtgtgggaacttggggcccattgttccataggatggaaaaaggagcaaggctggccagttcactaaactccttataaaactgatgaggaggccaaaaactgagaattttgattgagaacagagcacaagtggctggagcagatgaattactaagcaacaaagattctgtttttatacaaatatccttagtgcaaaaacaaaagagtgaaaaactgtagggggaataacatgctgagtaagcagaattgcctcaaaaagctgttctagccactcttggagtaggaatcttagattctggtgttgtggatatgcgtcacatgtagtgggatcgtgtgttctcttttgaggattaaaggtcatacattggtcttcaggataaaagcaaatggtaatttattcatttcattcagttaaaattttttggctgccagctatgttctaggcaccatcctgtgtacttggaatacacaatacaagacactgccacctaatagaaaaagataccacttaaccataagccacaaaaacaaactgtttaattgccttgctttcagtttctctttcagtgaagagtagatactgctgtcattttagacacgaaatatttatttacctaatattactgtcatccacattatcttgtagaaggaataactaaaaggtatctttcttcactcctgcttttgtttgcattttaagggttaaaagaaggaaacagaaatgtaaacaatttaattttgtgaatattctaatagtctggtattctaatagcctaagtggctagtaattgaggttagtgcgatttattgctgaccactaaacgtgtcttttagtttcaagaaaattagttttaatagttgcctaggacaggaggttgatttggcagcagagtactaacgggaagttagagaagtcaataaaggaagtttttagctgggagagagtgattattcactcccatagcctctgcattgttatccattagccacgataagaaccttagggaattctgagagtgtgtccaggaaaggatctgtcaaaccagaatagtatctcctccttgagaaaggaaataaccagggattccacagctagaggctgccagggctggtgggatggagtaaggacgtcttggctgtctcttatacttaaagcaagactttttttttcctttaatatactgatgaagtgtgtgtatgtgtgtgtgtttgggattgggatgggggtgcaaggctgggggcagaagatttggcaaagagcaaactaacatttatttaatgccttttataagtcaggcactgtgccaggtacttctgcagccattagctctagtacacaaaatcgttggggataggtattattgttcaagttttcccaggtgaaacaactcaagttttgagatgtgaagcagtttacccaaagttgtacagatgacatgtggttaggccgagtcctgaaatccaggcaggttgttgccaaatgttaactgcttgtctgcccctgaaggtactttgaaatgtcttaagactttttgttaaatgtttagggatgtatgggttaaaaaaagtaggttcatgttaaaataaaaaagacatacttctaattatgatcgatagtatttgttatatgccaccctgtgtatgggcttgcccaggtagcacagtagtacaaaatttgcctgccaataaagaagacacaagagatgcaggtttgatcccctggagtaggaaatggcaacctgctccagcattcttgcctggaaaattccatggacaagcgagcctagtgggctacagtctatgaggttgcaaagagtcggatatgactgagtgactgagcacatgcctacaggctgcatatggcatcatgcagatatctaaaaatagtaaagtaggctagttgctgcctttcagggtctcatgatctgagacagatgatgtcagcttggacaatatatagaaggaaattaaaaaagaattaaaaacaatagatgatgcaataacactgtgaataaatatgtatttataaaatgtgtaagattttatgctcattgtttttatgtcccaggtggagtttgaaaagtattaactttatttccacatagggaaatatgtctggagatgattttcttttacagagtcctttttataaggaaatactattctcctgtccctcctgcattgcccccaacactagtcaagagactaaaatgttacttaaaatagcaatcactatctcaatgtaaatagcacccttatttgaagagaatcattatttccattctaaagatggagaaaccaagccagtgacaggtaaagtcacttttgtccaggttctgcaattctcagatggttgcttcccaccacatttcaaatcttggcagttttaactgaggcctgccctaatcaccctatttcagattgtaacctttcccttccgccttcatctctggccttggcgtaccttttcttttttggtaacgcttgtcatcttactgtgtaattttcactatataatttacctcattatgtctattgtttatagtctgtctttccaaattcttctgcctcttctcctctccagagtaaaagctaggatctctgtttttgtttggtgatgtatcccaagcagctggaaaccgtggcaggtatataatagacacacgccttctgactttacaggccgagtttagtgtagtacggtagtactgagagcataactttggtcttattttcttcctggtaacatacctgctagacttggtctagcttctccttctgcactggtttacactagtactgagtaaaaagaattggaattcttttcaactctaaaactcagtgaaccccacataagttagtgattatatttgaatggttatgatatagttcttttcctgcaaagggcacagtagttactgagatgattttagtattattttaagattgatgggggaattaaaactgtaaatatgactcatcctgagtaataaagaaagaaatgtttctcaatagaaggaagaaaaaaggaatatattcaagagggagctgatagaatgaaaccaaggaactgtatttcatcttttccttggttcagcaactgttaataacccagatccttccattaggtaaagcttttagcagaaactgtaaggaggagtactcagctagaataattttagctaaagaacaaaatagaagatacatacttgaatcactgactcccagtattttggggtttatgagttaagctgattgtatgcctgtggatatgttaagaagtagcagtgtgctgtttgcatctcctggctttgcctgcgagttcacagttggactggacaatccctgatgggctttccctttttctttatctcctgtacctccttattcctttatgatttttaaacttcataaaaagctgcccaatctgttctctccaaacaaagaaggtttatcctttgtaaatcacccctatactttacaggcttgattatatgtaatatccctatatcattaaaataaagcttagccacattctgtggcttttgtgtctgctctgcagttgctgagcttaaaaactcttagaaataattccctcttgcattctcatatgcacaaggcatgtgacgttctctggggtattatactaatcatattctggcagatttctctggagcagatgcagaaattatcataccgttttgcagggcgcattcttttagcccctttagtttgggccctgagtccagtttttcttgatgttcctacaagtttttcgtatcctcccatgcttgacagttttgcccctgctatctcctaagccttctatcacttacctccccctctcaccctgcctttttgtatagaatttattcctggtgatatgccaaaggcatctatttcactgaaatgccttctgtattccccacccctggggggactagagacgttcttaagatctttcacaacctatgtacctctagcacaacacttaattaaactgcctgttcatcctttctagtagatattctcatcttaactacccgccccagtatccaacctcgtgcctggcacaaattgagactcagtgaatatttgacaaatgaatgaattggatgtgatagagaagagcattcctacattctgtaattaaataaaaaagtttagaaattatttcttttgaatccctttactcatttctctgacttcttaggaggtaaagttagaaaggaaagtagagctcatttgggagatacagagggaggtggctaggaacagcagcctgggtgggtgatggggctaaaattcacgggccacccatggggtcagtgagctcactggagcccattcagaggatggatggagtgtgccagggaaaccagtgggatggaattggaaccaatttgctcttttaacaggcttctttccagaaagcagggagagaaggtagcctgtagctgtttacctttggtgcctttgtccagttccaggtatccctgggttttcttcactctcttatccctgggcatggaagctcttcctaaggaccttcagcctggcctgggagaatcccagttgtgtcatctcagcttccccctttctgctctcctctttgagcctctgcaccaagtctttccactgtcatgcctcctagggactaaaagtgaaaagatatggaagcactcttgagagatgctgctatctgtgtgggatgacaagttcaaaagacacttttctgctccccaccctccctgtcatcgtttatcagttatgtggttttagaacagcatggtcttaaaaatgttccttccgagtttaatttctttctttctggccttttaaggatgtgagttggcttcgggcagcagactccttttagtacagtcatgtgagcctttccataagtcagctacacccatcccacccacaggtctggagacttgtctgcttccctttcccttaaaaccttcgaacattttaaagaagtgattgcactgtaacttattcatttaagccacatccatcctctgcacccccttacccctacgctgggtagactttttataagaatttgctagttatttccaaaaagagacctgtatctgtatttttaaagcataaatcctgtcttaattttcagggagaactgattcggctagagttttctcagatatgggaacttttgacccaaggtcagtttttcagatttttggaagagaactttggggtcccagagaccatactgaccaaatctaggtaaagtttctggtttaggactgactcctgcctcctagccatgtacagtaagtcagccatgtggcccttcttcatctgtaacataaaaggattagagtagataatctctaagagatgctttgatcccattgatatataatagtattagctaatatgtataaaacacagtgcatcaggcattgttttaagtgcttttccttctaatataacagttttattgagatacaattttcataccatgtaattttcttttaaagcacactattcagtgattttgagtatatttacagatatgtgtaaccattaccacaataaattttagctcatttttatatgacttcaaaagaaactttgttcccgttagcagtcactccctaacctgtcctccaccccacccccaccccgtaccaattccctcccagcactaggcaattactcatctactctctctatagagctgtctattctggacatttcatataaatgggaacacatagtatgcttcttgtttatgcattatattccattatatggatttaccactttgtatttatccattcatcacgaaatagacatttgggctgcttctgcttttttttgacaattaagaataatgttgctctgaacattcttgtacaaggttttgaatgggcatacattttcatttctttttggttttacttatgagaggaattgctgggtggtatggtaaccctatttaatcttttcaggactgccagactataccccatagtggctgcactattttattaatacattccaaccagcagtgtatatgctatgctatgctaagtcacttcagtcgtgtccgactctgtgcgaccccatagacggcagcccactaggctcccctgtccctgggattctccaggcaagaacactggaatgggttgccatttccttctccaatgcatgaaagtgaaaagggaaagtgaggtcgctcagtcgtgtccgactcttagcgaccccatgggctgcagcctactaggctcctccatccatgggattttccaggcaagtactggagtagggtgccattgccttctctgagcagtgtataaggattcccaatttctctattacctcaccagcacttgttgctatctgtctttaaaattatagctattctagtgggtgtgaagtgatagcttattgtggtcatgatttgcattttcctgattgctgatgctgagcatcttttcatgtgcttattggccttttgtatatcttccttggagaaatgtctatttagctcctttacccattttataactggattatttgtattattatattatggatgttgtattttaattttgttgtaagaattctttgtatctcctagatatatgatttgcaaatattttctccctttctgtggactgtctttttactttcttgattggcgttctttgaaacccaggtggtttcagttttgattaattccaaactgtcagttttttcttttgtgacttgtgcttttggtcatgtgtaagacatctctatctagcccaaatctcatttcctcctatgttttatcctgagaatcttatcattttaactcatacatttcttagttcatttttgtttatgggatgaggaaggaatccaactttattcttttgcatctagatattcagttgttccagcacaatttattaaattgtttttgtttttttttctgtctaactcatctaatcgttaaaacaacctttcaggtaggtcctgttaattagtccagagaggaaagtttaactattaagcatatataatgtcttgcccatgttcactcagctactgcatgaaaagtgtgagaattgaatctaggcagtttaacccagaggccatacttcaaccatgaattaactctttcacctatttgcctttctgcctaaataactacatagtgacaggtaagaactatctcaaaaatagtgatgaaaagaaaacattttatttcttatatgttatggttatgttgaaatgtttctgctttcttaatttgtctgtggttggtgaattctgttcattgtaacactggctaatataaattcaaatagtttggctacaaaggtttcatcacctccttgacaccttagccaaccatatttagccttggtcaccagggagatcaagttgggatggccagtatcaattctaggacaccaccaaaccacacgggtttctaacagtggtgggccaggacccatttctctcccacattctgaaagtatccaacttttccaaagaatgtttccatttaagagcactagactagaaacagggacttcagttgttgttcagggacggtactttgcagatctatagatttgctctcactttatcataattttgggtgggcttaagcagttcagcatttactgactcaatccatttgaaggactgtcatatgattaaacagatatgagtgcgtgctaagtcacttcattcatgtccaactctttgtgaccctgttgactgtaacctgcgaggcttctctatccatgggactttccgggcaggagtactggagtgggttgccatttccttctccaggtgatctttccaaccctgggatcaaaccctcatctcttatgtctcctgcactggcaggcgggtactttaccactaacaccacctgggaagcccagaagatatttgagaaatatgattaatttttttaaaatctgagtctatacattttttcatagtctttctcaagcttacttaatgactcatctgcttgcatggacttcttaccaaatacccagagaaatagaattctcttcagtcaagcatccaattatctctgtcttctacaaagtgatttcctttggtctctgggtaatttttttggttacttggttcatactcatgtacatgactgcaactgtattcagagaaaccagctatgttccagtgtaacggagcagatgtagaacaccacagtagcttgtgctaaggaatgaagaaagcaaggcgtgattgatgtctgcccactcaccggactgcagtgtcctgaaagcaggaactccttcttttacttaactataccagtgccagtataagacccaatatgtgttttgagtaaaagagagaaacttaagggacattctgaagaggtgaaatacttagtatttcaaataagagaatgttcagtaaacttcctctcttgtcttaaagctgatagtcttccattttaatagttaagagatttggtagctaggaaagagaaagaaaaaagcccaatgtataaattatataggacttccctggtggctcagatggtaaagcatctgcctacaatgcgggagacccaggttcaattgctgggtcggggagatctcttggagaaggatatggcaacccactccagtattcttgcctggaaaatcccatggacagagaggctacagtccatgggtcacaaagagtcggacatgactaaatgacttcactcactcataaattatataggggaacatgctatgtgcaattaggatgaagtttgatgtgctagtttcatttttcataaacgggaaaaatcaagaggaaggaagcagtgctagaagtgtgaaaaggaggatgaacaataagagctggcaagtttggttagtaataatggcaccccatattcagatggctttttatatttatattgtgttgtccttacgatgtggcacttataacaacctcaaaagacaggctgggcaggtgcagccagacttattttacaggtgaggaagctactttagagcttgtaattaccaagtattaaatggcttataagcagtgaggttagaacttgacccttatcttcagactttcagttcagtatttttttgtctccctattctcccccatgattttcccaagaaaaaaacaaaaaggaatttaaatttaattaggtaatcttttatttgttcttcccattaatctagcatggagctggggaaaatctaataccctttttttttagaaccagctgtcctgagtagacatttatcttcactgggattttatttcatgaaaacactttgaaattcttgtgaggtaactatgaaggcatgtcattggcataatgattcatgttaagaaaagacagaagattgggggatttttatatggtgagtcttgggttgaccatctgctgtctgttgaactgtaataatgaagtcagtctgttctgatgaccatgtcctgtggagaagaacagatcgcatcatctctatgagaatgtatcatttcttttaatccttctcttactaggttttgaaggagtcacctgtgagcggaatatagatgactgtcctaaccacaagtgtcagaatggaggggtttgtgtggatggggtcaatacctacaactgccgctgtccccctcagtggacaggtatgtatggtgtgacaaaccattcagaatggggcgtgggtcagtaagcagaggcaggttgttattgaagtgggccccttttacaacagtgtctgtgctacatcattggatatagtgctaactgcatacgtccccctgtgttcacttaaagaaatattctcacggacatttattgggcagatgttctgaactcagtaccatgctaagtgctgtaggacagctgtccctcacctttctggcaccagagactggaagatctctggtggaagttttttccatgaaccagaagtgggagaaggatggtttggggatgattcaagtgtattacgtttattgtgcactttatttctattattattacatcagctccacctcacatttttagagattagatcttggaggttggggaccctactgtagaaaataggaaaaagaacattactgaaagactctgaagttattatctggcaaagcaacacactgcctggaacatagtagatgcttattaaatatctgagaggaaaagaacattgttaaatgcaaaaatataaatattcttaccatatacaaataaaaaaggttaactgtgtgagataatggatgtgttaactgatcttattttggtaatcatttcacattaaacatatctatcaaatcatcatgtatatactgcttaaacttacacatatgttatatgttaaatatagctcaataaggctggaaaaggaaaagaaactacaacttgtcaagtttcagtgtagtatcaatgaatattctaaattatatgaaaagattattagaatactcttccttctgctcttctgttatcaagctaaaaaaaaacctgaaaataagttgtacagacggggaaagttcagagcttattgtctgtacacagatatctatctcatcttattgttatgacaaaattatgcagaaggttgggcaggtcctcttgaagacattatttttatgacacctgtctacatttctgtattttcctttttttgtatctttttgcacatagattcttctgcctctaacattagaagagtagatttgcttaaactgacaaccatttggaagtttataatgttgtcttcttttcttatttttgaaattgagtctgtatagacatttagttccagtttctgtttgtatgtatttatctaactgaaaatggagacaagtaagaactgattaagcaattaagaactgggccttttggagagaagttgtttgatttaatatggaaacccaagagcaagctaatgttattaggaagaagctatagtaccagcaaaggattgcgtccagcaaagaagtccagatcttatattgctgttgtttttacctgatattcttcagcatctccaagttgccttccctcatctaaagcagctaattatttagagtactctttagagctgtagcctatgaatagaaaaagactaaaaggatttagaactccagtaacatgatttcctggaagggcttttctgcttttaatccccaaactgtctgtttaaaaaaatactttcccactgggtttccctaaagttggacttcccctagaatttcttcttggtatcttaatcctaggacttcactcccaacactctggtcttgctgtcatattctctcttctcttcagattctgccatttctgtggtggtttccccccccccccataggccattttttttttcaacttaaaaagattactctgtgatgacctaatgggagggaaatccaaaagagaggggtttatatatatatatatatatatctgattcactttgctgtagggcagaaactaatatactatactccaataaaaattaattaaaaataaatagaaaagattactgtaaatttaattatgtgacaaatagtaaccggaaatatttaatttttctctttttaatgatcctcccagaagtattaggcaggatgagatacatgttaggaacttgacctcactctaagtctctcccttgccctgtgggagagagttgctctgtgtggtaccaaggctcctgatgctgatgaagattaaatgataattgtgatttcattgttgatttttctttgataccacaaatgccctttgagttcctgctttggtattaattaggaaagctcaatcttggggaaaggtttcccagtgaaattacattttaccaaaatttcttcccccaggttgtttaatagataccttttttccctatgaaagtccttaaaagatgtttcttgtttcatgtatttttgtatttttttagaggggatggcagagatgataaatatgattggtgtgtcattatttatttcttttgacctgctgtcatataaggtacgcttatagtctttggtttcctaccagtttccttcctcttttcactgatgccagtctttgatttccagttgacaaccttgttttttgtttgtaccacatcctatgtcttcgctcgcaccgtttcctttttaatactcatttatttattcgcttttgcctgggctgggcctttgttgctgcatgggctttcctctagttgcgacgagtgggatctactctctagttacagtgcacagacttttcattgcagtggtttctcttgttatggagcacagactctagggtgtgtgggtgccatagttgcaacttccaggctctggagcactggctcaatagttgtggcacacgggcttggttgctgtgtgggcatgtgggatcttcccggaccagggatcgaactgggtctcctgcattttggcaaacagattctttaccagtgagccaccagggaagccccacaccacttcttatctctagatttccttctccactcctttccctatagtcctcaccagttttgcctgccaggagcagatcaaatggttaccttcttcaggaagccccccatgccctatctctaggctaagctaagtgttacctcctgggctgccttactaccccctacatttctctgtgataatgctcactgcattaatattggcattattctaggcttgaggtaatggaatggggtcattgaactgttgatgacagcagatactagagctctttacagatctttgctgtcagtagcatatagctgagttcctcattatcccagccccaacatcattctgagaagagtagaaaaattggggattgtagggttcctatttatattggtattagagctataaataaattcacataagtattttctgctttgtcaaaattaaagaaattaatgtggctaggggctgagagttaactgatgcttattagcacctaaataatgtgctgattgcaatattttattttgtgtaatctttgcagtaactgtatgaaggatagagttttggctattctttttacagatgataatagatattcagaagggttaaacaatttactcatggcttataatggttggattagggtttgaatctaggcttgttgaactctaagtctgtgctcaaatctatggtcttttttttttttttttaaactacagattgactgactctgtgagttatctttaaaaatatttttattaagggctttgagtcttttttaatggattgaacatttaattcatagttttattattctaggtaggatattctgatttgttctttctgtgtgtgtgtgtttctggttacttagagattggaagttaatattaagtaaatgttttatatttaatctggtggttttttcattatatttcaaaggcttattgcaactttgttcagaattccttttacagttttcagctgcagagttgaggtatgaactgtttgtctggcttttgacaaaattgagaaggaagggttggagccagctaagagaggaaatttagttgccagctatctggaaaaaaaaagaaaaaaggttggaattgtgtagttaaaaaaacttaggtatcagtttgaagtaaatggagatttgggaattggccacatttttaatgagaagagcctgataggtaccatgttattttaataagttgacctacaaaggcagttttgatctttcgtagcaagttctagacttcaagatgaccaggaattttttccaagtcgactcatggtttgatttggaataaatgagtcatgttgcctttcttcagaaacttttatttactgttcacagaactgctatctcttagtttcttattgaggtactgggaaaacaaatggtgcagttaaaaagctttttgagtttttcatttatttagcagacagttatcacgtaagtcatttcaggtccatgctgtttgatatggtagccactagccacaccttgccattgagtatctgaaatctgactggtccagactgagaagtacctcaactgtaaaacacttgattttgaagactcagtatgaaaagtaaaatgtctcactaataatgttttaaatattgattagatgctaaaatgataatgtttcacatacattgttagataaaatataatatttaaattaattttaccttgttttcctttaagtcctaccagaaaattttaaatgacatctgtatctctagggatagttctatttgacagcattcctttgatgcagggaggttttatgtagaagcatcctctttgatcctgagtggcagagggaaggacatgaaactatcctcaaggggcccttgtattggcctcactatggggaaagtatgttggtttccacatcaggtgtggacagaactgtgtccaagctctgtccagagcgcttttacctgacgtgttgtctagaatagtactaattagtacctacaaaggttactactgttccagacaacctaaagtccaggtggaagaaagaaattgatgttgggagttgggcaaatggtttactttttaaaataggaatctggttatagaggtaagtcagcagttagatgtttctttaggaagtagaagtttacctaagaatttgatgaagcctgagcaccagtatctatactgttaccgcatttggctccaagccatcttacgagagcagttctgctctggcagatatccatttaagaaaatataaaaggcccccaaattaatcgaagccatgtagactaatgttttgtctacataggttgttattcgaattttcctttaaaggttcatttccttcagaattaaaattgactctaaactcaactcacgaattcctctctggcagcttttggttttgggttcactcctagggcagacgtgatttattttcctgtgcttgttattaacccagaaatgtgatttcaacttgggcttggaatcgtgctttgggacactaagcagaagtgaacaatggaagttaggtggacacgagtcaaataaaaccgaccacattttctctcgcctctcctttatggcatgatgagcctgaagtgttagttaagattccctttgctgtcagttgctccaacttcagcaaaaaacttttggcatgaatcagaaagtatacatactgccagagatggtgtctgggaatggagtcttttcatgctatatttttatttagaaatcagtgctccaaagctgttctccagaataaggcttttctccaaactagttttctgtgtttttaatactatagaataaatggagctttttggttgagagtggaaactaagtatatcagggattgcagacatttttttcatttgtattctgcatggaggaatggaaaaatgcatctcccattacaatttttctgctgtcaacttgattgtggggacttgaaattaagcctggtttttggaattctgcttcccctcccaatttcagtgtgctatcagttgggcagactgccaagagtgttaacctgaggcactttcatcccagaggtctcagagctgattaatagtcatgttagtgggaacagggctgagtagttactataacccaacacaaaatgcagggggtgacactgaggaatcttttctgtcttcatgtccatgactcactgtctgacttttgctcgatcccagaaaagatccagtttttacttcatgttataaggtagcttcaataacagatatttgttgaataactaacagttatatccagtacactatgctagatgctatgagtgagtgaagtcgcacagtcgtgtccgactctttgtgaccccatggactgtatcctatcaggctcctctgtccatgggattttccaggcaataatactggagtggattgccatttccttctccaggggatcttcccgacccagggctataagagacacgaagaagaaataaatcaattcctctctttgataaatggtcacattcactaggaagaaataagaaagtctacacatagccacaagagaagttaacaggtaggagtgatcatgagtttgaaagaagcatggataggacttgtggaccatctgagtacttggctgggttagggggaagattgagaagagctaacatctatttttaaatgtgagtaatgggagaatatggagacctttgacagagataaggaaataggctagagatgatgatgagtttgaggtgagttttccaagtgaaaatgttcagcagtaagacctaggcaatcaaaatagaggtaggggttagagattgagacttttgagtcttatttttggttgcctgggaagtctgtaaggaaagtgtgtgggctgagaagaccagagggtttggacctgtttggatcttaagtctacacttcagaagtgaggaaaaggatctaaagaaggaaggtgagagaagggaggactgagagttcagaagaagctctgccattatagcatcactgagtcaggagtgcatttcaagactatgcctttgactcaactctatatgcctctgttatagcacctgcaatgttacaccgatcttacttattaatatacttaactcacataatacactcttagcctctagagaattaggaacctgtcttacttattttggcatatctaagaccaagtttaacaaatgatgataattgaaagaatggcaaccaggagactcaaatattaatgttaattgcagagttagtcagaaattttgaggcctttagaaatcttctacaatggagtttccctgtaaaggagagaagaaagccagattgcaagaggttagagagaaacgtgggtgttgaaggaggagtaaagggagaagtggaatagatcacttactcaaattttgtagggataaaaaaggggagggagaaagagagagaggagtactgtgcagtagcttcaggggacagagacttcattcatgtgaccaaccctagaaccttggctagactaagagttaaggcagctaggaggggttggttaatgaagtaggttatttaggagtgctttactcttgccagggctttcctagtggctcagacagtaaagaatccacttgcaatgcaggagaccctgggttcaatccctgggtcaggaagagcccctggagaaggggatggctacccactccagtattccttcctggagaatcccactgacagaggagcctggtgggctgcagtccatggggtcacaaagagtcaaacatgactgaggaactaacactttcacttttcactttactcttttgagttttagtgggaaaaattaggtgaactggttgttgggaatgggaaagaagagtgattgaaagttatagtcagagagtggaagtaccgatttgggatcttggagttggaacaatgagtatcttctaatgagatctggaacgtgagtctgtttgtgataatgagtagatgtggaggtctgtagagttgaggaaagtgagaactcttggcttaggtgaccttattggtcctcaacccagatgttgatttcatgggagatgggagagcaaagaatgagaagataaaccatgtgtttaaataattcaaggacatagaaattagtccttgaagacagtagaggtgaaatgatttgaattatatatcatgtttactcagttgcttcagtcttgtgaccctatggactgtagcctaccaggctcctctgtccgtgggttctccaggaagaatactggaatgggttgccatgccctcttccaggggctcctcccaacctggagattgaactcacaatgcatattctgcgtcccctgcgttgcatgtgggttctttacccactgagctacctgggaagcccatatagtgtttagtgctttttagattttaaaaggtgtacatgtttagaatacttttgatttgaatccatctttctgcttttctctatccaaaatgaaactatatcctcttttgtaaggtaaggaatgagcatacttttacttcttttaatcttctcttaactctccggattttgttataggatctgggattttaaaatttatattatagtattattattactcaaacttaaagtcttactcatgttctttaacatgactgctattcatactgttttaaaattccgtttataagactttagacttagttatatgtgtaatttgttctgtgttaactggtagtgcatttatatcacaaccttcttacagagctcatgaatatttgaaaaatattttttaacgtagttaccttcgtacacaaatggcatcatgtatagatattgaactcttgggtcacgaattatattatgaagttcctagacattattcctttgcttcttgtagtgagcattacagagaagtccagtgtcttccgagttattctgtctccctctctttctatctctcttcctcctttaaaatcagaactttaaccaatattagtataggcatgtttcctgtcattttttttcctagtctttttttgagttctttggctctgcaaacttaggttcagtctcatctcagaaaagattgtttctcatttgttttttgtgtctttaggaatacctttacactaggtcttcattcttccccagagctaaaatcttttctctcgatattttaatcttttttcctttgcatttcataagagcttcttaagctttttttttttgcataactgatttgtttttcttctttgtcagctctattgtttatagttgccaattctgatttgtgtttgaactgcattcttattttctgataatatttactcattctgtctaggtcctctctatttttgcctttctctcagcctgccccattttatcagagcgtcttaatttcttttgaaagattgtataaactgtatacagacactgcatgtgtataagattcttgagaatatagaaccaattctttctgtgacgtactcatttcaggaagtgtgtatttttcacttgtatgcttttcatctacatttcacttggtatatctacatctttcatattgcaaatgttctaatgaacaccaggttgctgtttgtttgtttggcttactcattctgctcattagtaatgccttgccataaatagagtagtctgattctctttggaatccctggtatagttagtttttgcttccagggaggtgaggggctctgtctgtaaaccgttaacaacccagcagcccaaagaggtgggagagagccagagtgtgtgtttttcctcctggcaggaatgcaaaagcctagcaccatttttttatctgggtagagaagcttctgtgccaggtgtccgttctccgtacagtggctgagcctgattgctctttggtgctgttgcatctggaatttgctccaaaagtaccacagacttttttgatgctatagagaccacaggagccctgggactcctcagtgctttaaattgctattgacctggaatggtgggatggagttcagtccattcttcccacaggagcagggtgggctttttgaaacacaaattggatcatgttatttctttgcttgaaatgattcagtgggtcccctttgtctttggatagagttccaaggctctgcacataactacctgtccaaccttatctccactgatatgtgccttataattaaaccacagtgggctttttcattgcctcaggtgagccatattttaccttctattcaaacttgtacacatacacttcctcctgcctgaagtaccccacaccattctcctacgttcctacacaaactggttaacatgtagagtctttgtctctctctctctttcaacagtaatttatgatttattcagctgtaatgtacttattctgactttaaggtgccatcacatggcatacttttgggttcattccagagattcctgaggtcactccttatttatctctgtcattttatagatttgtgcagtctctggcactcaggagtcatctgggtttggaagacatagcattgaaccaatggataaaaaaagaacttcagaaacagttgaagcaggaggacattgtgatcttagaatatcaatacatatgctgctattactgttaatatttggatgataaactcttgtaaatgcaactttaggtggtttgaaggtggaatctgtaggaatatgaattttcaaaacacacacaaaaatactgccttgatgcaggctgccattaggccataatcttggcttaatcttcccccacttgacctgcaggacatagttcttctgtgttctcttgctctgttgtcctcaggcaacatgtatgtattactgcacttctcaccctctgttataattatttgataggttgtaaaaccctcttttgtctgtatattctgggtagaatccacaactgcttgtttaccagtttgtataggtcaggcctggcacataatttatacatatttgttcagtgaatgaatggagcattaaattttctcattgttctggcccaacatcatgcctccaaattcagggctatccctgggtcctttcagggtctcttctccttacttccctgagatatattagtatctttctttatcgtggaccaggtctgtgctgtctgtaaatctggactaattttatatgagaggattacatttgactatcattgtaagcactcatcacagtgtctagtacctagaaatagctgaataagtctatttttactatttgaagtcagtagcaccactaggaaataaaagagtggctctttgcctgtttaccttcatgcagatggaggcaactggaagaggagggttgcttgcctactgggatggagtctttagggaaatcttaagtttcaattgaagaagtaaggtactccaacaatgtagagtcacctcgagacatagttgagggattaaggtcaaaaggccagataaatttggtgtggtataaacgagatggagtctagcagctaaggaagagagtggaatgagagacgtgtatattgatggggggatgtagataaggggatgatgaaaactttggcagtatgagtagaatagagacaccttgttctactaggaataggagtcaaaagatgactgttgagtttagaatgatctgagtgagggggaaaagagcaaataaaatttgtttaaacaaatattttgattacttctcaagaaatactattagcaaggcactatgctaagtgctaagggttcactgatgaagtaaatggtaccacccatttctccatggaacttggagcatgtgtctagcatatgtttagtgaggaacccaggcagaaagcatgtgattatctataagagtttgaactgtaatgaatatctagtgggaaaagtagaggttatttggagaacatattaacaggcagaactatctgagtttggagtcagcatgtactgtctttcagctgtggacagtgggtatgaattattaggggatcattgagcctaaaatgctccaggtgcagcgtcctgggcaaagacccatagtaggtgaagattgtgatcatgttgagaaatgatgaaaaagccagagtgcccagcactagtcatatttcaaggggaaagactggagtggtaggcataaaatgtagaaaagatttagaattttatcctaagagtaatggcttgcctcagagggtttgaaaaggcaaatggcacaatccattatccatggtgaggtcaagttggtgatctttagatactgtattgatcatgatgcagggaaaccaggcttttgaggagtctggcaaagatgatggtgtccagggttagcaggaacattcactgagattcttgcatttatctgcctgtgtatctcctatgcctatcatacctacaggatcttgttagacacttgttgcctcagcctcacaggcacatttgtgtgcttgcacgttagtgcatgcacacagtctctcatcaggcagatcctgtagactccagtgtttgtgcaaaatgtttcaaccatctttagccctgggaggttgaagaatagtcaagcttgtcctctgccctttcacttcaggagaggaatagaaaatctcctgtgtgtagaggagaaggtttgtaggacagagattaaaagaatgccctgctatgataggaagagatgaaactccacacctcaggagcctgagcgactgctggctgggaggatatattggagaccagactctcttgatttaaccaaagaagaggaggtagagggtcagggcaagggtcagccaagctcattttttacatgttgttcatatggtgactgttgcaaatgagaactgacccttaacagggccactgatgtggtaaaagtttttcccacacacttcacacttgagagatgactaggaagggccagggcttcttccaaaagtgctaaggctcagtgatcatttcttttctttcctttccgcccttcctcctcttgtttcccagtcacttgtaactcaagtcagattgatgttttgtttgtggtgtcttgagaaaaccgtagtgagctgtctgtatcgtcatgtgttgcagctcataaactggtgtcttgtgtagcggtcctcagttcacatggccagaacttgatgctagtgaggctcaggtcagtttccacttcagtacagtcctgttgggttcactctattttctgccacacatgctgctcctaatcttactcattcatcctttgcttttaagaccatagatggcggcagtaagaaaagatcattatgaaagtgaccccactcctacaaaatcaatatagtgtactcttttttcttgttttccttttataaaatttattttttgattgaagtatagtacatttacaattttgtgttaatttctgctgtacagcgaagtgttacagttgtacatatatatacattcttttctaaattctttctcattatggtttatcataggataattgaatacagtccctgtattatagtagaaccttgttttatatccatcctgtatataatagtttgcatctgttaaccccagactcccttccccacccgcctttcctttgtcaatcacaagtcccactcctggccacatattcagagaaaccataatttgaaaagatacatgcaccccagtgctcattgcagtactatttactatacctaagttctctgtgtctgcaagtctatttctgttttgtaagtaggttgatttgtgtcttatttataattaaagtgtagttgacctacaatatcattttggtttcaggtgtagagcacagcaattcagttatgtatgtgtatacacacacacacacacacacatatgtacatattcctcttcagattctcttcccttataggttattacaaaatattgagtgcagttctttgtgccatacagtaggtccttgacatcactaattattagagaaatacaagtcaggactatagtgaggtaccacttcacaccagtcagaatagtcattataaaaagtccacaaataataaatgctggggagggtatggaggaaaaggaacctcctgtactgttggtaggaatgtaaattggtacagccgctgtggaagagagtatggaggttccttaaagaactgaaactagagctaccatatgagccagcagtcccactcctggccacatattcagagaaaccataatttgaaaagatacacgctccccagtgctcattgcagtactatttactacacccaagacatggaagcagcttcaatgtccatcagcagaggaatggataaagaagatggggcacaggcatccagtgggctgttactcagccataaggaaggaagaaataatgccatgtgcagcaacacaggtggacctggagattagcatagtcagccagacagttgttgttcagtcacttggtcgtgtctgactctttgcgaccccatggactgcagcacgccaggcttccctgtccctcaccatctcccggagcttgctcaaactcatgtccatggagttggtgatgccatccaatcgcctcatcctcttggccccttctcctcctcccctcaagctttcccagcatcagggtcttttccagtaagttggctcttcatgtcaggtgaccagagaaaggcaaatatcatatatatcaattatatgtagaatctaaaaaagtatgaatgaacttatttgtagaacagatatagaaaacaaacttatgtttaccaaaggggaaagggggatgggggagatataaattagcaggttgggattaacatacacacactcctatatacaaaatagcatgcttgtttttctaatggtgggttagtagtattgtctgtagttgaagtactgcttagatgttttgctcttcctatacatttctcaatcctgttcttccctcaagatagttttgaaggctaacttgaaatgttgtgatcacacactgcagtgttccttttcagcactcgctttccacttttaagtttgtctgtttctttttataaaaaagttacttatttgtttttggctgtgcttggtctttgtcgctgctggctgttctctagttgcagcgtgtgggcttctcattgtcctggcttctctggttcagagcacagattctgcggcacgtgggcttcaggagttgtggccggtggactcagtcgttgcggttcccagtctctagagcacgtgtccagtagttgcggtgcacaggcttagttgctctgcagcacgtgagatcctcccggaccagaggttgaacctctgcctcctacactggcacggtgattctttaccactgagccctcagggaagcccgagtctgtccatttctaattctttttctaactagctgtgtaaacgtggataagtcactatacctctctggtcctagttttgtttgcaaaatgagcacattagattgaatccaaggactgtttcatcactgatgccaagtgtctggtacagcggctgatatataaactgaggtgaatgaccaacagaattcgtgctttcatggaacttttagtctaacagagactgtaaaatataaatgaatataaaattacaccatttgataaatgacaagatggactgatcagaatagatgcaatgaaggagaaaaaagaggaaatgtgagcttgaagatctgcccaagttatgaagaaggtcaaggtggtggtggtggtttagtcacaaagtcgtgtctgactcttgcaacgccatggactgtagcccgctaggctcctctgtccatgggattctccaggcaaggatactggagtgggttgccatttccttctccaggggatcttcccaacccaagaattgaacctggttctcctgcattgcaggcagatggtttatcaactgagctatgagggaaggctgaaggtcaaggtatgagaagttaattaaccatataagtaagaggaagaatatttaaggtggagagggcaggctatgcagaggctctgaggtaggaaagaacttgtttaaggaaccaacaataagccatgtggctagaataaaatatatgaaggaaagatagacttgagatacatttaggaggcaaaagctatcacccagagagttatcagtatatactagtggctctgagtgtttaaggtggcgctaacagtaaagaacccacctaccaattcaggagacataagagatgtgggtttaagggacacaggttcgatctgggtcaggtcctccctggaggaggaaagggcaactcgctccagtattccttgcctggaaaaatcccatggacagcggagtctggtgggctacagtccatgaagtcgcaaagagttggatacgactgagcgacttagcatgctaaatgtttaaggtgtcagccttcataccaagttagtccaggtttatatggcagtagagaaagtagtttctagaaacaagttatttcctttctagtaggagatggttaaaacctaacagcccactgccttaatcccaatgttagataccagtagcctgcaataactggcagatgaaattagtaagagggataattgatgccttcacaaacttgcccaaccgagctttgtgcaacttattttgggagttcaccatcaaggtttgtgtgctggcacaatgatggtacatgctgagacttgtttggattgaaggtgtagtggccaggtagggcatggaaagaacgcagctctgtcttttcaccaggggcttttatgtgctaggtagctagctcctaacttagtgctttctccttttctcccaactaacacaaagtcatttgcttttagttcacgttatattctactgacagactaatgttcatatgcagatttgatcatatcttctctcacctgtgagcctgcaataattctcctttgtcatatcaagttcaaaattcatataagaattcagagcctcaaatgatctccagccttttcttgttttaaacccatctcaagaatatactccagtccctttgatatgttcaagatctaagcccacaaacctgagtgaaccttcttcctccagcccaggcagatgcttttttgccatggagtagtgggaaaagctgaatgcacccaacctgtctagaatatcaccaagaaactttactgtttcaatatttagtgactttttttctttgtcagtttctaccaagggtcttcttttcttgactcatgcttccatcccttttaggtgtgctttaagaccctagaatcagggacttagcctgtaggtcttattgatcagacccagagttggataattaactctgctgtagtggaaagaacagtagttttagagtcaaactgatctgggtttgaatgacagtgtctctgacttaccagtttttggctctgggcaggggtggtagggtcggtggttacttaacctttctgagcctcatgtttcttatttttaggcttttgcattggttttctcctttgccaagagggaggtgacatgaaagaagtgcagtatgttagtagactttccattgggaattttggaacaagcaattttgcggtaccctggtcactgttctaacattccaaatgtaataactggttgctggaattggaatgaggaaaaaattctggcataaatatgcctgggaggggttttgttttgttctggagaaatatgcccgaaccttagaggaaaatgatccattctataaaagattacgtataagccaggattcttttgactctccagatttgatttctctaacagtatctgacagcaaacacaaaacgccttaggtatttgaccttcaaaaatcaatctcattggaaaaatagtcagctgtactcaaaaaatacatttgacttttggatagtaatttgaagtcataagtttttccactaatccgatcatatgagtcatgattttaatcctcccctcccccagcctgtctccttcctcatgcctctgtgtgcttgggaagactgagatgcagagaggttgtttggatgtggtgagattcacaccttaagtctttgtccaggattttagagtcagcagctctagttcagatcccagccctcctgtaccccccgcctcatgacaggtgagttgtcacctctctgagcacgtttcctcaatgagacagtgatcccaacacctcaagcccagtacgtggttcacagtaagccattagtgactcttgatttcctttcccaagagtacaaaatttttattccaaacattatttcgttaacctagtctgtctcactataatatttaagtgtctgggtgttatataatgtatatgaaatatatatgagattttaaaaatacacagtgtcttgtactcagaattatcatggaaccaataagaaaaacaacttccaaatttctcacaagcagcaagtcttgatggtagcataggtattttgagttagcattagtgtaagagacaagactctgaggaattccaaggttggagaaactcttcacctgcttcttggttatgttttcatttctatatcccacctgcatcttaacgacacatctgccattactctgaggtagcatttctgccagaaaagtaagggagcaaagctttctatactgacatcatctaccctggaggaaatgattgctcctgcacttcctctctccctctgtactagtaaatgctgtcggatgcaacagagagatccccatctcaaattagggaaacctgctggaagggacatctttcagactggctgtgctcgtaaataggcttagaaagagccagtctttgtgaacagctgaagctagtaacttgaatgtccccggattctgtttttcttttttgtgcacttctgttcattagtatcacaccatgtgtagactggtcacatttttcttttagtccatgtggcaaagggtccctagtccaaaagtttggaacagagacacagtgacagagcttgtatcagatgtccatcctagatcagggaggtgtgatcatgggaatacgtggtggctccttcaggtattatatggatgaagtggagggagaagagcagcatagaaggaggggccctgagcacagagttccggagttgcccacacattgccatcttaggcagtgggatcttagctgggaatacgaaaaatgctcctgaactgagtttgcttgcagcccagtgatgggagatggatgtacaatcaaagtgcaatagaatgatgttggttctgtaataatggatgcattggttaaataggagtaaagaataggtggtcagttaggttggctcagacacagaagcccctgttggcaatgatggctgcacagttgggcactttgcagactttgaaagtccttgagccagctgacttattatctggggactaggtatagccctggcgttttctaagtatgaatgccctgtgctttatcgttaagaggcctctgcatcagagtgcctctttgaattattcagtgagctttttacaaagaaagaattaaggatatcttgagggttttgtcatgttctgttttagagagttcatatgatctgaatattcattccctttggtagtttcttaaacctattgaaagacaacttattataagacagattcatcaacttgttttacaaccaggtaacctggcatttaactgctggtcaattacaaatcggttgcttttaagtagcttaaaaataactcctattccctgtcatgaggccggagagtgtttgccacagtccctatcctttgctgttgcggtgacctgtggtatatccattggtggtctcatgtttatcatcctttagtttgcttcctcaggcagaacaagctgatccttttccatcttctgctgcatgaggtcagctttctacatcttattccacgactccatctttggctccagtttcttcatcttggctttgcgtttcacatttatattctaccaaggcttttattgtccttaactgcttgatttttctctctgccctttgttgctcttgcatatattttttaattaaagcttctattttgagatcattgtagttttgcagaaatttataagtattaacagaggaatactgtttacctttaaccaagtcttccccaatggtaacatcgtcacttgcaagactaatatctaatatcataatcagaatattgacattgatatagtcaagatacaaaatggtagccttaacattttgatttttaaggttgcttctcatccttactcatctcttagacccttctctccttgctcttctcacattcattgtcctgggaatttaaccaaatctgatttaaggctcttacaagactcaattttctctctggtaggctggctagacttcatgctgtcagagtttctagggatagaacttgccttccctaaattatctgcctagaatttggatgtctctctctgctctgctaagtcacttcagtcgtgtccgactctgtgtgaccccatagacggcagcccaccaggctcccccgtccctgggattctccaggcaagaacactggggtgggttgccatttccttctccagtgcatgaaagtgaaaagtgaaagggaagtctctcagtcgtgtccaactcttcgcaaccccacggactgcagccttccaggctcctccgtccatgggatttcccaggcaagagtactggagtggggtgccatcgccttgtccgttggatgtctctaggtggccttaaaagtcatgtgagaaccgggtttgtctgtgagttaattttgccataagttcacgcaggtcacatgagggtgaagaacgtgtgggggttggtatggtactaatcctctgagactcagagccctaaacaaagacacttttccccccaaaggacagttctgcacagaggatgtggatgagtgcctgctgcaacccaatgcctgtcagaacgggggcacctgtaccaaccgcaacgggggctacggctgtgtatgtgtgaatggctggagtggggacgactgcagtgagaatatcgacgactgtgccttcgcctcctgcaccccaggctccacctgcatcgaccgtgtagcttccttctcttgtatgtgcccagaaggaaaggcaggtaaggctggcagaagaacagagctgaaagggtgaaagggctggtgagcactcaggacttctgcctgcgtctctttcatcccttttggggtatgtccttttaagtttcatcttttggaacatggcacccaaagctcttcttctggaaatgtaattggtagccaaagtgctgtgaagtccgtcttcttccataggacttttagctcacagctccatgtacctcagtgtttcatctgcccaaaatgaaagtaactcttgccttggaaacatctgttacctccataagattttaaactaaaagacagctcagaaattaaggtaaatttctcagaaattaagacaaaattactcacaaatagaggtaggtacttaattttaagaagaaataatccatttactcagaaaaggttagcaagagggaaacaatgaagtgtattccagctctcaatattgccctataggggaaggttttcaccaactgcaaagttaacactgctctagcctctgagtttaacagttctgggtctaggaatagagcagtgaaaggaggaatgttacagaaggagattgcttagcgatagaactttgtgcccagcagttttgaaatgttcctgtatctatgccttttcaaaagccccgcctccagctttgtagaagaagccttagtcacctcttcttaagctaattgcagactggaaaatccagttcccatgtgaactatgcagaacatggggcctagtcatgtcttcagagtcctgagggcacttgagccaggaatgttgacactattaaaaagctgcccaagtataggctgatgatgttcagctgggttttttttttttcttctgaggctaatgaaacacaggtggccccaagatcatcaggtagcatgatcttgggaaagtgggttgccagttaaaatacaggatgtatgtaatatttgggacatagagtagataattatttgttgtttatctggaattcagattgaactgggcagcctccgtttttatgtgttagacatgacagcctagtgggaaggatatctcccttttcctgaccccagcatccaaccatctcacaaatccctcacattattttcccttgaggaggggtccagctgaaggctcagattcagagtgtagagagaggtgtctgcagaagcttcttgctttgcagttagctgcagcatgtccctaaggcaggatcaggcaaaggggaaactgcctctaaatcttcacattggcttctgacgtgccagtcctaaggtgttcaatcctccatgaaagagaaactcattccccaggtaaggggcattttctctttcttctcctttccccacccctgtgacaggtctcttatgtcatctggatgacgcgtgcattagcaacccctgccacaagggggcgctgtgtgacaccaaccctctgaatggacagtatatttgcacctgcccgcaaggctacaaagggagcgactgtacagaagacgtggacgagtgtgccatgggtgagtacacagaacccttcctactcctgtcggtcgggctcagcggacacttccgctgaagcacgcttcactctgcgtgcaggttccatccaaacctcaggtctgttacatgccctctgtttacagctgacctttcagtgtgaccatatagtctatcctgggaatttaaatatacaggaggtttgtgcttgacttgtaacatggatccctaccttagcgactgtttgggcataagaacagcagagacacacaagagttgagatggccctcgttcgtctttctttccctatttccttccttccttcttcatttaattatttatttacttactttctgattgattgattagaatgacgcaagaaattgagaatcagattattaaaggactggccctagtgctactaatctgacccacttctgtagtccacgtttgtggaagctccatcgagtgctttgatcctggttatgggcgcttgtgtcttccagccaacagcaatccttgtgagcatgcaggaaaatgtgtgaacacagatggtgccttccactgtgagtgtctgaagggctatgcaggaccacgttgtgagatggacatcaatgagtgccactcagacccctgcaagaatgatgccacctgtttggataagattggaggcttcacgtgtctgtgcatgccaggtacatgggctgtcggtgtgtggggtctagaccagagaccttgcactgtgcttgtcttaggcagagcactcagtacagtgtggcatttccgtaagctctgttggcatttaatccctagccacgggacccttagggcttccctggtgcctcagtggtaaagaatctgcctgcagtataggagcctctggagacattggtttgatccctgggttggaaagatcccctggaggtgggcatggcaacccactccagtattcttgcctggagaatcccatggacagaagagcctgttgggttataatccattgggtcgcaaagagtcaaacacgactgaagcgacttagcatgcacatatgcaaggggacccttaaggactaaggcccatgttaaaattcttagatctatggaagacagtcccatcatgtcaaaacccagatacttgtgagagaaaaattcagaagatttttaaaatgcaagtatactttgatttaataaagtatttatcataaaaattctttaaatagcaagctttccttatcccctgatatattataaatagcataccattccatttatagaaaataatattacccataattgtacaggaacttgctctttatctcatggtgagatacacatgctgtgttatatcttggaactcttctgcagagacctctgcttgaatccttagagaacacagctgaactttagcttaaaatgacagctgtcaggggctgcttggcctgattacaggtgctaaccactctagccttggcaggccctcctgactttgacttacaccctgagtacaacagcatctctgattcattcagctggtccttaggactggggaccctgtgggcctggcactgtcctgaaagcaatgcctgggctgatccgagaatgtagttcagtctttgttggcatgctaggtcttaccaaggtctttggaggtaacctcttctccatctccacagtgacatggatatcccagactatgcccgtgtctgactgatgctcacagtgactgttttcaatcatggcatagtcctcttttccctctgcagaaatgttcatatgcatagaggatgtagtcagatttatgaatttgtgctttcttggctagaatatgcctttgtctttttctaagctgcttgtgtggtccattttgttcaggtttcaaaggtgtgcattgtgagttggagataaatgaatgtcagagcaacccttgtgtgaacaatggacagtgtgtggataaagtcaatcgcttccagtgtctgtgtccacccggtaagtgcccaccacctgcccctgttttctttgaaagcacaaagcttctgaccgcagggaagaaaggagggagagaatgtgtgtgggctctccatgaggaagtcattaaagcgagcgctttggggtaggagtgtgtgcacagaagtgggggatttgcctcagctagtatagcttccaaatcctttgtggccggaagtccaagtctgttctgaatggcccatgacctcgccgtctgtgtgtacatttcagaaagttcatacctcacggaagcccttagttctaggttattcaggattttattttttcctgtgagtcatattcttgaaacctctctctgagatgattatttttagacacttcacccatgggtacattaatagcacaagtcagttctttccaaagaatgctgtgtctctccttttgcccccctcagccattgtggaagacatgctgaattttctgccttaggctatagcctctctcgtttcttcagagagaaggtcccagttcctgtgcagctacattcacttcttagggggttctgtctgtatgcattcagttcctactttaagttgaagtgaaatctatactgggaagaaaaagaggtgagagagacaccccggggcctctgatgccctgagcctcacccgttatcccaggtacctgttcaggagaaaaattctccatgtgctgatccaggggtatgagcctgccagtaacagcccagctcttcctgggcatcaccctgatagtgaggaaaacataagatcatcctttgacgtgtgtcatcatgtgcccttttaaggattcacggggccagtttgccagatcgatattgacgactgttctagtactccgtgtctgaatggggcaaagtgtatagatcacccgaatggttacgagtgccagtgtgccacaggtaagactttttcacttcttattctcctggtaggtccatctgcactaaataggagactgtcctcttctcgctgccctgccaggccagtctactaatgggctgctctctgtttagaaggggcttcttccagcctctttcttgctgctctccctgtttccttctacaacacctgcttccttcaccacaatgatggcctggcctggacatttccatttgatgtccccgtctttctagggcagattttggcaatggcgagtttccagctggctttgccttattcctctgcaaaagggaaggattccagctgaaaactatttgtcattggggcttctcagcaggaggcccgtctctgtgtttcttgaggcaagggatcgaacaaaggctcagaaacgcagtggtgggcaagtgcagagattttctgcataaatatgattgatgctttgagagtcaaatgtgtatctggacaggggagagagctctatctgggaaagcttgggtcctctttctggactcctgctgctagaatcaaaaagaatgtttacaaatattctacatttctgatctgtggcgacatttctaatttgggagtggatttgaataagccagacatttcttgttacatatttgcttctgcacagaccattattgtgtagagaaggatttgaaattattagaaaagagaatttcccagtttcttttttatctgactgtttaagaagttatgaatataattcaggacatttttttcttactttaaaaaatggattcttaaaagattttaagcatcatgtgcatgattttttttgtgatcacagaaaagcaaactaagtcataaaaataaacagagaactactattccagtagtattagaatattaccacttattaggccttctcagagtaggccctgtcagatgagccactcagcttccttttcttttcacaaactctggtctctgttggaaaagtttcaggttaggtcttcttctggctaagattatgcttatggagtataaccttcactggagagaatttaaactttgaactcatgtttaaaagggaggagagtccttccaaagtctcttaaaaagatttaaggttggataaagaaactcttatttgccccttttaactgtcttaacttggtcattttatttaacaagtattggttaaaaacttactatatttgcatagattcctgggaggttgggaggaataaagaaaagttctctgtcctctcaggtcagaactggaaagatacggtacatgaagtcattcatttagtacctatatatgcagactggtttgggaggaaaggcatatagagataaatacattaaggaaaattatagagagctattccccactgaagtccaatatgcaattaagatgcagttaaaatgtctctgcagtgaaattattgctcatttacaaaaagctatttgaattctacagatctgacttgaacaacttcgttttaaaccaaactctaggcttgccttataaatggtgcagttagtcagttccaaatgcttatggcccacagtatggattgtttacgatatgggatgtgtaggattaagaggacgctggaactatgtatgctcaggtgtggagtgcgcaccttgggttttaagtatcttgggtacaattccttctaaggattcactggtgtgttgtgtgaggagaacattgacaactgtgaccctgatccttgccaccacggccagtgtcaggatggcattgattcctacacctgcatctgcaatccgggctacatgggcgccatctgcagtgaccagatagacgaatgctacagcagcccttgcctgaatgagggtcgctgcatcgacctggtgaatggctaccagtgcaactgccagccgggcacgtcaggtaagccctctcttcactgcctttggagttttcaccgcttctgtaaaacagcttacaccgatgtctccgactttctcagcacatgcttaggtaccaaaaatacagtcttgattctgagaagcacagccaaagtacagccagaaacatctcaggggcagatagctctagccagtagggaagtcaaagacaatagcttcacagaggtgatgattctgtgtatgtgttttttttatcaaaaggaggcataccacttcaaaaaattgaaattattattgaaaattgaaaaccttctcacttttgtggctcaattggactgtctttttcaacttccaccttactcagattaatgaagttggtccttccctctccatccctcccgttcttccagtagtttttcctcccttttagagtccggtatctttaatggagaaggaaatggcaatccactccagtattcttgcctggagaattccatggacagaggagcctggcaggctgtagtccatggagtcatgaagtcggacatgactgagcaactaacacaccatctttaacgggtcgtctttcttctgctgtttttctctgctgggctttgggcatttgggggactcagagggagaggagagacactgcaacatgtctgggttattgtcaattagaatgcagagctgtcgtttcccatccccagttcatggctgtttcctgcctccagttgaatgacggcttgttagtcgggagggcatgctactccttgctggggaagtgttgagctgttttctcaggcagcagcatttcacagatttcagtggattctgttttacttattcgaggaataattatggtcacaactgtggttaatggacagagaagttctgtgtctcagatcaaaggaaaatgtattagtggaagattaactagtgtgtgcctttgttagaagggaacctgccaatacaaggagtgatttattgagaactcattctccatttaaggaaaatggcctgtgtagggggcaaaggtgggggaggcggttagctgccctcattttattttgttatttccaaatccatttcttcaaacttgtcaaaggccctggtcttcatccaggaactcgtacatgccaagtttgaaaacaaagtcctttttgagttgctcaagcatacgaaaaacatcccatgccttcccagttgaaaatgccttccccctccccacgtttagataactctctaaaagagctgaatagatctttgtgaaaccttccaaaagcaatttgcttccgggctggtccccagacatgagaaattgcagtacgaaaagaaatttgagagatttacaagcaattgaatggatgcctttagaatggtggggctgttttaggctttgctatcgttcccattataaaaaaatgtactggaaacctgggtgagtggtgggctggcaagtattttgttttctttgggattatattattatgccaggatggatcaggtgtgttccctggggagtacagagaagtcaaggtggaagtagctgtcagtgagaaaggcaggtagtaaatatcagcggtgtgcaggcagcataaagaaggaaggcacaggttctttcagaaaactgccagattcattcctatgactgtttggagaattcatgcaaagagatgcagaccacataaagagatcttggtctgtaatgtttgcagaaggacctggcacgtacagggagcctgggtgaaaggattcactcaattaaccatatgagtagactcttgagttgcaatctaagaatcgaaaacccattcataacatagtctgagttggtagcttggggtttggatgagtatatggatagaagggatactttacaatctgcaggttataattgtagtttctcactcactaagtacttaaagcacagtatactacccagaatcactactaatgccttttttcacctgtgatcttaagtaagtttgggggaagtttcaagttatagaaactgcattgcctagctaaaagaatcatcagcaaacaacaaatacaaaacagacaagcagaaggaattctgtgaaagcacacagaagcatcttacagattccaagtgagaattgaataatgaggctttggggggattagcgggcagtagggccacatgcagaccataggtcacccagttcatgttccagcgttccaatgagataatttcattggcccagcttgagctgagtgtctgttcctgctagaatacaacatggatttgggggcagtctcattaaaccgcatggcttcctggggcttgccttggtctgttgtggattaattgggattgtcaatcaagggctagacacatctcctaaaggtatccatttgtaattaaggaatattgaaacctttgcctcatctgtggctagcaaggcagcatagtcacattaatcacagtgaccagtgtggtgcggtgaagtgtgtagaatccagagaactgggttcacatcctagctgtgctgatgtaattgtacaagtgcatgataaaatgggtgtaacacaaattggtttggcactgaagtgagaaaataaagttatatcaagtgggaagcagagtattttgctcacaataatgactcgatacattttcaatataataattattaataaatattcacataaagtttgagtgaataaatattaggcattttgttgtggaaatttcatttgttagtttatatcctaattatcaggcttaatttttagactttttaaactgccaatatattcttttatgatatccaaattcatcactaaattcatgttaagtaatataacagtgagtatttttacagaatagtggtaacagtagggattggtgtatctctactgtttatttacctgtatctataattaaactttcctgaacatagtcaagctctgccattcatctggggaatataccaggaggaaggcaacatactccaggagaaagctatgactctgtaagatttgtcctgaactttagcccttaatagtaacagtcagtatcaagcttatagtggtagatacaagtcccaaaattctaaggaaagcttaaattttacctctggagcacagtattgtcatagttgttttccttgaaacgaacgacaggctgtttctttcacttaactatttgctaagtacttaggtctgaatagtcctggtttgtctgtcagttgctctgggattctgtgaaaaaagttgcagtttcagttcagtactcagtcacacaactgcttttcctggagactgctctgtatgttggcatgccacagaatagctttatgtgtattttctatttcatcacacaaaacaatagaggtatactcaagggtcaaggtgtaatcaaatcgtaaagttaatactttcggcagcttcatcaaagtcattcttaagtgaaactatcttttttgtattgttttaactgagtacatggaggtgaagaataaaaacactagtacagtacagtttggcactttctggattcttgctaagatgccagcagtcatacctccattgctctttatttttttagtaagatatttactgtaatctaaagccatagctttatcatcaaaatggaaatatgggaactgggtaataatttggttgggtacagtctgatattctaaagcaatcatgtccatggagatcaattaacaagacctacataagcagttaatgttttaaattcaaagatccaaaatcagaatttttgtcttccaacaccaactctactctctcattcacgacatctgtcaagagtattatattttcctagacatccaggtatggtaactctgaatttccatgactttgcctttattctcttcgttgactcaatttctaagtgataaagactgtaactcttatgacctctcacattcatccttttgctttcattcctactggcatgtccttggccttgggcaccgtttctttaaaccaactccgtgtcatggcctgcccagtgttcttctcacattaatccatcccatacccttcacattgacctttcatgccactccaaatcattggcttgttaaccagggccccttcatttatgggggtgtccttcattatggagtccttcatttatgattctcatctcaccatttgcccatgtgtcccacccctggggttaaaaaaaatcaaagtacagctcttactgtgcctcctgctggctgtcagctgccttgcagatttcttcagtgctgagctacacttttttttttttttaaatcttcaacatttctgaaattaggaagcaccttatattcaaggtcatagaaaactgtcagcctcagaattaaggcagaagtgatgacaggctccttgctgcctgtgactaagaattcttcagtgtgtaaaagggatcagttcatctaattgtcattgcagctgtatattaactttggatccctaatttgtacttaaaatgaagcaacatatgctataaactgctttggatacttgaggcaaaagcgataaaaatctctgccttgatggtgcatacaccatgaagaactgttgccaggttctgaagactctgtcacagggtctggtggacttttttttttttaatcaatgaatttaattgcctccattgcttttgtaacattagtgcaagtgccaacacaataaaaaagacaaatagtggcttagtgtgattaatacaatcgtttgacctcatgatacctttaacaaggtctggaagactgaactttcagaaatgctacattcctgtattcaagggtggctagatactcatgagatttcctaacacccagcatcacaaacagagatcattggtgtttctgtgctaatattgcacgatttctctttgctttcatctttgcaggtgttaattgtgaaatcaattttgatgactgtgcaagtaacccatgtgtccatggagtctgtatggatggcgttaatcgttacagctgtgtctgctcaccaggattcacaggtaatggtccttttcgttgggagactcctccttcagccccctcactttgggaaaaaggcatctaaaggttagttactttcaaatatatctgacttcttcgtctcttggaaggttagaaggctgtttctgagcttctctggcccagttttcaggccttccttgaactgtaacatgaaacttttcactggttacggtttttaggccatgtgtttatagctacttaaaaagggtttcttttcagaccatgagtttccatcattgagcttaagatatatagcttccatatttttctatacttagtagtgaatgccttctagaaaggcatggccaaggtaaaattctatgaacaccttatatgattttttctgagtacttcctcttataagtacttggctaaggtcaaaatttagcaaagcaacctatttttggctagcatagtgggttttattttctctccaggagggagaaagtaagtgactaaaataaaactggttataattcttcttaaattcttcttaattaaaccccccagctagaacatttatatatgcaccatgtgtatacacacacaaactcacatacatcttttctctaatcttcttttgttgctaataagattacctttaccttctaccttcctgatcaaaaagtactaggagctactgaggaaatatgaagcctgtttctgatacatctgtttgtcaaaggcaccatcagagggcgtgtaatgtgccagtcccattcttgctagacaatgccacacacaataaggcgcttacatcatgatgttaccattgcataaataccatgtggtcatttgcaaccaatgtgagaaacttcccacagagctttttaaactataatgtcaaaaagccaagagatgcctctttcttgctgggagcttaactctctctgtatttcacaatcctttgcactgcttggtgtgattgtggacacgagagaggaacgtttgtggcctacgtggtcaccgtaatctcttctcagtggaatatcactcagaagaccaggatgatgagagttcttatgtctagtacccagcactgctggtgtggaatcagatgtacttctgtatcctgaaatatgttactccaacattcagtgacagccaactgaatttctttcagacagaatggcatatgtacttgtttacataggtaataagaggagaatagctgccacttattaaggccttgttttgaggtaggcattaaatcaaggcctaatctcatttagttgtcactactattattatttctacagtattgatgagaaaccctgaattcagacagcttaagtaacagtaccagtgcactagggccagcattccaccccggggggttctattatagagttcatactcattgccacttgactggacagcataagtgggtgcccgctgtggtttctttttagatatataaaccttagactcaacttaaattttttggaaatgtcagtgaatcatatgctctctctttttaacatttagcaaatcaggaaggtcatggagggaggacataggctaaaaatattctaaaataaacttaaggtgtagcatgaaactgtataaccaaggaatggaatgttttggttactgggtggtaccctgttcttggaactgttttctatgtctgtttttttctatttgttttttcaagtcagttgctgaaaatatcagaggcaactgtgttatatgctcatgacccataaatataaggtgttttagtcttgcctttattttaatactgttaactttttacaattttaataacagcttgaacagatttaagggaatattttttcagacaaaattctctgttctccgcagaccactttatacttactgattgaataggaaaagtaagaaatcatgtgtcacttcagtagattacttttcagtagtataaactactttttcagtttcacattcatgtccattattttgctgacttctcagaacagtccataaaagtagataggttgtaaatgaaaccaaaagcacaagtaacaaaaactaaaatgaacttctgaggggcaaaaaaacaatatattgaaaagctaacctacagagatggataaaaatatatgcaaaatgtgtgtctaacaaaaagttaatatccaaaatatataaagaatcatataactcaatagtaaagaagcaaataattcaattaaaaattggacaaataacaaattaagtatagtgacagatgttaactagacttattgtagtgatcatttttcagtatatacaaatatcacatcattatgctgtacacctgaaattaataatgttacatgtcaattatacagcctactccagtattcttgccttgagaattgcatggacagaggagcctggcaggctacagtccatggggtggcaaagagtcggacacaactgagcgactaacactttaaaaatgaaaacacgttagttaggagtcagaaacccaattttagaaaatattactggaaaattcccaataatttccagatataagatactggtaatgttcactctagttctcagagctacatgatttaaccacattctgattatattgttaggccgtaaatcattatttatattttgaaatccagtatcaactgaaacaggtaaagttttacaagctttacaatctatgatgagtagctagcaatatagctaatcctcatctcagtatcattatgcagctgtataaaatcaccaaattcaatgaaaaaataatggattcgaggtttgcaatctcgtctttctttcagtctcttacgggactttctaatcagaagtaaagtgaataaatatttataaattataagtgttgaacacacagttgtttttggttctccagccattagtgaaggcacactgctaagcacagaggagcactgggttatgggaaaagtggtagacagtgagctcatgcctttaaaaggatttaaggtatgatcaggaacccagactgcatacatcggaagatgactaaagactagggaagtagttaaaagcaaggtatacacattcagaaaagtataagcgatgaaggaaaacaaatgtttagaatcagggggaaaatgggcaaaggacattctttttccaaagaagacatatagatggccaacaggtacaggaaaagatgctcagcatcactaatcattgggaaaatgaaaatcaaaaccatagtgaaatatcacgtcacacctgaaagattggttgttatcaaaaagatgagataacaaatgtttgtgagggtgtgggaaaaggggaactctcatgcagtgttgatctgaatgtaaaatgttacagttattagggaaaacaatatggcagttgtcaaaaaattaaaaattgaactaccataaggtccaggaattctacagttgtgtatctaaaggaattgaatcaatatttcaagaggagtttgtatttgcacacacccatgttcatagcagcattattcacaatagtcaagatatcagaacaaccagtgtccatcaaatggatgaatgagtaaaggataccttgtatgtataccatggaatataattcagccatgagaaaaggggaaatcctgacatttgtgacgaaatgaatggaacttgaggacattaagtgagataaatcaggcagtgaaagacaaatactgtatggtatcacttaatgcagaatattaaaaagccaaagtcatgaaagcagagagtagaatggtgtctatcatggtctaggctgggagggtaggggattggggagatattgtttaagggtacaaatttgcaactactagataagtaagttctgattgaatgcatagcatagtgattatagtcagcaatactgcattataaactttcaaattgctgagagagtagatcttaattgtttttaccacaaaaagaagtgatggttatgtgacatgatagaagtgttaattaactgcggaggtaatcatattgcaatatataaaatatatcaaaccaacacatcatatgccttaaacttacacaatgttatatgtcaatcatgtcttaattttaaaattaacaaaaaaacttagggaatttttattatcctcctttaacaaataaggcaactgaaagagcttaatgtgtccatggtcttagctagtgagtctcactgttaggactgtgagttcccagaaggcaggcacctccctaattgtctttttagccagcattttctaaaactatgtagcactcagggagcacttagaaaatattgctgaatgaatgaccagcactcatatatggaacctctgaaatccaacactagactcttgagtctgcactgtaccatgcttccattcattaaatactaatttgttaggcatctacctacatgattagaaacattggctaatttctcattcagtagttactgagcccaacaaggtacatagttttgtgctgggagttcatgaaatgctaggatttccgatgctacttaaaggatgagaatttgctagtgaagcagctgcagctcaccaggtagactacacacagaggcacttaaccctctcagctaaagacgactcgaaaatggattctgctgagagctttaaaagcaagtaaagaaactgtgaggagtgtgagttctgagaatatttttcccaagaaaagacagaattgaaaaagctttttcatctcattctccactggatttcagacagaggatagtgctgtagttgaagacttgtggctcttatctcagtgccagtggcaaacatctaaaaaaaaatcagcagttgaagctagaaagtagtattgtaaaattggttattaataaaatacttacaaggaaaacagcaactactatcagattatgggttttttaccacacgaaccaccaataatggtttagagagtagcagagagtgaaaaaatgttaatacccatactttaaaagggtgtgtatctatttcatttggaatttcctgttctaattgtagggttactctttcttaaataaaaatgcctggttttatgtgaatcagaaaattgtattctttgaaatttataattccttcatagcagttgcttgtcaccactcatttacagaattatgggttattttaaaattttatatcattttggaatatatagttaaatctcatttattcaaaacttaacaaagcaaaactcatatgtaactggcatactttattccactttatagcagacatcttttcaaagtccaatcttgggtatgttttagaggaagaacatattcatttcaatttcatatattctgaacatttacattataacttgatgaaataataattgtctacatcagaatttctcaaaatgtagtatctgaaacacctacattatttaaaatgttactttgaagcagtaaggatcttctttaaaaacaagtacttttagcaatccttgcacattaaaatttaagaactactgatctatactgagagaccctgaattgttttctcaatgatcagataacaataaaattacatttaggtttttcttcttcctgagccagaaaatagattaatacaattacaaaagttaaaacaaatggcttttctttttaagcaacttaatccttaatagtgattcaatgttaatcactgaacattcctgttaattgagatttaccatatatagaaatgcaaaagattgactaactcttacgagaatgaaggcagtaaaccagctgacaacagtgataagaaaagcttgagagttctccgaacagcaggaagaggagcagccaactttgatcgcatttgatgttctctttttgaatatttgatgtaaagtttccccgtttctaaactggagtgaagaaacacatgtcgaaacactacaacaccgttccagtattttgttaactttgttaaattatcaaagtacaatgctctctgctccttccttgcatggcactaagtgctcttggatgtcttattccttaagtcttgacatttggtgtccacagcattttatagcctaggcaggtaaaggtatctgcacagtagatctcatggtcctgggtctattccctaagcgttttggatttgacagaaactgtcccccttctctacagggcagagatgtaacattgacattgatgagtgtgcctccaatccctgtcgcaagggtgcaacgtgcatcaatgatgtgaatggtttccgctgtatctgccctgaggggccccaccatcccagctgctactcacaggtgaacgagtgcctgagcaatccctgtgtccatggaaactgtactgggggcctcactgggtgagtagctgttgtgtgttcatcatttcttattgacccgtgtcgagccagttgagttttagtactggccataccctgtagcagttagtcaggacttgagctgagactaggctgaagaggtcggtaatccatatcgtagtcttccaagtcaccacttcttccctgccttccatgactgagtaggtggaaagtagggaggaatgtttcattcctcatgtgggtagtcagcacatgggaggagtccagggttattttctgagtctttagttgttgtgcttttagtactaactgcaagattgcgttctgagggatattctgtttgacttaacctcctgctcaaagaaaacccaactctgtttcataatgataccagtgggtaccactgaagtagagctggtctcagctagttagagtcttggccctgatgaagtgttcacagctggcaagcccctgagagttgtgtaatgtgttggcaagtaattttctagaatcacagagtgtgacgtttggttccatgagatagtcctgtgctcttgctatgcttgccagaggacgggactttggccaagacttagcatttgccatgcttacaacaggtgaaagaatgaagagtacatttagaggtaaatgggaaattaagtgatttctaagctgaattaactcagtattcctgtttcagagtatagcggccttcaaagcatcccaacccatttactttttttaaaaaagaatcgccagacaaggaggctgttatctcccgatattacattctaagtgctaatggtgtccaaattgtgaacaacatgcatacatttcagataccttcatttttgttccatttcctgctcagcacccttggtgctttctgggggcagggttgcaggtcagaacgaaccatgtctcagaagtcagatgttccaggagctctttgaggtcacttagagtctctgatactaccctgctttctgagtatctgttttacaccagaaacaagcgatctaaggtttctttacatttatttagcagaaaagaaactgcaaatttatcaatgtcaatgtgtctttcagattgtcccaatctgttgtactcaccactctttacatatgaaagcccactatacttaatttttccagcatttttgtgggccaggaagctgtgtttacagaatactccagatgggcccacatgattcacaaggtaacccaagtgtaggtttgaagaggaacagaaatgagcttagcccacccaggagctccttgatccttcatttcttcagaattttgcatttcacctgtgacttaattgtacattcataccacaactgtaacttatttctgtcttctttcagatacaagtgcctctgtgatgcaggctgggttggcatcaactgtgaagtggacaaaaatgaatgtctttctaatccatgccagaacgggggaacttgtgacaatctggtgaatggatacaggtgcacttgcaagaagggctttaaaggtgatgcagaagtgcatgtttttatgtcctttttctgcctttttgttggtgcagacagcttgactcacttctttctttccccttttcctactcattcctactcattaagcaaccttcatttgagcacttattatttatagggcagttggagaataaaaacataaatttaaacatggattctattttcagactagcagagaggtgagctcttgaaacgaccgtttaaggtgagcaactagagctccactcatacaactttggacattttgattgggtattctaattgtaagctccagtgtaggcttgattctgtgataattcaaaagagatattggtagaatgaaaatcttgttttactgtaattgtagcaataatatcatgggagaatccatgtatttaaaacctttccaacaagttctattaaacattgagatattcttagatgatacatagtcacctatgaccttctggaaaaatgcatagtagtgagtattgtgtaaaatcactttttgagttgtctctgttgtatttctcctgtcacttttttctttaacccttgagagagaaacctgtgagtaaatcatgcatatttgtactccttgatccatatagtcatttatttcacaactcaaagttgtgccacgctactgtgataggtcaatatatttcagtgtcactttatttgataacttgacatttttctaagatcatattttagtcattaactttttgacattcagatatatattatctgtaaagaaacttacagatttaaaagcatttttattcctttgtctctttgagacttgctgattgacaaaataaatatcaaaatagttcacaatcatatgtctagtgattaacagagtacagtttgaactcagacctctgtactcttagaccattattttctttttatacatggctatagttcctcagttttaagactctgtgtcaggccctattgcaggtataaaggtggtggcatttggtaatatcctgtccccatgaatgcttccttacttttctcttttttcatagtgggagtagattttgtgtcttggatcagggggaaaaagctttgtgacttccgtaaacaccaccacattgatggtagatactgtgcatttgaaaaagtgggcataaatcaagaagctttgattaactgttcaaatattttatcccttgataatttctagcctatttttaagccctgaccagatactttgtatagaagcctctatttagatatagcagtagctttttaccctagtgaacttcttggtccattatagagaaattacttctatttggacattcattaaactttcaagctattagaatatattgttcttccattcattttttgattaagcagttttactgactgactgcatgtcggggactttacactggaatgaatgaacaggtgtttcagtggcttgaagaaattaacgcagtttctgaggtgtttaatgtttacccctgagagcattgcttagtaattgagatattgaggaggctaacagaaagtttcactgtctttgatttccccccctttttgtgtacaggctataactgccaggtgaatattgatgaatgtgcttcgaatccatgtctgaaccaaggaacctgctttgatgacgtaagcggttatacttgccactgtgtgctgccctatacaggtgagtcctggggtccaggggctggaagggatgctcggtcttgtcttgtcgttccaaacctcggagtctcagagatggggtctgtggggccagtgatgctgccttgaggaatcactccctgatcacctttcctgccctcgctgtctaggtcgtccactctgagaaaacactgtggcctctctagatgcacgtggtggggatacttgtttgcctttattttttagggtttgaaaaaaattgtttaattatacttgtcttgaattgatacgtagatgatggtttagtcattatctgaatggactgtatggcctgtcctcttggtctttgttttgccaacacaacagttaccacttatcggtcctttactaaatgccagacactttatatattttggagtatttgctccagtgctcacagtaattctatagagtagaggttcctattcctgtcaccattttgtacatgaggaagctgaggcaaagagaggttacttgctgaaggtcacataggtaagtagtaaatctaggatttgtccctgagtctttgaatccaaagcttgtcctcttaactgtcattcctctcctcacattgattgccactgcgtcctctgcagagaggcactgccccttggatggcgatcacacacagaagacatggatgtgacttcatttcgtatcaggtgactttgtttcaggtggtgttacaggagtgtgcttggacgtttctctgtattctcccgcctcattactgccgtcttgtgactggttttgtttgtgtggctcgctcgcctcatgtcattcatttaatggctttgcatgtttctccaatgccgtgcatgcaggcaggagcatggcggagctcttactccctggagtcttggcctgttgataatagctgtggcgagtgactctaggctgtttagagtggccggatgcatgactctttcctgaaagacttgatactacattgctgtctttgtcacctctttagaaggaacactcatgcagacaaactgcatttagccatcctgactgaaaaaatcatagttactggagatccatagctatccccagacagtctaaataatgtcattccatagcaatagcagtcacatttgttggaaccgagcagatcatgtcatttacaaccataaagactgagaattgatggtagtagggagatataagcaggtgtcattatgctttgacacattataggcttatctgaatgtgactaaggtacatagctcattgggaaaatatttgccttcttgctattcaacactgtaagaatatctgactatatgctggatgttggtttttctacatattaggatattattaaaaagaatttaccatgtgtgacctctgggaaattatattagatattacagattaaaatttcaatgctgagtgctgctaagggttctgagtgtcattgaatttggccagcatgaagggagctaagcaacgttgcctttccttgtgaaccactgttctgaccagacacattaagaacttgttaggggaacttccctggtgatccggtggttaaaacttcatattccagtgcagcagaaacaggcttgatccctggttgggagctaagatcccactgcctcatggccaaaaagccaaaacataaaacaaaagcaattttgtgacaaattcaataaagacttttaaaatggtccacattggacttccctggtggtccagcacttaagaatccatttgccaacgtgggggacacaagtttgatccttggtccaggaaaatctcacatgcctcgaggcaactaagcccgtatgccgcaacttctaaagcccatacgcatagagcccatgccccccaacaggagaagccctgcaatgaaaagcctactaattgcaactagagagtagcccctacttgccacaaggcccatgtgcagcaacaaagaccagtgcacccaaaaataaattaattctaaaaacggtcctgggacttcccaggtggtgccagtggtaaagaactcacctgccagggcaggagacataagaaacacaggtttgatcccggcgtggagaagatccctgaagaagggaaaggcagcccattccagtattctttcctggagaatcccatgaacagaggagcctggtgggctacagcccatggagttgcaaagagttggacacaactgaagcgacttagcagccgcacaaaaaatggtccacatcaaaaagaaccttttgagaaaagaaaaagtggttagagacattgatgaaaatttgtggtaatatttttttctttttgaatgcaaagttttaagataaaattttaaattgagttaattgtaacttgaccttatttattttgttgcaacattgtattagtttcaggtgtacactatagtgattcaaatatttaaagattatactccatttaaagttactgtgaaataatagctgtattccctgttctgtatccatgtggattatttattttatgcctagtagtttctctctcttaatcccccacctctaccttggccctcccccttccttctcccgctagtaaccacggtttgttctctatacctgtgaggctgtttctattttattatattcatttgtcttttttagactccacagataagtaataacatacggtatttgtcttttttgtctgacttgtttcactaatcataataccctctaagtccatccatgatgcagatggcagaatttcattcttttttatttctgagtaatattcttgtgtgtatgtgtgtgagagagagagagagagagagagtcacaaatcacatctttatcccttcatttgttgatggatatttaggttgcttccatagcttggctattataaataacctaatgctgatttaaatggacttccctggtggctcagacggtaaagcgtctgtctacaatgcgggagacccgggttcgatccctaggttgggaagatcccctggagaaggaaatggcaatccactccaggactattgcctggaaaatccattgagatgcatatatctttttgaattagtgttttcattttcttcagatgtacaccaaggagtgcaattgctggatcatattttagttctgtttttagcttgagtgacagttcactgtgatggctgtactagtttacattccaaccagtagcatcaagagtttccttttcttcacatctataccagcatactttatttgtatacttttttgatgatagacattctgacaatggtgagttgtaatttgacttccgaaacaacttaatctccctttttaaaaaagtttttattggaatatagttgatttacaatgtgttagtttgaggtgtacagcaaagtgaactctttgtttgtttttgaactctttttttagattctttttccatataaaccattatagattattgaatagaatttcctgtgctatataataggtccttatacagtagtgtgtagtctctaattcatccctcccctccccttggtaaccatagggttgatttctacatctgtaactctatttctgttgtaactaagtttatttgtaagcttttttagatgctagctataagtgataccatgtggtatttgtctttgtctgacttatttcactctgtacaacaatctctaggtccatctatgttgctgcaaatggcaaatggcttaatttaatgcatctttaaggctgaataatattccactgcatatatataccacatcttttttatccattcctctgttgatgggcatttaagttgcttcagtgttttggctattacaaatactgatgcgataaacactggggtacatgtatcttttagaattatggttttctatggttatatgcccacgagtgaaattgctggatcatatggtagctctgtttttacttttttaaggaacgtccatattgttctcaatagtggctgtaccatcttacattctcaccaacagtgttggagtgttccatttctccataccctctccagcatttattgtttgtagattttttgatgatagcctttctgacaggtgtgaggtgatgccgcattatagttttgatttgtatttctctaataattagtgatgttgagcatctttcgatgtgcttttttagccatctgtatgtctttagagaaatgtctctttagatcctctgcccattttttgattgcagtgggatttttttttctttttttgattgagatgcataaagctgtttgtatattttagaaatttgcccttgtcagtttcttcatttgcaaatatttttttccattatgagggttgtcttttcattttgtttactgctttcctttgctgtgcaaaagcttttaagtttaattacatcccatttgtttttgctttcagtttcattactctgggaaagtgaaagtgaaagtcactcaatcgtgtctgactttttgcgaccccatggactgtatagtatagtccatggaattctccaggccagaatactggagtgggtagcctttctcttcttcaggggatcttcccaacccagggatggaacccaggtctcccacattacaggtggattctttaccagctgagccataagggaaacccaagaatactggagtgggtagcctattccttctccagtggatcttcctgacccaggaattgaaccagggtctcctgcattgcaggcggattctttaccaactgagctatcagggaagccttactctaggaggcggatcaaaaaaaccttgctgtgatttgtgtcaaagagtgttcttcctgtgttttcctctaaaagttttatagtatccggccttacacttaggtctttaatccatgttgagtttatttttatgtataatgctgggagtgttctaatttcatttgtttacatatagctgtctagttttcgcagcaccacgtattgacgagactgtcttttctccattgtatattcttgcctcctttgtcatagatttggtgacagtagtgtgtgggtttatttctgggctttctatcctgttccattgatctatatttctggttttgtgccagtaccatactgttttgataactgtagctttgtagtataatctgaagtcagggaacctgattcctccagttccatttttcattctcaagattgctttggctatttgtggtgttttgtgtttccatgcaaattgtaaattttttggttctaattctgtgaaaaatgccatgggtaatttgatagggattgcattgaatttgttgattgccttgggtaaaatagtaatttcccagtcgaagaacatggtatatctctccatctgtttgtgtcatctttgattccttttaacaatatttatagttttctgcatacaagtcttttgcctccttagataggtttattcctaggtactttattctttctaatataatggtagatgggattgtttccttgataatgtttctgagctttcttgttagtgtctagaaatacataattctgtgtattaattttgtatcctgtaactttaccagatacattgatgagctataatagttttctgatagtgtctttagggtttctttatgtatcatatcatgttacctgcaaatagtgacagttttactcctttttttttttttagttttggttccttttatttcttctctgattgctgtggctagaacttccaaaactatgttgaataaaaatggtgagaggacatccttgtcttattcctgattttagaggagatgctttcagtttttcaccattgagaatgatttttgctgtgggtttggtgtatatggcttttattatgttgaggtggattcctgttatgcccactttctggagagtttttgtcaaaggaatgttgaattttgtcagaagctttttctgcagctattgagataatcttatggcttttattcttcaatttgttgatgtggcatatcacgttgatttgcagatattgaaaaatccttgcatccctgggataaatcccatctggttctggagttttgtttgttgaaagatttttaatcacagtttcaatctcagttcttgtgattggtctgtttatattttctgtttctccttggttcattcttggaagtttgttcctttttatgaatttatgcctttgttttaggttgttcattttattggtgtatagtttcttatagtagtcttttatgatcctttgaatttctgtggtgttcgttgtaacttcttttttttcatttctgttttattgatttgagtcctcttttttcttgatgactctgactaaaggtttatcaattttgtttatcttcgcagagagccagcttttagtttcattgatttttgctgttgttttccttgtctctatttcatttgtttttttgtctgatttttatgatttcttttgcttctacttacttgggagtttatctgttcttttttctctagttactttgtgttgtgtttggaaaagatgctggatatgatttctgtttttttaaatatactgaggtttgatttgtgaccgaagttgctatctatcctggagaatgttccctgtgcacttgagaagaaagtgtgttctgctgcttttagatggaatgtcctataaatatcaattaagtctatctggtccaatgtgccatttaaggcttatgtttacttattaattttctatttggatgatctgtccattggtataatgggtgttacagttccccaccattattgtgttactgtcaatttctgcttttgtggctgttagcatttgctttgtatactgaagtgctcctatgttgggtgcctatatatttgcaattgttatatcatctcggattgatcccttaatcattatgtagtgtccttccttgtcttttttaacagtctttatttacagactgttttgtctgatataagattgctactgtagctttcttttgatttccatttgcatgtaatatctttcttcatcccattacttttattctgtgtgtgtccttaggtctgaagtgggtctcttatagacagcatatatgtgggtcttgtttttgctgccattcagccagtctgtggcttttggttgacgcatttaatccatttacataaatattgatatgtatattcctattgccattttttaaatttgaggggtgtttttttaggtcctttttttccctttcctcttttgttctcttctcttgtgtttcctgcctagagaattaatttcccttagtattcgttgtaaagctggtttggtagtgctgaattctcttagtttttgcttgtctgtaaagcttttgagtctctgtcaaattggaatgagaaccttgctgggtattcttgattgtaggttttttcccttttgtcactttaaatatatcatgccactcccttctggcctgcagaagttttgctcaaaaactcagcttatggggatggggattcccttatatgttatttgttgtttttcccttgttgctttaaatactttttatttgtatttaatttttgttagtttgattaatgtgtgtcttggcatgtttctctttgggtttatcctctgtgggactgtctgtgcttcctggacttaggttaccactttctttctcattttagggaagatttcagctctaatctcttcaaatattttcccaggttctttctctttttcttctttttagacccctataatttaaatattggtgcatttaatattttcccagaggtctctgagatggtctgcatttctttttaaaaaaatattatgtatttcatattgacatttttggtccacaccctgcagcatgcaggatcctggtttccgaagcagagattggatctttggccccctgcagtggaagtgtggagtcttaaccctgggctgccgggaaagtccctgtcctcatttcttttcattctttttctttgctctgtttcaccacagagatttccaccatcctgtcttccaggtcacttatcccttcttctgcctcagctcttctgctggtgactcctcctagagtatttttcatctcagttcttgtgttcatctctatttgtgtgttcattagttctcccaggtctttgttgaacatttcttgtatcttctcgatctgtgcctccattctttttctgagatgcttggatcatctttactatcattattctggcttctttttcaggtagattgcctaattcctctttatttagttgttcttttagatttttattttgctcttccatctgctagatgtttctttgtcttttcattttgtcagacttactgtgtttgtggtctcttttctgcaggtagcaggatcataattcctcttgcttctggtgtctgccccccattgggttaggttggtcccgaagcttgtgctgttatccccttgaaagggagtttgattgatgctgtgactagagcctgcactggatattgagcagggcctccccttgctctgtggttgtcactgccctgttagagacaggatctgctctctatttgttggagtagaagcccctagatctgtttcttagctgtgtttctgatttgtgatatgaggattggagcatttccactggagagaagccactgagtattctttctctggggctgttcacctgtgaatgtgctctattgtgtccctttttgcctgttgtatgggttcacaaagcacagtattcttggcactgcactctgcccaggtaggagggtgctgggtagggattggaacacgggtacccttcaggtggcgataggggtgagctggtcacatggtttgaggagaggagcagaggaggcagtgacagggacgtgcaagccagctccggtaggagccctccctagcgctctgtaggcaggggttgggatatgaggagagagcctacaatggcaaccccaccccttgtgcattactcaacaatgcagcttcatttctgtggttgtccaggcttcctccacgagcattctcagttgcagagttctgcaaccccagcctctcaagttttctcctcatagccatgttttgccaaaagttaaaatttcaccttaggttcaaaacatttgttaacaaaagaaaccactcgttatacataaataaataatttcagtaactaatagagaattacctatcttacttttaacaaacaatcattaaaagaaaagaaaagtagaacagtaaagaaaagtaacagtccgtatatcaccaagttgggttttgactgatatccagactcaaacagtgctgggaagtcctgtgtgacagcagcctggagccccagttgtgaagaggtctcgggcagcgcatctgctccataggtgagacttcagaattgtaggttgggggttcctgcttttaatcccaggccacaaactgatattgtcatcagtctgagagcagattgcagctctggtttcatctttttttttttttacagtgccatttgttttgtcttgtaaatcttggaatgttattaagtccctggtatggttggccagacctcctccaggggctcaacaattccaggatctgcccccttctcatctatggtgccatgcaacttgcactcaccgcaggaaggtagtcaaggcagtgtccaggcaggtcagaagcaaggtcagaagcctgctctgctttctttgtctctcaagcctgaacaagacaagactacttccatttaatttccctaacaaaccaacagcaggcccctccccagatctgctctccaaaccccacgttccagcacccagcatccatgctcactggcaaacacctgtctcaggctggggcatgcagggccgtggcacggaccatctgtgtaggtctcactctgtcctgcctgtcacagaccagttactggactatcctctgaacccccaaggctcccctctgctccagctcatctccctgctggtaagaggccttccccagatgcagggacctctctataccttcaactccccacaaggggtgcaggtatcatcctgcttcctctcctcttcctttgccttctttttttcaccttacccattatgtggggatctttcttgtccttttaggtgtccaagatcctctgctagtgttcagcaggtgctgtgtgggaactgcttcacgtgtagatgtattcttgatacatttgtgggggagagagaaactccatgtcctcctactcccccaccatcttggaaaaagcccaatctcccttttaataaaagtattcttttatttttttttctggaatctcatattcagtatactaaggtaggaaatgttggtgggcaactattaatgtcatgttttgatgttgaaataaggagagatgttactagacaattggtataacttcactggtttccacctctgatggccttctgatcaaccccattgccttctggaacaggcctacagaggtttaagaataggaggctgtgttgttaactctgcaaggtggatctatgttgctaagctccagcagaatcttagctacgaagatgcaaaaactctcacacctgattgatgtcagtttctaaatccacataaccgcttgtgacaataacgtgaagataacaggagcccagcagttgttgagtacttactccatgtgctgggccctatgctaataagaactttgtaaccattttttcatttaatccacaaaaagcctctatgagttacataccatcctaattcccgtcttgtttgtgtggaagctcagagaatgtaacttgcctgagatcacaatgtgagttatcacatcagatccaagacgcaaaggtccataggtctctcagatcctgaaactaattcattacattagatctgaattcggaaagcatcctttggtatagaatttggggaaatctcagttccctggactttttctctataataaactctgtaatttgatttacaggcaagaactgtcagaccgtattggctccctgttccccaaacccttgtgagaatgctggtgtttgcaaagaggcaccaaattttgagagttactcctgcctgtgtgctcctggctggcaaggtaacagcgtcggaatgtagaaaccaagagcatttaacagtgatctggttatttgatgacatggagaatcaatctatcttttgaggcttgcccttttttgtcaagaacccaggccttgtataaaagccgaagctgctaacgaatgttttagaaagactttccattttttacatgtctttgctgccccctggtggctagaagactcccaccagagtctgaaactatgatgttctatgtagaattttagcatctgggcggcaacttgttgggggaacagaaacctgaagggacttcccaaagcaggaggccaaacagcatatccttgcagtagccccacccaccccagctaaagctcagcccccacataaatttctgcgtggaaatcgatttccaaagactggaccgttcattgcccctttgtttccaggtcagcggtgtaccatcgacattgatgagtgtgtctccaagccctgcatgaaccacggtctctgccataacacccagggcagctacatgtgcgaatgtcctccaggcttcagtggcatggactgtgaggaggacattgatgactgccttgccagtgagtgcgccagcctgctcctgagcccctgggggagagcggagccccgggagcagaggaggacttggtcgggcacttgcctcggcgctgaggctgcccatccagtagtgtatcacctgtctttaatcttcgtattttaaaaatcattttgaagctagtggctttaggagttaatacacgggagtcacttttaagcattgccttactaatttttgtacattgttaaagtggggacaatgctatgaaagcttctaataaaaagcagatctattgaagtataattaagtatacaacatactgccagtatttaaatgaaccagtccagtaagttttgacatatgacaactcaaaacagtatttaagatactgatcacattcatccccctgaatgtatttcacctcttgtaacttaaccctcctttctactttcctgtctcacacaactagggatctacctctgtcactttagatttgtgtgaacttttttacaattttatttttctctgagagctctacttggcactgtacatcttaggggaatctttccattctgactggtatgaatgtgaactgtgctcagcctagtgtaaactttagggattgttctgcctacttctttctagtggttctttacccagcttcagcagtttcaacacatgaatgtgatatacttatcagtatagtcatctctcaatatgtgagggtattggttctaggaccccctgtggatactaaactctgcagatgctcaagtcccttatataaaatagtgcagtatttgcatataacctatgcacattctcttgtatactttaaatcatttcttaattacttgtaatatctaatgcaacgtaagtgctatgtaaatatttgctggtacatggcaaattcaagtttagccttttggaactttctgggattaaaaaaaaatttttttttctgtccttggttggttgaatccatgattgtggaacacataaaaaatggggggccgcttgtattcagttacttgtgtggtgattaagccattaaacgtcaaaggagcttatgatagtgcatccagaataatggcatcttattcacagcatgtatcatttcagactctcatatggatggcactgtactaggggctgacagcgccagtataaataaaagcttacatttatgaaactcatagtctctcaggaaatacagttagacaaataattccgacattatatgactaatggtgaaagaaacatgttcaaggtacaactgatggagaaatttaagggagtgggatcaaactatttggattcctttcccacattaattagtataccaatcaaatttctactgtttaaacactttttcctatttgaagtaggactaacaatatttgcaactagtttaaaattagtgaattactgtgagttgcttgaaaggtgctatggaagttacagtagctgtgtagtattatgtataagaagggataatatgacttctagagttgttccagtagagactgcaaatgagccttagaatgaaattagcctaatagatgactaaggtataaatatctctcttataaaataagggctgcattacccacctggtgtttagttttctctttatgtttatgacctgtcttgtaattgtatttcaagttccttaagaccaggagccacatcttacttttcttgctccgattcgagtgccatctgtgttgcagaggactgtgctctgataatagctcaaaatttcttgattaactgctatggctgtaaagtgttctctaagatcaaacaacgtgatgtttaaaattttcaaatgctcatttcctagttgtatgtaaatctaaaaaacaacaaaaacaagaaaggaaaggagaaggggaagaaaggaagagagggagggagaagaaaaggttgaccagcacaaggggactaactgatatctatcccatccctggttttatgagtattaattttgcaaaacagtgatgcatgtaaagttctttccagctattaaacagactcttactaagaatatcaggcaggtgttactacattcatttttgtaaatggaggagtcagggaaaaatagatgtgaagaaaagtcagaattgttactgttgttagtgtggctcagttcagggtactcacctgtatgactctaaggttaaatggatgctgctgttcagagttctaattcttgtgtgcaatggcttagatccttgccagaatggaggttcctgtgtagatggagtgaatactttctcctgcctatgccttccgggcttcactggggataaatgtcagacagacatgaatgagtgtctgagtgagccctgtaagaacggagggacctgctctgactatgtcaacagttacacctgcaagtgccaggcgggatttgatggagtccactgtgagaacaacattgacgagtgcactgagaggtgagcagcccgtgtcctcaggcaagtgtcttacgggaaaagggagagaggggaggaacctacagagtactatactgggattgaggggccacataaggcatcgccttggatcccgccacacagtcatctcctgttttctagtttctaattccttgtggacatctagttataagtttaaggcagaggttgaaaaacttagtgagatgttcagttcagtcgctcagtcgtgtctgactctttgcaatcccatgaaccgcagcacgtcaggcctccctgtccatcaccaactcccagagtccacccaaacccatgtccatcaagtcagtgatgccatccaaacatctcatcctctgtcatccccttctcctcctgccctcaatctttcccagcatcagggtcttttcagatgagtcagctcttcacatcaggtggccaaagtattggagtttcagcttcaacatcagtcctaccaatgaacacccaggactgatctcctttaggatggactggttggatctccttgcagttcaagggactctcaagagtcttctccaacaccacagttcaaaagcatcaatttttcggtgctcagctttcttcacagaccaactctcacatccatacatgaccactggaaaaaccatagccttgactagacggacctttgttgccaaagtaatgtctctgcttttttatagtgagatgaatcatcatttatttcttacgtaggaaacagaaagagctataatttctatatcatctccttttggtctcttgtaaatttcagttgacaaaaaaatcctaacttctttacagatttgtcatccctctttaagtaatctctgggaggtttgattcttttttttattatcaacaaatctgttctgtttctcttccataaagaaatatagaatcaagagctatttatttgatatgttccttataaattaaattgacttagagataaaatgaaatgtgatacatggagagctacagaagggctgggtaaaacctggacgccttcactttctcttggaatctctaataagctcagacttttaaatactcctcggatctttttggttgtggaaaggaagctgagactcatgctgattggtgcccattctaatttggaaaaaggtaaagtttactggatataggagtttggggtgctcaggagtatttccttctgtaatatcttagatgtgaggaacctcacttttaaaatagcaggtcagaggatccagattatctagctgatgatgttcttcctgtgtgcttctcagctcctgtttcaatggtggcacgtgtatcgatgggattaactccttctcttgcttgtgccctgtgggcttcactggttccttctgcctccatgagatcaatgaatgcaactctcatccatgcctgaatgaaggagtatgtgttgatggcctgggtacctaccgctgcatctgcccattgggctacactggaaaaaactgtcaggtaattagatttcatcccattcattcagctcccgcagaattgttgagtgttacacctgtttctttcctaggcaaaataatccccatctaaaagagaaaatttggggtcttaggaatgtactaaaaataaatttggacagcttcttaattatacttctaagataactaagttaatctaagttcttagataacttctaagaactaccaacttcttaacctggtagatttcaaaatggtgatactggcaagattatgggttaacacacataaaattgttacagcaggctaacctagagctgcagaaaatgcatatgggaaataagcacattgatatcatttaggaaagacaaaaagggaaacaaagaacaatcaaaataaagtttataaaattcagatacaacatctgaggggataatgataattatgccctacaatgttgtaacaatctcaaaaccaaactattcacatgtctttcaaattcaaatatttaatattcattttcataaactcttaggatggaacgacccctcagagcctactagtctagcctttcatgaaagaataaattgagccccagagggtcaaagtaacttttctaaggttgcaccccaaacagcattgtgtttaattttatgcagttttacctctcaaacaatgatggaatgatagaatatcataccagcagtccaaataattaagaaacagatgccaaatgtagccagcctttccgagtacacttcagtggcgctttggctgtactggacatgcagataagcacctctgcgtcttaaacagcttgctgctgatcccctggatcaggaggctgttcttcgccgggcttctgcccttcacacagtgtggtggccctctgcccttcccttctttcacagacggtcagtgttgtgagtacggccttcctctccccaggggccaggccacgacacgggagttttggaaaaggtgctcgtccacttgcaccctttgcctcttgcttttcagaagcctgagtttctcccatcaaaatacattctttgttttgtggatgggttcatttgtgccgtgttttggattccacacgtgacagcatggttttcccctttctgacttgacttagtatgataatttctggttcaacccatgttgctgtaatggcctgatttcactctagtaggagtccattttatgtgtgtgccgcattttctttattcatctgtgcagggtcatttaggttgtttctgtgtctcggctgttgtgaatagtgctgtcaacttataggggtgggtgaacaacagggtcctgctgtacagcacaggcagctgtaggcagtatcctgtgataagctataatagaagagattatttaagaaagaatgtctgtatgtgtataactgaggaactttgctgtgcaatagagattagcatggcattgtaaatcaactgtacttcaataaaaaagtttttagtttttattttttaataacagtaaaaaaagtaagctttgggacagtttttaggtttattaacaagcgttaagcctttaaatcctgaacgcttactcaccacagacagatttgatcaagcccatgtgatttctcactcaggagtagcacatggaagctgtggacctatctgacagctttaactcttttctagccctacagggtggccgtgtttctagacataagcgtgatatagggaataacttaaccaattaagttcctcaaattcttaaacttatctggtaagaatttttgaatagcagagctaaaagaattagactgtataaaatgattagcttatctggggacagtgaatctaagtttaaggcttgggtgagggctcttttttttttattaattagtgtgctttcctttgagtttttaaaatgcagtgtagctttttttcattcctgatgtctgaatgttgatatatgtgtctgcctctgtttcagaccctggtgaacctctgcagtcggtctccatgtaaaaacaaaggtacctgcattcaggataaagcagagtcacggtgcctgtgtccgtctggatgggctggtgcttactgtgatgttcccagtgtctcctgtgaggtggcggcctcccacagaggtgagctctgcaccccccgagactcaagggtcagtccatgaagtactgactaacgagcagcactgtagggcaagagttgttattgtgggaggagagggaagggcatacaggaatgaatgggcaaggctctggaaaaagggtctgaaatggaaggtgaagggcaggggagcaagtctagagattccaaaaaggaatgtacttgacgtggaaggaaggcatgttccactttcagcacttgtttatttttttaacatatttatttttaattgaaggataattgctttacagtattgtattggtttctgccatacacaacatgaatcagccataagtatacatatgccccctccctcttgaacctctctgccacctgccacctcatcccaccattctaggttgtcacaaagccccgttttgagttcccgagtcatacagcaaattcccactggctacctggtttatacatagtagtatttatgtttccatgcttctctctccatttgtcccaccctctccttccccagtacccccgggctctgggtccataagcctgttctctatgtctgcatctccactgctgccctgcaaataggttcatcagtcccatctttataaattccacatatatgcagcacttatttatttttaacacaaaacagatcctgagggttgtgaactagacaagaataaaatatgatgtgtcaaccagcttagattagttcagctgaccgtgacgtgttgtgtgctgttccgtgatgttccttcctccattgggtttcgcaggggtgcctgttgaccgcttgtgccagcactcaggcgtctgtatcagtgcgggcaactcgcatcattgccagtgccctctgggctacaccgggagctactgtgaggaccagcttgatgagtgctcgtccaatccctgccagcacggcgccacctgccgggacttcattggtggatacagatgcgaggtgagtaagaggagcaggcaaagtcagaggccttccagaagatggcacgccgcttacaaacacgggcatcctgagtttagctgcatatgtctgattctcacaatttatagatttcttttctttttgcgaatcatgattgcattgctttctaatcactgttgcttttggtcccctgtgcattaagttagaagagctctggtaagctgttttcacagaagtctggaaccgtcttgcttccacaggattgcttccagaatccagagctacagtactctgccagggtgcatttcccagcctacccagcccagtgacccctggtacttctctgaataagcagttgagataggagaagccactttgaggagtgggcctttgacccacgtcatgtttgtaaacagtcattggtcaatcgactaataattctctcaaaaaaaatgttacccaacctgttctgtgtagcatcatactgttacacgtgtatatttgagggcatatgtatcttttaagggatgtatcatgctgcagtccatggggtcacaaggagtcagacacaacttagcaactgaacaacaatagcaacaacatcattgttcttaatgtctgggctgatagatcaagatgttgacaaaataccagagacatgaatttgataccagtttaggccaccaagcaacaccgagaaaaactctgcttctctgcttctcaaaatgagccaaagatggcttcagggtattggtccctgtttcttatttttagttcgaaagccactggtaccattttttctaaaacatagccctaagaagtagaatttattcacttagggcctgcctgctttatatgttctgcaaaactgcacctggcactgctagccacaggtaagatgagccccaggatgtgaagataccaagctcctgctgtccttcagagctctgtgacccagagactctggcctggctgctgagtcatatcaccaaacatgtcagccccctctctgttaccctcttccctctgagttcatctgtcctcctcttcttatccttttttatctctctatgagtcacatctctgttaaggtttgcatgaaaagtccaatgaaagatgttaaagttattcatatgcagtttgcactatgaattgaacatctttttattcagcctatacacagatctttgttttgagctctcaaagtactcagacaacattttgtaactgctgctgttgctttataggttcaccaaaaatggcattaagaaaaagaaaggagatgttgcatagtttttaaaccagaaggtggcactttgtacatacaaaattcgatagctatactgggaagcatacagcaatcagttacagtgattttgctgtgagggactcaaagcattgcccaaatagagccacttcatggtcagtattttcttccttgatcagccctgaaggccctagaacgcctacatctagcatagctagcctgcccacctctgggtgcgcccacccctacatcagccagtttctcacacgtaaacatgtagtttcctgagcatggggatcagtaaatacacgcattatctttactaccatccacatgtaccatttctgtgagccaccaggtcctcatcacatacaaaggaatgaatgttttaaagatgggaaaaccttgcacacagaagggacggaaggcttttgcacaggcatcatttgagatatccctcagaatattcagtccttgccttccttttcaagtggcttttttggctagaagtgataaatgccagtgagctgtgagttgactcggcacgagatggtgagtaaggagagtgatgataccagagaggcgtacaagagctgggtggggtttggcagaagagggtcacagtaacttacccgatttcatttgctcccttgatatgcatccaacaatagtccagcatttcttgttctttttgctttgctcttggcagtgtgtccctggatatcagggtgtcaactgcgagtatgaagtggatgagtgccagaaccagccatgccagaacggaggcacctgcatcgaccttgtgaaccacttcaagtgctcctgcccaccaggcacgcggggtatgaactcagccttacctatcttccatccagggcattctctaagttataaatgcatttttagtcttgtgaaggaatttttaaaacaagattcagcattattctgaatcttagagattcaagccatttcattgctctcttgccaagctctggtgttctgacgcctgttctcaattctgtctggttgttgttaaaacccatgaaacacagaatgtgcaaatgacataatgttgcagcaaagttaatctggttagcaagatctcttggtactttgagggaaaacaaccagtagcctcttgaataaattatttgtatttaccagctcgtgtatttttctaaacttcaagtcttacctccataaagtgggaaaatgaatgaaatgaaaatacttgcctgttttcctaagcccaaggggagaaggttgatggtccaagaatgaactaagaattacaataagacctaatgagatgcaaccctagatggtggatggtggaaccatcattccaccaggggcattcccttgcctgcaaacaatctcctggaaagagcttggagtattattttttagaagagatatagttataatggtgcctgctctgagcagcatgtgaaaagaaaaagccatccacagtggtggaaaattgattctcatcaaagagaatagaatgttagagaagtatttatactgtcttaaacctttgggtcagtggattttggctttccttcttgagttcagagttggctaaattagaatggaaaagttccccagtagtaggctagttattgagcagtgagattaacagggaagtcaaaactaaggagaaacagcctttaaatatttgaagattcgttccactaaaggagagttgttttctgctcagtacttgaaagagaagtagaggttaattttaattgcttctagaggtaatattatccattaaaaatcctgttactatttttattgaggtcacattaaatttatgaatttgtataaagaagactgacatctttagaatgaggagtcttcctgaccatcccattgtgtctttctgtttattcaagtttccttttgtgtcttttaggtctactttaaagtctgcatgtaggtgtagtggatttcttgttaagattattgttagatattttatcttttgcctagcatgctgcagttcatggggttgcaaagagtcggccacgactgagtgactgaactgaactgattgctgttgaaactgaggcctttttaaaaaaacatttttcttttctttccaatagtcttgctattacaagtggtaagaatacagtattgtttttctttcttctgtaatttttttgaattgatcatgaaatcacttctagaatagtcattgatttcttttgtttcttcctcaaaaatatgtacagatgttcatacttgatgggccttttacatctgtagcacattaaatgagttctgttttaaatggaataacctttgagctctcaacaggatatttcccttctattttttgataaaagatatttgtgcacttacactattttacagaaaaagtcatttgtgggattcaaaatttacttccagttcttaccaatgattacttgtagtctatttatttatagttatattctttttaactgtttttatattttaaatcaaaatgaataaattaatgaaaagttaccaaatctctcttgagttccaatttcctcacctttcaagtggaaaaataatactagctatgccctaagggatagcttcatcactgggttgtgtggggagtacatgagaagccctgagaacatcctttgcttgctggtgtccaggacgatgggcacactcctgggtcaagcgtgtgttatgctctgcctgaccaaaatggttccagcctgactaattgtggaaatgccaccagggctggttttcccttcctggaaagcagcgttccaagaactgtcataattttctctccctcctctctctcctccaggcctgctttgtgaagagaacattgacgactgtgccagaggtccccactgccttaatggtggccagtgtgtagacaggattgggggctacagttgtcgctgcttgccaggctttgctggagaacgctgtgagggggacatcaacgagtgcctgtccagcccctgcagctctgagggcagcctggactgcattcagctcaccaacgactacctgtgcgtctgccgcagcaccttcactggtgagctgagcacctttccagcttccccagccactctgcctcacagtggggtgggggtttcagtgaggaaactgggccctgcatgacacatctagacccaagggaagcttttctggcccatagactgtagcccccctggctcctctgtctatgggattctccaagcaagaatattggcatgggttgccatttccttctccaggggatcttcctgacccagggatcaaacctgggtctcttgcattgcaggcagattctctaccatctgagccaccagggaaggccacaggtagtcgttggcgagctgtatgtagtctaggctgccctcagaggtgcaagggtgaaaatctagaccagcttaattcaagggcccaactttttcctaggcctgcgctccacagatgtttatgtttcctgagagatcctagctcttttgttgtatattaattacatcttattgtagcagaaatatgaaaaaaagaaatagaatgttgggagaagttgagcaaagtaacatttttaaattgaggtaaaatacatataaataaagtttaccatctttaccatttttaagtatgcagttcagtggtattgaggatattcacattgttatgctgccatcaccaccatccatctctggaattcatttcatctcatgttcaggaaccttacatctaactctggttttgtcaccctgcctcctgtggcatgtagcgacttgagtggcttggttgttgccgccatagtgacctttctaccttctgggatccaaagaagtttagggtcttcttggacgattaaagggaatagatccaaattgggctgtttaaccaaaaaccaactgatgagggtatgaacaggaaaacttcagaggtcacaagcggggcctgcacgctaagacttggctgtgttcatcacagattacaaagatgagtgagtcctgcctccgaataggggttttatcatagacagttactaattatttctggagaaggcaacttggtgactttgggggactaaaatagctgtttatatctaaatatggcagtgccatcagttacccggaaatctgtcttgcactctggggtcagctcaaatcttttgctgtagaagtattctttggaagtcagatgagagtctgcattagtctacttactagtaatctggaaagttgaactctgctacattctgggcttattatatccagacatcccccccttccagttttaaagatatattacctttaagaactttggaattttatttaaaaaagggtggggaggtggattttgaaatatggaaaacacctagatacagcatcaaaagagaaacaatccaatacgaatgtcatatgtttgaggcaaccctggacagaaagactatgaacaaatctgtcatctcacactggtcatgatatgcttgagaactagaagacaactgactcctgttcctttcattacctctgaggcttcctttatctggaaatgctgatgagtcctaggaagaaagaaggaaataggcaaaaggagtggagaccaccttgaattggggtcccatagccagaagtggcggagaaggcaatggtaccccactccagtactcttgcctggaaaatcccacggacggaggagcctggtgggctgcagttcgtggggtcgctgagggtcggacactactgagcgacttcactttcacttttcactttcatgcattggagaaggaaatggcaacccactccagtgttcttgcctggagaatcccagggacgggggagccaggagggctgctgtctatggggtcacacagagtcggacacgactgaagtgacttagcagcagcagcagcagccagaagtggtgtttctacattttccacacctgtgaattaaaaaatactttgactctcaatcacaattatggtgggagtgttaagctgtgggggtttttttgtatgtttgttttaaatttttatgggaatataattgctttgtaatgttgtgttagtttctactaacacaagctgtgtaggtaatgctaacataagctgtgttttaaaacaatgccaataaggttacagaaaggctggaacattttaaaacagatgttactgatgaaaattcaatataaactgcaaatcaacatttttaaaaattaatttattttaattgggggctaattactttacagtattgtggtgggtttgccatacattaacatgaattagccacggcccctgtcccaaaagtttttctttttaatttttattacaatatagttgatttacaatgttgtgttattttctgctgtacagcaaagtgagtcagttatacatatttatcagtccactctattttaggttatttccccatgtaggtcattgcagactactgagttaagttccctgtgccatacagtaggttcttattagttatcagttttatctatagtagtatatatatggtaatcactgttttagatgtattggcctggtgtagcctgtccaggctactgtaaccccactccagtactcttacctggaaaatcccatggacggaggagcctggaaggctgcagtccatggggtcgctgagggtcggactcgactgagcgacttcactttcacttttcactttcatgcattggagaaggaaatggtagcccactccagtgttcttgcctggagaatcccagggacgggggagcctggagggctgccatctatggggttgcgcagagtcggacacgactgaagtgacttagcaacagcagcagcctgtcttatgaagtagacagtgttaacaaaatgcagtgaatttttgctaaatgtttttgacttacgaaagctaaagtaccttcaaaagagcttaggtgtcattttctttctttctttttttttttttttgaggggttagtcattttttgtacacatcttgttttgtgagtcacttcagtcatgtgccatttgcacttattgctgtagataagacagatgagggaactgtcctgagtgggtgatgggccaaggatgttgggatttagcgtgtgccttcctcatcctctcatgtccccttaggcttagaactcaattctcacacctcttgctccctctcaaatcctttgactagctcacatcctggtagtatcctgttcaataacctgagttactgcttccaccttttaaaaccccctttcgttttctactctgaggtcgtcactgtgaaacgttcgtcgacgtgtgtccccagatgccttgcctgaatggaggcacttgtgctgtggccagcaacatgcccgatggtttcatctgtcgctgtccccaggtgagtgccacagtgcctactgaattccatatagcctgtgacagagccgagacgaaacctggcatttccgagctcggtggggagctttcttggtggggatgtttcttaatgttagcctctttaggagaaaatgcttccgttttccatttaaaactattaaaatacttccagaaacagtgagctccctgatctgcgactgtcagtcctcagaagcactaagggcagtggcatattcccttgggaatagggctagtgtatttggcttctgggtcttgtgctggagggtagtcttgctgcccagactgggacagagtaattggaaatgctactctgctcacatccctcgacagcagttatttgggaacagactgcttcttcaactagaaggaagtcttaacgttagccatttgctctgcaaacacttttgctcctgccagaggctaaaagcttcctaacagatgagtagagggatatcaaaagaaaacctgtccagtaaccttggcctggactgagccagacgtccaagaacgaaatgacacaggcaagtcttttagacatctgatcctctgaagtgtgtattttccccggtaaagtcactgtacgagtgatctactgatgatttggaaaggtgctaataggttcagggtcaccttatcctaacgtgaactccagacttcatttctagaagcaagctcttagagtaaaaaagttctgtattcatcctggaaccaccaccctgacctgtaggttgacttgaagaagtctcttcctataactcggtccaggaggctacctggagggatcttagccaagagcctggtcttcacctccctagaggtgtggcggtgaggggccgggggggagaatggggcctgccctcacgggtcacctgccatcctcactcgttcactgattcccacagggcttctctggggtgcggtgccagagcagctgtggacaggtgaagtgcaggagaggggagcagtgtgtgcacacggcctcgggcccccgctgcttctgccccaacccccaggactgcgactcgggctgcgccagtagcccctgccagcatggggggagctgccaccctcagcgccagcctccgtactactcgtgccagtgtgccccgcccttccggggcagccactgtgaactctacagcacccccaccagcacccctcccgccacctgcctgagccagtattgtgccgacaaagctcgggacggcatctgtgatgatgtgtgcaacagccatgcctgccagtgggacgggggggactgttccctcaccatggaagacccctgggccaattgctcctccccgctgccctgctgggagtacatcaacaaccagtgcgacgagctgtgcaacacggctgagtgcctgtttgacaactttgaatgccagaagagtagcaagacatgcaagtaagcgcccagggtccccagaactgaggggcagcgctgtcactaactcacctcagtctcttgttcttttgctgctaaccactccagtgcttctgcccaagccgcctctgccttctggactggcaccagttgcccccttctcccttgtgccatcctgccccatcacacgctaccctgtgctctcccttgctgaccaaggggcagaaacgctcactgcacagccactctctctctgcctgtctctgcttcctcgcctgctgctgtcacaggttcccaggggaagtgacttttggaagtgttaccactgtcaggcagcctctcacataatctgcctgcagcatggttgcaaaggtctgtacccctctctattcatcccgtgcctttccctaagactgggtttcccctccagatttatcaggaagcatctgctagattagtcagcttaaccctcctggtcttcactgctgcaactatagggggctttgtgggttacttaatagctttccatttagtcatcccatttggttcaaccctgattaattctcaacaatcttgtgaggcatagatgttgttaatggtctttaacaggccagggaagggagacttgggaggttcaagaacttgccagagcagatatagctcctcctgactcctgatctcctcactgagctagagtggcaagttggaccaggtggtgtaaccatcagggatgggagtgaggagggagaaggggtgagtggaaatcaaacaatttttgcatcaacgggccttgggagtcaatttccatttcccaatgtttgaaagatgctgtacgaattagatctggcatcctgtgtgggacacacttctcgccacctaccttccacagtgaagattcagtcttgattagaaaagaaatgggccatatcaaatgggccaaaggtcaactgtacagcatctcttgttggtatggggctactttccagtttctggaagcactctctagagtcttgttttactgctggaagcccagaggcaatggatataaaaataaaggaaacacgaaccaggtatttttgtttcagatttgtttacaaatctgatttaacatgatgacaagctgcctaggggcccatgagtttagtgagtagctttgtttctcattcagagagcactcactgatgctaaggtgtatagactgtatatactccaagaagtcaggcacggagagtcacagaggcttcagaggacattcaggatctaatctgagccgtagaagacgggtaggaaaatccacatagttccaagtggaaaacaaatagcgctccactgtgatcttaccatattctctgcctccctctgcctagatatgacaagtactgtgcagaccactacgaagacaaccactgtgaccagggttgcaacagtgaggagtgtggctgggatgggctggactgtgctgctgaccggccagaaaacctggcagagggcaccctcgtcatcgtggtgctgatgccacctgaacagctgctccaggatgcccgcagattcttgcgggcactgggcaccctgctccacaccaacctccgtatcaaacgggatgcccagggggaactcatggtctacccctattatggtgggaagtcagctgccatgaagaagcagagattgacacgcaggtcccttcctggagatgaagaacaggaagtggctgggtaggtgtttaatttctgaacttaaagcttaattttatcaagctgagcactttgatacacagatatcttaactgcaactgcacctataaagatgaaaggtcagaaaacaaaacagtcaactgaataacacaagcctgtaatctcagtctttaaggttagtgctcaaggtttgccttgatcttggaatcctgaaaagtgggctgaagcaagtcaagtggcaggatgtcagaacgggctcatcatgtgctagaatctctaaccatttgccagagttggggtaaatctctctagtgatgacttctctttgtattaatcctgggcttcttttcaaggcccttcatttctgtctctttgacaagggtgatgttctgcatatattatgttatccacactgaggatttcttcgtatctcacaatgttcagcttgctagctagctcgagtacagatgcagagagaaacgagagtaaggaacaaaaagcaaaaggcaggggtgtgtttttagagtagctgtatgtaccgttgagtacaccggaagggggaaggggtagaagcagcccaccaaaggcaacctcaccccattttctcaatgtgtcttatgttgccgaaaagtcagaacacttggatgcagccaaaccaagaacatggaagtgttagtcactcagtcgtgtccgactctttgtgacctcatggactgtagcccaccctaagtgagaattaggatgtaaaccatatcttaatttctgggatcttcctggagacagcatcccagaggtagagggcccaaggctgagggtgaggaagcgggtctacctcagattcctgggttgacattttctcgccatttctccttggctcccctcagctctcaggtatttctggagattgacaaccgccagtgtgttcaagactcagaccagtgctttaagaacacagacgcagcagcagctcttctggcttctcacgccatccaggggaccctgtcatacccacttgtgtctgtcgtcagtgagtagctctgaaatgaaggggaaagtgtgctgaggaatgccacttgcaggcagagagaatggggcacagcttacagtgtgcaacgctctgtttctcagggctagcgaggtcaaagttgttctctgaaggagtttagtgggaatattgagaggtggatgttttgttcaccactttccctatctctctgcactttcaggtgaatctctgaccccaaaacgcactcagcttctctatctgcttgctgttgctgttgtcattatcttgtttattatcctgctgggggttatcatggcaaaacgaaagcgcaagcatggctccctctggctgcctgaaggtttcacccttcgccgtgactccagcaaccacaaacgtcgtgagccagtgggccaggatgctgtgggactcaagtaagagtttgtcaacaagttactattcatggtagtaacaagtatggataagtggaaaatcagatcttgttgaatcatgattttaaattcagagttctggccatgccatgctactatacttgaccgtgatgctgaatgcctgcttgtggctataaaataagaatctggatgcttcagttctgtacgtattatcacagggatgctcagcttctgtgatgagacacgcctttgttgtaagctcttgcttagtggaaaaggaaatgatatttactcaggcaatgggatgtaatattgcccattttttccctgggtcctgaaagtctgactgtagccatgataatgtgtgatggcagaaaaattatgaaaatttctatgttcttttatgatataaccctgctcttattttataccttcatgattctgtcatgttagaaatctctcagtgcaagtctcagaggctaacctaattggttccggaacaagtgaacactgggtcgatgatgaagggccccagcctaagaaagccaaggtaagctggccatggtctgctcatatttcacgtttttgtcctttggtatctagagtatcatgaatgggagagaagggtggtagtctgtacatgttgcccaggccttgactatcctaggttgtttcaaaaatcaggaatatttaggtcattgatggccttgggttactatgtaagtttttcagaaagaactctttaaaaataataaaacaaacatgcttccttcctcaaatgtcaggttgatggtacttgaataaggactattatgtgtaaacaccagtttctttcatagccagatctctcccttattcttcctggatacttcaagggaaggtggagttagttagtggaggaaagccggtgatcactgagtttggaggctttaaatcttgatccctggaaacaaaagccatatagcagtaagaggtacattgggctgggtctgacatgaaaaaggagaccattcacccatagacatacacggctgggatatgcatgtattccacagatattctgaggaaataaacttgaggaaaacaggcatgatggttaagaaaattactacagtcaggactggattcaagtcccaaacactggcacattatttaacctctttatatttacttatccttaatctgtaagatagggaaaataataatgattctttcaatatgggtgaattgccttacctgttttctatcacatactgaatattccgtaaaggtcagctgcttttaaaagtataataattatccagcaaatacttcctgaatgctggctctttgctgggcactggggtggatacagggtacaaggaggcaaccttgaacaaggcttgctccctgtcctgaggaacctttcaggtagcagtgggaactgccatgcaatgctgtgtaagcacctaacacaacgcttcattaaggagagtgagcagcgtgttaaagtctgctctctacttgaagggtagctagaagttagtcagtcaaagaattgggagagatcctggggacgtaccagagtgatcaggagagtttacctcttctttcaggctgaagatgaggctttgctctcagaagaagatgaccccgtcgatcggcgtccatggacacagcagcacctggaagctgcagacatccgtaggacaccatcgctggctctcacccctccacaggcagagcaagaggtgggcgtgctggatgtgaacgtccgcggcccaggttagtgcctgcgagccttctctctgcactgtgccatgcccaccccctggttccaccttatccctctgtttgccccactcagagatcgaggaaatcagactggaaatcagcttgaggaaatgaacgtctaaggaaaacaggcttgcagaaattatcaatttgtatgagaaaagaggcaggatttcattttgtttcaccttctgcatgcatacatgctaagttgcttcagtcgtgtccgcctctttgcgaccccatggactgtagcctgccaggctcctctgtccatggaattctccaggcaagaatactggagtgctttgccatgccctcctccaggggatcttcctgaccgagggatcaaacccacctttcctgcattgcaggcagattctttaccactgaaccaccagggaagctctcacataatgcgtgttcatcaaccaaaaggctgattctttgggatagattttagtggggtaaaaaaaaataatatcccaaagcagaggaatagagaatttgtttagttcgtaccttagtgtatatagtttattaatactggatattttaaaatgtccaatttaaaaaagcatagcacttagaaacttgaatagataagcttgtttaacttagagactagctcctctttacagaaaggatactaccaagggaaaatcaattgccatttatcacaagaagcacagggttttttctgaaaagaataattttcttcaaattttgctcttccagcaatagggttaagtgaacatgaatgtctttcccctccttgaatactatttggaatttccctttcctccagatgggtgcaccccactgatgctggcttctctccgaggaggcagctcagacatgagtgatgaagatgaagatgcagaggactcttctgctaacatcatcacggacttagtctaccagggtgccagcctccaagcacagacagaccggacgggtgagatggccctgcatctcgcagcccggtactcaagggcagatgctgccaagcgtctcctggatgcaggagcagatgccaatgcccaggacaacatgggccgctgtcctctccatgctgcagtggctgctgatgcccaaggtgtcttccaggtaaagatcatgtaaagagttgattcctaaggaatctagaatatttccccttcattaagacacgtaataacccattatatttgtccagtgattctttgagagaataaggcagatgataaagtcatgcttgctggataggaaagcaggaaagggaggcaggcaggcagagctgaccatatacagctagctcatggtaaagcaggtaccaccagtcttctgattgttcatcagcgctttgttttttgtttgtttgttttgtttttgatgaggcaaaataacctcccaaatgaaaagatcaggtgcatgacacctgcctccgactagtgtctgtcagcttctccctcgagatttatctgactctatgggcttccagctgctccttggtggttttcctgacctgagttcacagtgcacacctgatgccctattattttagccttaagaggaaattgaaagcaattctgtaccatcttaacttgtacaccacaattgaggttgtggtattttcccacattccctcttctttctttagaaagcagaggtacattaatttacaaggccactgtagagcttgagcacctgtttgtatattcattcatcttattcctccattcattcattccacagagattaggtgactgaccctagcagaacctggacacgaagatagcaaaacattccctgccctccaggaacttattgtagagcctcaactctgatgcttttatgtgtgtcttatcttagcttcattatcttttgtattcagctgagtctcttttctgtactttctcatattctagatactgatccgcaaccgagtaactgatctagacgcgaggatgaatgatggcactacacccctgatcctggctgcccggctggctgtggagggaatggtggcagaactgatcaactgccaagcagatgtgaatgcagtggatgaccacggtagggatgagcagcagggattcagattcctacctgcaaagcaggcctctaaggaaagaattattgcatgatccctaaagagctgtctcagatccgaatccaccaaaaattcgttcattcattccatcttccttttgcaatattgagttccaagatctgagacagtgcgaagtccctagatgaagttgggaagggatttttagtgagagttcttggacgtaagagcaggtctatgagagttttcctgcataagttcccaggtataccactcttgttatgaggatatgagagctgacttcatggaaggggtagggtggtgagatattctaactatatatcctggcatgtaataaaaaagcaggttattgtcttcagcatgtgacagggtagattctgccacacaaaggatgtggtaccgtagacagatgatccttttacttagaggtcttctgaaagctaggcagcctgtaccaaagtatttctagaataggggaatatgaagataatctttggtttttcctttgggcccccagagaaaactgacttctagctgttgtctgagaagttcaaggtttccttgtacaactcataacacttcccgatgggaggggtaggacatgacctcttactctgtctgcttataaaaatgttttttcctgcaggaaaatctgcccttcactgggcagctgctgtgaataatgtggaggcaacccttttgctgttgaaaaatggggccaaccgagacatgcaggacaacaaggtacagtctgggctctgagctaggggcaggtgcagcagtgcctcggattatgcatgaggccattccttttctcctgtagctgctctgtaataaggataggcaaagatggaagcagactgggcaggaaatgggtccagagtgcctgagtgcttgggcttatccagtgaaatgtcagagttgacccttagcctgctcactctgcaccaggctgtccctttgataactttggtgtaaccttttctgcctttctcttctttgacatttccctttttcctggtctctgttctgttcacacacacttccttcctttttacttgtttgttcttacttgttttcctgatgctccgcgtcccccagccctgccccgttcttgggctccatgatgttttcctgcttcttctgacttctgtgtcatgcgtccctctgttgttcaccttaccttctcttgttcatttcctcttttccattattttgttctttgtctcagatgttttgtctgtctttctttcactttcccttatttttctgtacatgctttaggttcttcccctcataccttgatttctgttacaccttttagaaccctattttgataagctcagtgttcttgcaggtgaatttatggctcagggacatgctttatttcacactttccccattaagaaaacaaagccctcagtagggcaaagctggatcttggggagaagtaaaataatttttctttatgtataaattacagatagccattcagtacataggtaggtgcacactttttatctgtggtattaaaatttcatgtgggaaggcagttaggaaaaaatgtctaaaggagtgataacaaaaagattgagaaacatggctgtattctcaggagtgttattaaaatgcactctgcatgggctttttctttctttctttttttctgtaggaggagacacccctgtttcttgctgcccgggaggggagctatgaagcagccaagatcctgttagaccattttgccaatcgggacatcacagaccacatggatcgtcttcctcgggacgtagcccgggaccgcatgcaccatgacatcgtgcgcctgctggacgagtacaacgtgacccccagccctcccggcacagtgctgacttctgcactctcacctgtcatctgtgggcccaacagatcttttctcagtctgaagcataccccaatgggcaagaagtctagacggcctaacaccaagagtgccgtgcccactagcctccctaaccttgccaaggaggccaaggatgccaaggggaacaggaggaagaagtctctgagtgacaagggccagctctccgagagctcagtgactctgtcccccgtcgattccctagagtctccgcacacatatgtttctgacaccacctcctccccaatgatcacatcccctggaatcttacaggcctcacccaaccccatgctggccactgccgcccccgctggccccgtccatgcacagcatgcactgtctttctctaaccttcatgagatgcagcccttggctcatggggccaataccgtgcttccctcggtgagccagctgctgtcccaccaccacattgtgcccccaggcagcagcaccgcagggagtgtgggtaggctacatccagtccctgtcccggccgactggatgaaccgcgtggaggtgaatgagagccagtacaacgagatgttcggtatggtcctggctccagctgagggcacccaccctggcatagctccccagagcaggccgcctgacgggaagcatttaaccaccccccgagagcccttgccccccattgtgactttccagctaattcctaaaggcagcattgcccaaccaactggggctgcccagcctccgtccaactgccctccagccgttgcaggtaccctgcccaccatgtatcagattccagaaatggctcgcttgcccagtatggcttttcccactgccatgatgtcccagcaggatgggcaggtttctcagaccattctcccagcctatcaccccttcccagcctccgtgggtaagtatcccacacccccatcacagcatagctatgcttcctccagtgctgctgagagaacacccagtcacagtggtcacctccagggtgagcatccctacctgacaccgtccccagagtctcctgaccagtggtcaagttcatcaccccactctgcttctgactggtcagatgtgaccaccagccccactcctgggggtgctggaggaggtcagcggggacctgggacacacatgtctgagccaccacgcagcaacatgcaggtctatgcatgaaagaatctgcctccagcctagacacagaactcctcttgtaaatgctgctgaggaacaaatgaaggtcatccgggaaagaaatgaagaaatctctggaaccagcttctggaggcaggagagaggagaggctcttatcttgtagataacccgaagaagcgagttaattagcttcactgagcatctgcggggtttggggaacatggaagggacaaggctccttgtagtctcttgcccgtcaagtccccaagttcacagaactgcaagatgaatacaagacttgggaccacatttcctctcttcaatacagagaacaagatggatgcctgttgtagacattcttgcagcctggagtgcatttttcagccttgggggcttctgccatatccatgagaagattctgcagtagactcctcctgggagttgtgccctggaattctgccagatgtgacctgtctcctgttctcatccttggaaaattcttttgacttcatttggtgctt

SEQ ID NO: 186 - DNA, 289040 bp, Hippotragus leucophaeus
  source 1..289040: mol_type = genomic DNA
tccggtcccatcacttcatgggacatagatggggaaacagtagaaacagtgtcagactttatttttttgggctccaaaattactgcagatggtgactgcagccatgaaattaaaagacgctctctccttggaagaaaagttatgtccaagctagatagcatattcaaaagcagagacattactctgccgactaaggtccgtgtagtcaaggctatggtttttccagtggtcatgtatggatgtgagatttggactgtgaagaaggctgagcaccgaagaattgatgcttttgcactgtggtgctggagaagactcttgagagtcccttggactgcaaggagatccaagcagtccattctgaaggagatcaaccctgggatttctttggaaggaatgatgctgaagctgaagcttcagtattttggccacctcatgcaaagagttgactcattggaaaagactctgatgctgggagggattgggggcaggaggagaaagggatgaccgaggatgagatgctggatggcatcatggactcgatggacgtgagtctgagtgaactccgggagttggtgatggacagggacgcctggcgtgctgcagttcatggggtcacaaagcgttggacacgactgagcgactgaactgaactgaactgaactgatacctgcctatcttgggtcaggcctcatggacctggcttccatttcttgactcttgggtcctagccaccatgctgtgaggcagtccaagctttaaggtacaggccacgtgggaatggcaatagactcacaccagatgtaagttagtacaccttcacatgcttccagcctccagacccaagttacttcccacctttgtgtcaccctgactgtcttggtatatagatgagctatttccatggtgtctttttgaattccattctgaccaaaagaatctgggagcatgacagatggtcactatttttgttactaaacttggggtggtttgttacagcaataggtaaagacctgtctgagtttgtgtttgacttttctgctttctgaggtgggccaagagatagaagggaactgctctggccatctgccctagtatcccttcctttcccatacctataagggatcagtacacaggtttggctgatctgaccatctgtgggcaccagtgggtgagcagaacataggggctttgtggtcagagcagacaaaggctggggtccacagaagcctgaagagccagtggtcacagggatcctggaggagggtggagttcataaagggaagccacaggcaggtttccactgaagacgtggctggagggcagggcaggggatcactctgagttatacctgtcaattgaggatctgaggtcaggggcatcttcacaggatcacccacaaacacataaaatatgcgtaaacacacattcacacaaacctaccactgtatataatataagcaaaaggattttattgcagaaatgctgaaatttgcatgtacattcaagtatggttggcccttgatcaacgtgagagctagggatgcacaactgaaaatccatgtgtaaatggacctacacagttcaaactcatattgttccagggtacacagtaccacgtacttcaaaatacacactgttggcctttgtgtcagattccaatgatgctgctctttgctgagaaaacttagagacctcctaatttggaatttcctgagccatccaggaaaagtgtgactttatggtgatatcttggtaaaatcaccatgtatttcctgaactgtccccaaccactctggctgaagaaatccagtccctattcacagggaagcagggccatatgaatcacactacaggtttctagtgatgcttctgtatccaattgttgttcccagttgccaagaagggaacccccatctggacctggtttcagcaaccaagagggtgtgttggcaataaatcaggatccgagatagctcatggtttggtccaacatggtacatggccctggagactcccctgctctgagggaccttcactaccatgtgggtttgccaattccttgcaagggtgagatttcttccataatttaggccatgcgtgttcaccccctggagcaggaataggggtgatttcactacaaatgtttagcggctactcaagggacatagactaggcaggcttggggtcagcacgtagatgctggggacatgggcatgaggcatggagagccgtatggtagccacaattgccctgctggtgcgttgtgacccttctctgttcaggttggcactcacagtcagcctcccactgtatggagaccattcagtaagggcagggtagcctggaaccttctgtctgccccagatgcctacacaatcatactctgggacccccttaccactttcccatgtaacagagttctcaaagtgctggaggaagacttggccaaggtggcctccactccacgtgaatagggttgttgctgtgtccacactggctgcaagtggcagtctgaatagagacaactactaatgtggcacttggccttctcttggggaggctggggtctcttgctggtgtgccagcactggtattgctctgtggcagtgcccactgtgctctggggggcctggcgaccctgcatccttggtctttgctcctgggcagcccccaccacaccctgctttgtacagttcagtttggttcagtgactcagtagtgtctgactctttgcaaccccatggactgcagcatgccaggcctccctgtccaacaccgactcccggaggttactcaaactcatgtccattgagtcggtgatgccatccaaccacctcaacctctgtcatcttcttctcctcctgccctcaatctttcccagcatcagggtcttttcaaacaagtcagctcttcgcatcaggtagccaaagtattggagtttcagcttcaacctcagtccttccaatgtacacccaggactgatctcctttcagatggactggttggatctccttgcagtccaaggaactcttcttcttcaacaccacagttcaaaagcattgattccacagcatacgtgttataagtgtataccttcgaacacctagtgtaactgggcttcatggttctctcagaaaggcttggagaggaaactcccataaggataactttttcagttctgcctgttacactgtaggtgagccaagagctctggactttctgcagtgcctagtaggttaaagcgccagtggggcttcccagtccacagtaagcctgtgtgtctgtctgtgtgtgtgtgcctgtgtgtttgtgcctatacatatgtctgtgtgttggggtgtgtgtagttatttctgtgtctctctgtgtgcctgtttatatttttgtgtgtgcttctgcctctgtgtgtgtgtaatgtctgtgatgtgtgtgtgtgtatgtttgtgtctctgtgaatagtttacctgtctcggtgtgtctgtttgcatttccttatgtgtccgtgtgtgtccaagtgtgcatctgtatgtgggggtggctgtgtgttgtttgtgtgtgtgtgttgtgtgatacagtactttccacaagtgtaagcttcacagctctaggctggaggcaggaaaccataagaaaataagatgaatgctgatcaggtttgccagctgtagtagagaactctgaaagagcagaacagaaaaaagttggcagaatatttactaatttcacatttttccaattcttgttcatagggaaaaaactgttacaagtatcagtacttggctaccttctatcaagcagagctgcatggggcacagtaagcgctggctgcacctagtgttcagagagggctctgccccatggcactcattttggcacatactaaaattggaacacatgccaaaattggaaccatgcagagaagattagcatggcccctgagcaaggatgacgtaaattcgtgaagcgttttgtattttcaaaactcttagaggaaaccataagcagaacactctttgacataaattgcagcaagatcttttttgacccacatcctagagtaatgaaaataaaaacaaaagaaacaaatggggcctaattaagcttaaaaccttttgcacagcaaaggaaaaaatccataaacaaagcaaaaagacaactctcagaatgggagaaatatttgcaaacaaaacaactgacaaagaattaaactgcaaaatatacaaacagtccatgcagctcatcagataaacaaacaacccagtcaaaaaatgggtggaagaccaaacagacatttctccaaagaagaagaaatacagaaacacaaacatatggatggctgacaagtacataaaaaaatgctcagcatcactaattagagaaatgcaaatcaaaactacaatgagatatcgcttcataccagttggaatggccatcatcataaaatttacgaagaataaatgctggagagggtttgaagaaacggaaccctcttacattgttggtgggaatgtaaatcggtatagccacaatggagaacgttatggagttaactttaaaaactaaaaatggaactaccatatgactcagcaatcccactactggacatatacccagagtaaagcataattcaaaaagatacctgtaccccaatgttcatcacagcactatttacaatagccaggacatggaatgtccatcaacagaggaatggataaagaagatgtagtagaaatatacaatgaaatattacttgagactgtcatacagaatgaagtaagcagaaagagaaaaatcaaatattgtatgataaagatgatctgcaaagcagaaatagagacaaagatgtagagaacaaacatctggataccaaggggaagtgagtgtgtgggtaggatgaattgggagcttggggttgagaaatatacatatatatacatgtatatatatatatatacatatataatgtataaaatagataaccaatgagaacctgctgtacagaacagggaaatctactcagtgctctttggtgacctaaataggaaggaaatcctccaaagataggatatatatatgtatagctgattcattttgctgtacagcagaaattaacattgtaaagcaactatactccaattaaaaaagagagcgagctctggtctctgatcaggagcatcttttcttcatttcttttttattaaaaatttttttatttttttaaatttatttttttaatctaaggataattgctttacagaattgtgttcagttcagttcagtcgctcagtcgtgtccgactctttgcgaccccatgaaccacagcactccaggcctccctgtccatcaccatctcccagagttcactcagactcacgtccatcgagtctgtgatgccatccagccatctcattctctgtcgtccctttctcctcctgcccccaatccctcccagcatcagagtcttttccaatgagtcagctcttcgcatgaggtggccaaagtactggagcttcagctttagcatcattccttccaaagaaatcccagggttgatctccttcagaatggactggttggatctccttgcagtccaagggactctcatgagtcttctccaacaccacagttcaaaagcatcaattctttagtgctcagccttcttcacagtccaactctcacatccatacatgaccacaggaaaaaccatagccttgactagatggaccttagttggcaaagtaatgtctctgcttttgaatatactatctaggttggtcataacttttcttccaaggagtaagcgtcttttaatttcatggctgcagccaccatctgcagtgattttggagcccaaaaagataaagtctgacactgtttctactgtttccccatctatgtcccacgaagtgatgggactagatgccatgatcttcgttttctgaatgttgagctttaagccaactttttcactctcctctttcactttcatcaagaggctttttagctcttcttcactttctgccataagggtggtgtcatctgcatatatgaggttattgatatatctcccggcaatcttgattccagcttgtgtttcttccagtccagcgtttctcgtgatgtgctctgcatataagttaaataagcagggtgacaatatacagccttgacgtaatccttttcctatttggaaccagtctgttctatgtccagttctaactgttgcttcctgacctgcatacagatttctcaagaggcaggttaggtggtctggtattcagaattgtgttggtttctgccaaacatcaacttgaatcagtcataggtatacattatgtccgcaccctcttgaacctccctctcacctcccagtctatcccacccctctaggtttgttacagagcctaggtttgaattccctgagtcatacagcaaattctcaatggctatctattttacatattgtcttcaatttttgacggtctgttgcagctgctagggtaagggagcaggggcgggagcagcgaggggatggagtggttgggggaggaggggatgcccgtcgtgacgtctgtgggtgtggccaggccggcaggaggacggcggagcagctgggagctctcctgcctcccaggactacctccatcgtcattcagcgctctcatcttcaactgtaaacttgcttctggaagaagatcaagtcttcaggttagttgggagagaggagatgaggagctaacctgttctagggagcaggcagggttttaataagcctgtgctgaattgttgcttttaggaacaaggaaaattcctctcagggaaaatgtgcaaagtctaagactgaatagctggtatgagcactcggccttgacaccacaacaagttattttctggctcactgggaggcaaattcccaagacaaagggcgtccccggccccggagggagggccgtggggatacggaggaggagaatttggaacagttcaggcagcaaatgttctgcctgaactgaggaatggcatttgttctcaccgctgacttaatccacgtgaacactagtcaggcgtttttgcggaatggaatgcgccagagtgaaaacattaaatccctcagagctgcttctctgcactctgaccacacacagtggagtaaatgagtttaagcttgcccactctttccaaagaaaggatgtcaagcacaggcatccctgggtgtggatgtgcttgggtttgacagggtaggtatctggagctcctaccacactgacctggctacctgtgaagctacccaaggaaaatgtttgagcactgatttaaggaatgtgataactctacaacctgcagtgattttgaggaagagccaacaggaggctgtgagcagggtgggcggcttctatatccttgtgtttacaaggcagtcccctgtaacctaaatcatctaggaaatgccatccctgacgtgtgtcaggggtgagcatgaggtctgctgtccaggcccctggggcaaggcctgccagggcttggagggcctgggagattgaatacgtctagggatacttgtgctgtgctgtgcttagtcattcggtgtgtctgattccatgtgaacccatggactgtagccaccaggctcctctgtccatggggattctccaggcaagaatactggagtggtttgccatgccctcctccaggggattttctcaaatcaggggtcaaacccaggtctcccagattgcaggcagattctctaccatctgagccatcagggaagccctctcatataattgctattaaggattaaatctcaggttagttgggagagaggagatgaggagctaacctgttctagggagcaggcagggttttaataagcctgtgctgaattgttgctttttggaacaaggaaaattcctctcagggaaaatgtgcaaagtctaagattgaatagctggtatgagcactcggccttgacaccacaacaagttattttctggatataatggctcattgggaggcaagttcccaagacaaagggcgtccccagcccgggagggctgtggggatacatacggaggaggaaaatttggaacagttcaggcagcaaatgttctgcctgaactgtgggatgacatctgctctcactgctgacttaacccacctaaacactagtcagatgagagctctaggtaaactgtaactctgtgtttagtcgctttgtgatcctatggaatctagactgccaggctcctctgttcgtggggattctccaggcaagaatactggagtggattgccatgccctcctccaggggatcttctcaactcagggactgaacccaggtctctcgcattgcatgcagattctttaccatctgagccaaactgtaaaggattgcacaaaaactacctcttattgcagatgtagtttacaaatgcttgagtgtcattgttcaaatcaggtgtaatgtgagggtgatttaggaatataagtccctaaagatttatggcactgatgcaaagcatatgctgataccattcttgttctttgagaagccacgacacccttggggttagtgagatctgagatcatcaggaatcatggggtagggggagacagtagccactgctagagatctgggtgcctcgatgactgaggaaggttttaagcctgagtccagggcatcatgtgcatattggaaatatcgccgtgattagatggtggggagcagctaggaggttctagaaagccactgcagagtcctgccagctgagaggtgactacagtcaggtcagggaggctctgcttaggtgaggggtctgcagagtcagagggagtcatcagaggtgctcctggttgtgtgtacctgaatggtcacagggccccgagggaaggaacaggttttgggacttctgcagaggtgtttgggcaccttggagacgctggggtagataagaaggcagctggaacacagtggtctgggctccggaaggggactggtgattcacatgtccatgggtgagaacctcacttgctggttagattttacagagttttgtgctttcagttgtgctgtactgcggagatatgtggaggtacttgcctactgttcagggaactgctcacttgggcagcatgcccccgtgctgggcacctgagaccccaagtacgaggagttgcacttggcaagcagagtagcaggactcagctgcagcgcaagtctcttttcggggagggagagctctgtctcctccagttgggggagagagagaggcctgagcacagagcgggacctccaagttcttctcacctggggcttcctgggtggcactagtggtaaagaacctgcctgccaaggcaggagacaagagacttgggtttgatccttggatcaggaagatcctctggaggtgggcatggcaatccactccagtattcttgcctggagaaacccatggacggaggagcctggcaggtcacagcccatggggtcacagagtctgacaccgctggagcaacttgacacgtgcataccaaattctcaaggctcagaggaagacagctcttttgtctgaactaagagttgagaattatgttttattcagggggctttctgaggactcacaccccagaagacagtctttcagatatctctgagggattgctttgaagaagtaagagagtagccaagatatataggaatttttgctgcagaaaccaggtagtcggaacatcaaaagattaattgaaaggaaccagatatcccaaggaatttagtgcttttctcttttggagaagatgctagcatctgggcccactgaaatcactcctttgatatgcacctcagctctctggggcctgcatcccacctgcttcctctacccggaacctcctcagggtgtagtcggcagtggctgcaggggctgttggattcattgtcatagcgtcctttgtttactgatacagtaggcaatattctttgtccccactttaaaaagagaacttagagggcttccctggtgggccagtggttaagaatccaccttgcaactcagggacactggtttgatccctcctctgggaagatcccacctgtctcagggcagctcagctgctgtgccacacctgctgagcctgtgctctagagcctgtgctccacagcaggagaagccacctcaatgagaagccctcacaccatgactagagaatagcctccactcgctacaactagagaaagcccatgcacagccacaaagacccagtgcagccaaaaataactaaagatagaaaattaaaaagagagaacataaaagggggcttttaacccagttcattcattgcaagagccatctgaagggattaaggatcagacttcgcagtcttggtcctggcctggagtgggataagggaaaaggcacctgcactgccgtcactgggaaaggcctgtctctgcgtacagggtaagccaattcctggtggcctctacaatcccagagtcgatgccggtaccttctctgggcttcatcacctagaaagactgcaccaaatgcagaagacccagtcacacccacagggatgcagctacctggacagttctacctcaggaaggaagctttggtcctgaatggttttgtggagagggacattgtataactggatgtgttctcaggacttaaacattgtccataggaggaaggaactgcctgtggagtgatttctatttaataataaaatttttgcagcagctaatatgcttttagtctgtcgtctgttttcattattgcattatgtcaaatgatgaaagaacaaggagaaaagtgttcttaaaatttacaaagaaacttttccacatgatgtgtattgctactgctggtttatgcactaccgtaaaagcaccagactaggagaaggcaatggcaacccactccagtactcttgcctggagaatcccatggaccatctcaggtaggctgcagtccatggggtttcgaacagttggacatgactgagcgacttcactttcacttttcaccttcatgcattggagaaggcaatggcaacccactcctgtgttcttgcctggagaattccagggacgggggaacctggtgggctaccgtctatggggtcacacagagctggacacgactgaagcgacttagcagcagcagaagcagcattgtattaagtcattcactttattcaattggcctgtctgtgcagaagaggggaccatatcccaaagacaactataatagcaccataatatgcacagtgtaccaaggaggtgcttgtttaggtgtagtcttgctgggttgaaggctactcagggcaggttcctaggacttgccactcttccacttcctgtccctatgtctctgctggctcattggcaccaaacctagaatgcaaagaaattctatcatgcccagaaaatcctagacaaattcttctctcagggccatcacggaagggctgtggttgtctggccccagctggagcataaacacagctctgttaatccccttttcttttttgtttttgattcttttttcccctctattttttaattggagggtaattgctttacaatattgtgttggcctctgccatacattaacatgaatcagccgcaggtatatatatgtcccctccctccttaaaccctctgctatttcccaccccatcccacccctctagtttgtcatagagcactggttgtgtcacacagcaaattcccacttgcaatctattttatatatggtaagtggtgctagtggtaaggaatctgcctgccagtgcaggagatgtaagagacacaggttcgatccctgggtcagaaagatctcctggaggagggcatggcaacccactccagtatccttgcctggagaatcctatgagcagaggagcctggcaggctactgtccatagggttgcacagagttggacacgaccgaagtaacttagcacgcaaagtatatgcttctgtgctgctctttgaatttgtccctccctctccttcccccactgtgtccgcaagtctgttctctatgtttgcatctccactcttcccctgcagatacgttcgtcagtaccattttgtctagattccatatgaatgcattaacatacaatatttttcttcctctttctgacttacttcactctgtataatagacaagattcatccacctcattaagactgactcaaatgtgttcttttcttttctgtagctgagtaacattccattttatatatgtaccgcagttactgtatccattaatctgtcaagggacatctaggttgcttctatttcctatctattgtaaaaagtgctgcaatgaacagtggggtacaggtgtctctttcaattatggctttctcagggtaaatacctagtagtggcatttgggtcatatgatagttctattcccagttttttttttttttttaaagaatctctatactgttctccatagtggctgtatcaatttacattcccaccaacagtacaagagggttcccttttctccacattctctccagcatttattgtttataggctttttaatgatggccattctaactggtgtgaggtgatacctctttgtagttttggtttgcatttctctaatgatgagtgatgttgagcatcatgtgtttgttggctatctgtatgtcttctttggagaaatgtctgtttgggtctttcatccattttttgattgggttgtttgtttttctgcttttgagctgcatgaaatgtttgtttgcagttgtcttctctgattctgagggttgtcttttaaccttgtttagtctctcatgcattggagaaggaaacggcaacccactccagtgttcttgcctggagaatcccagggacggcggagcctggtgggctgccatctatggggtcacaccgagtcgggcacgactgaagtgacttagcagcagcagcagtgtttcttttgctgtgcaaaatcttttaaggttaattaagtcccatctgtttacttttgtttttatttccattactctaggaagtaggtcaaagacgatcttgctgtgatgtatgtcaaagagaatatcacctatgtttttctctaagagctttatagcttctggccttacatttaaatctttaatccattttgagtttatttttgtgtgtggtgttaggaagtgttctagcttcgttcttttgcatgtagctgtccattttgtcccagcaccacttattgaagaggctatcttctccattgtattttcttgcctcctctgtcaagataaggtgcccatagatgcatgggtttatctctggactttctgtcttgttccattgatctatatttctgtttttgtgccaataccatactgtcttactgactgtagttttgtagtataatctgaagtcaggaaagttgattcctccaactcctatcttctttttcaagattacttggctatttgtgatcttttgtgttttcatacaaattgtgaaattttttgttctagtgctgtgaaaaataacattggtagtttgattgttgttgttcactcattcagtcatatcagactcattgcagccccttagactgcagtacagcaggcttccctgtccttcacaatctcccagagtttgctcaaactcatgtccattgaatcggggatgccatccaagcatctcactttctgtcatccctttctcttactgacctcaatctttcccagcatcagggtcttttccagtgagtcagctcttcacatcaggtggccaaagtattggagtttcagtttcagcatcagtccttccgatgaatattcaaggttgatttcctttagtatttactggtttgatttccttgtagtccaagggactcacaagagtcttctccagagccacaggtcaaaagcatcaatcctttggcgttcaacctttttttatgatccaactctcacatccatacaaaatgactactggaaaaaatcattgctttgactacaaggacttttgttggcaaagtgatgtctctgctttttaaaacgctgtctaggtttgtcatagcttttcttccaaggagcaggtgtcttttaatttcatggctacacccaccatctgcagtacttttgtagcccaagaaaataaagtctgttacagtatccatttcccccccatctatttgccatgatttcctaaaggaaatcagtcttgaatattcattggaaggactgttgttgaagctgaaactccaatactttggccacctgatgcaaagagctgactcatttgaaaagaccctgatgctgggaaagattgaaggcaggaggagaaggggatgacagaggatgagatggttggatggcattgccgactcaatggacatgagttcgagtaaactctgggagttggtgatggacagggaggcctggcatgctgcagtccatggagtcgcaaagagtcagacacgactgagtgactgaactgaactgaactaatttgccatgaagtgatgggactggatgccgtgatctcagttttttgatgttgagttttaagccagcttttttgctcttctctttcaccttcatcaggaggctctttagttcctctttgctttctgctatttgggtagtatcatctgcatatctgagatgattgaatttttcctgaaatcttgattccagcttgtgcttcattcggcctggcatttcacatgatgtactcagcatataaacaaataagcagggtgacagtgtacaaccttgacatactcctttcccaattttgaaacagtctgttgttccatatctggttctaactgttgcttcttgacctgcatccaggtttctcaggaggcaggtagtttgatagggatcgcattgaatctgtaggttactttgggtagtgtagccactccagcactcttgcctggaaaatcccatggacggaggagcctggtgggctgcagtccacggggtcgttaagagtcggatacgactgagcgacttccctttcacttttcactttcctgcattggagaaggaaatggcaacccactccagtgttcttgcctggagaaccccagggacgggggagcctggtgggctgccgtctgtggggccgcacagagtcggacatgacttaagtgacttagcagcagcagcagcagtcactttccaatattgattcttccaatccaagaacatggtatagctctccatctgtttgtatcatctttgatttccttcatcagtgtcttatagttttctgcatacaggtcttttgcatctttaggtaggtttatccctaggtattttattctttttgttgcaatggcaaatgggattgtttccttaacttttttttctgatttttttccaaactatgttgaataacagtggtgagagtgggcacctcttgttttgtccctcatcttagaggaaatgcttttggttcttcgccattgagaatgatgttttctgtgggtttgttgtatatggtgtttattatgttgaggtagttttcttccatgcctactttctggagagttttttttatcataaatgggtgtttaatttgttgaaaactttttctgcgtctgtagagatgatcatatggtttatatctttcagtttgttgatatgctgtatcacaatgattgatttgcataaattgaataatccttgcatccctcagataaatcccacttattgatcctcctttcttaatgccttcattgttgagcttcctctcaggcctggaacagtgaacaacagctgctggaccaggtcagaaaagacacaggggtagaacccactgccctccgagcagggcatgcccagtcatctcaccctgtgcactgtcccctggccgcccttgtacccagtgttgtcaactgatgggtccctcccatcagcctctggcacatcctctgggcaccgcaactaggctagtgggaaggagtcagagccagagggcagaacagatagcatagatggatgtatttaaggccaggtgtgactatgacattccactgtgtctgaaatgtcagccatgaccatcatttttttttttctttcctaaattggtggcaacttggttattttggtgtggaaatctgactgactggagggttcctgctccagatggtcagagtgccagggatggcacctctcctgctgactgcaggtttctgtcccagcccaagcttaccctcatattttgatcaggccctcttctgtggagttctcagggtgagcactagacatctttcagtagatctgttgcatggggttcagtgggatgagaccagactgaggctttgggttcagtggaagttcagccaggggcaggggtgctggagagtgttcccagtggacatgctgtgggctggggttctccagtcacgtgtgagaagtgcaagcaggaggatttgggatatgtttagaggaataggatgaggaacataagagaaagagagggacgtctgggtgagcagagccttcagtcaccctgagaaaatgggctgagcaagaacagagtcactgggcagtgatgagcagggacacagaggaggctgtggtgggagcctgaactcagggtaggttggaatgggagataaacatcttcagagtggcctgtgtctaaagccctgagactgagatctagggagggagggctcaagacaaaggctgggaagaggggaaggagtcagcaaaggagaatgagaagaagaaccagagggccagaagaagaacttgtgggaccagaaggaaaggtgcttgcacagtaggatgctgagaaccccagagagggacagagttgagagtttaccagtgaacttggcaaggttgtttttcatcaaactggggggatataagcttgggtgaagtgggttcaataaaggagaagtgaatatagtcttgagaagttgtgctatacagaacaggagaggaattgggcagtggctgaatgactctgggaagacagggagattcaattttttattttgaggcaattgtatatatacatgcaattgaaagaaataatagtgagatgccctgaaccctttacaaagtttcctccagtggcaaacctcatgcaaaactatagtacaacatgactgccaggatgtccaagatacagggcatcccatcaccaaagggccatcgtgttgcccttttacaacacttacattccatccaccccaccccacacttaaccagggggaaacagctaagctgttcccatttctataattttgtcatttcagtaatgttttacacacagaatcatatgatatgtaaccttttgtgaatagcttatctctgtgaaagtgcattcatgcaagttgttgcatgtttcaatagcttgtgagtataaatgttccatgataatatcatttgtttaaccactcacatgctttttctttcagttcttttttcaacttcattaaagtataattaacaaatagacaagtattatatatacttaaggcagaaaatgatgttttctttccttttttcctttccatttctttcctttttttcccagaaaatgtcatttattgttattaataatgtttttctttcttttatttattataattgacttatactatatttagtccaggtataaaacatagtgattcaatattttggtagattataccaatataaagttattctaaaatattggctatatcccctgtgctgtaaattatatacttgtattatagttatattttttaaattacaaaatttatgattttacacatttacaggagacttggaaaacacataacaaagttaaatatagttctattatatattaaaattatttttaaagtagataaattaagatttttagtttgagtttcaatgtcaaacattcaaaagttaatagaatgattatacagagaagcagaaggatatggtagacctgaaaaacaccatgagccaattcaacataattaagatttatacagttttcacacaacaataggatacaaattctacccaagttcccatagactattaactaggagacactggaatagatccagggacataaaacaaggtggaagaatttcatggtctaaaagtattgaagtcatacagagtctgttctcttttaattgtggaattatgttagaaatcaatgtcaaactatatttgaaaatagctcacatattttgaagtacaatgtgacatttaccaagagagatctttgacttagccattaaaagcctcaataaagttagaaggctgaaaaatcacagagagtggttgcagagaataaagttaaatttaaatgagaaattaatatacaagataactttaaaaaactacgtatttggaaattaaatgttcgcctttaaatgatggttatatctaagaagccatgacaagaaaaattagaaaatacttgtgatagaataaacatgaagagaatttaccagaatttgttgcgtgcagcttaagctgctcagtgcagttaaataaggtgtgaaaataaataatagacactagcacaaacttgtgagaaatttgaatgaaatctgcactttagttaataatactgtatcacatattaatttcttattgtttttaataacatagtatatctttatattctcagaattgaattaggattttcaagactcattcaaaaatttttttaatcactaaaataatctttctagactttagcagtaacactagatgtcagaataaatggaactatatcaaagttttgactgaatgtaaattagaaacataatgtaaattagaaacatagctttctagtcaaacaagtggaactaaaatgttataaatttgtttggctaggcaaaaattcataagtttttcaaaatatatattttatattatatttactatttatacatgactcccctggtggctcaggggtaaacagcctgcctgcattgcaggagcctcaggagatgcgggtttgatccctgggtcagaaagatcccctggaggagaaaatggcaatccactctactattcttgcctggagaattccgtggacaggggagcctgatgggccacagtccatggcatcgcaaagaggcggacatgactgagcgactttcacttactatttatatatgtatacataaaactttttctactatattgataaaggcttgaaaagaacagcaaaagagacatcctgtggctgggtaattattagctcccaacctaaagaaaaaccagttctagggcaagatacattgttgcacaagacttaaggaaagcatgagtgagaatagtcagttcaattcagttcagtcactcatttgtgtccgactctttgtgaccccatgaaccacagtacaccaggcctccctgtccatgaccaacccccaaagtccatccaaacccatgtccattgagtcagtgatgccatccaaccatctcatcctctgtcgtccccttctccttctgccctcaatctttcccagcatcagggtcttttccaatgagttagctcttcgcatcaggtagccaaagtattggagtttcagcttcaacatcagttcttccaatgaacacccaggactgatttcctttaggatggactggttggatctccttgcagtccaagggactcttaagagtcttcgccaacaccacagtccaaaagcatcaattcttcggcattcagctttcttcacagtccaactctcacatccatacatgaccactgcaaaatccatagccttagatggacctttgttggcaaagtaatgtctcagctttttaatacgctgtctaggttggtggtaactttccttccaagaagtaagcgtcttttagtttcatggctgcagtcaccatctgcagtgattttggagcccaaaagaataaagtcagccactgtttccactgtttccccatctatttgccatgaagtgatgggaccagatgccatgatcttcgttttctgaatgttgagctttaagacaactttttcactctcctctttcactttcatcaagaggctctttagttcttcactttctgccataagggtggtgtcatctgcatatctgagtttactgatacttctcccagcaatcttgattccagcttctgcttcctccagcccagcgtttctcatgatgtgctctgcatataagttaaataagcagggtgacaatatagagccttgatgtactccttttcctaattggaaccagtctgttgttccatgtccagttctaactgttgcttcctgacctgcatacagatttctcaagaggcaggttaggtggtctggtattcccgtctctttcagaattttccacagtttattgtgatccacacaaaggctttggcatagtcaataaaacagaaatagatgtttttctggaactctcttgccttttccatgatccagcagatgttggcaatttgatctctggttcctctgccttttctaaaaccagcttgaacatctggaagttcatggttcacgtattgctgaagcctggcttagagaattttgagtatgactttactagcatgtgagatgagtgcaattgtgtggtagtttgagcattctttggcattgcctttctttgggattggaatgaaaactgaccttttctagtcctgtggccactgctgagttttccaaatttgctgacatattgagtgcagcactttcacagcatcctcttccaggatttggaatagctccactggaattccatcacctccactagctttgcttgtagtgatgcttcctaaggcccacttgacttcacattctaagatgtctggctctaggtgagtgatcacaccatcgtgattatctgagtcatgaaaatcttttttgtacagttcttctgtgtattcttgtcacctcttaatatcttctatttctgttaggtccataccatttctgtcctttatcgagcccatctttgcatgaaatgttcccttggtatctctgatattcttgaagagatctctagtctttcccattctattgttttcctccatttctttgcattgatcactgaggaagtctttcatatctctccttgctagtctttggaactctgcattcaaatgggtataatctttccttgtcagcaaatttgcttttcacttaccttctattcacagctatttgtaaggcctcttcagaaagccattttgcttttttgcatttctttttcttgggcatggtcttgattcttgtctcctgtacagtgtcacgaacctccatacttagttcatccggcactctgtctgtcagatctagtcccttaaatctatttctcacttccactgaatagtcataagggatttgatttaggtcttacctgaatggtgtagtggtttttccactttcttctatttcagtctgaatttggtagtaagaagttcatgataggcaccacagtcagctcctggtcttgtttttgctgactgtatagagcttctccatctttggctgcaaagaatataatcaatcagtctgatttcggtgttgaccatctggtgatgtccatgtgtagagtcttctcttgtgttgttggaagagggtgtttgctatgaccagtgcattctcttggcagaactctattagtctttgccctgcttcattctgtactccagtgccaattttgcctgttactccaggtgttgtttgacttcctacttttgtattccagtcccctataatgaaaagaacatctgttttgggtgttctataagatcttgtaggtcttcatagaactgttctacttcagcttctctagcattactggacggggcatagacttgaattaccatgatattgaatggtttgccttggaaatgaacagagatcattctgtcattttttagattgcatccaagcactacatttcagactcttttgttgactatgatggctactccatttcttctaagggattcctgcccacagtagtagatgtaatggtaatctgaattaaatttacccattccagtccatcttagttctttgattcatagaatgttgatgttctctcttgccatctcctgcttgaccacttccaatttgccttgatcaatggaactaacattccaggttcctatgcaatattgctctttacagcattggaccttgcttctatcagcagtcacatgcacaactgggtgttatttttgctttggctgcatcccttcattctttctggagttatttctccactgatcaccagtagcatattgggcacctactgacctggggagttcctctttcagtatcctatcattttgacttttgatactgttcatggggttctcaaggcaggaaaactgaagtggtttgccattcccttctccagtggaccacattctgtcagacctctccaccatgaccctcccgtcttgggttgccccgtgggcatggcttagtttcattgagttagacaacgctgtggtcctagtgtgattagattgactagttttctgtgagtatggtttcagtgtgtctgccctctgatgccctcttgcaacacctaccatcttacttgggtttctcttaccttggacgtggggtatctcttcatggctgctccagcaaagtgcagctgctgcccctgaccttggacgtggggtagctcctctcagccgtgcttctgcgctgtccgtcgcagccgccacgcttctacggagaaggagaatgtttacctcctgtttaaatggccctggattccctacctaaattaactctctcacttccaacattcttctgttgatgattattcaacagctagtttcaattttgatgttctcacaggagtagatgagcacgtgccctttattttgccatcttgatttgatcctgtcttagttattttatagcttgtagtttatacctcctatccctcttcctcatcttgctcctcccccatacctctccttactgataactacaagtttgttctttgtatctgtgagtctgtttctattttgttatgtcatttgctgtaatttttagattctacataaaagtaaaatattacagtgtttgtctttctctgtctgacttattttactaagcgtaatacctttcaggtcatcatccatattgttgtaagtagcaatatttcattcttttttttttaaaggctaatattccattacatatatgtaatatatatattattatgtataatgtaatatatattatatacagatatatatatgtgtgtgtatattatatatatatgtatatatgctggagagggtgtgaagagaagaaaactctcatacactgttgatgggaattgatacagccactatgagaaccatatagaagctccttaaaaacctaaaaattctatatgagcctgcaatcccattcctgggcatatatccagacaaaaacatgatccagtaggatacacgcaccctgatgttcattgcaacactgtttacaatagccaggatagggaagcaacctaaatgtccattgatggaggaatggataaagaagacgtagtgcatatatatgatggaatattactcagtcattaaaaaggatgaaataaggccatttccagcaacatggatggacctagagattgtcatactgagtgaagtaggacagcagagaaacagaaacattgtatgacatcccttatatgcagaatctaaaaaaacatgaaacaaatgaacttatttacaaaatagaaacatacttagagaaagactttatggttgccaagggaaagggatagttagggagtttgagatgaacaggtacacactgctatagttaaaatggataaccaacaaggacctattatatagaatggaagctctgctcagtgttacatggcagctgaatgggaggggagtttgggagagaatggatacatgtatatgtatagctgagtccctttgctgtctatctgaaactatcagaacattattaattagctatactcctatataaaagaaaaagtttaataaaagtcttggattagcaaaaaataaatcaggttttttgttttgatgttgagttgtatgagttctgtatgtgttttaccagatgtatcatttgcaaatatctttttccattcagtaggtttcctttttgtttgttgatagatttcttcactgtgcaaaaacgttttagtttgacatagtcccatttgttgattttacttttgttttctttccctgaagagcaaatttaaaaaaaatgctaaaactgatggcaagcagcatactgccaatgtattttttttaaaagaagttttatgatatcaggtcttaagtttggtctttaatccattttgagtttatttctgtgtatggtgtgagaaaatgttctaagttaattttttacatgtaattgtccagttttcccagcaccaattattgaggagattgtcttttcttcattatatattcttgtcttctttctcatagactatttgaccataagtgcatgagttttttttctgacctctctgttctgtcccattgatctatatgtctgtttttttttttttttttggccagaccatactgttttgattactgtagctgtgtagtataggctgatgtcagggagcctgatacttccagctttgttcatttatctccaaattgcttttgctattcagggacttttatggtttcatacacattttgttataagattattttttataattttgtgagaaatgtcatgtgtggtttgatagggattgccttaaatctttagattgctagggattgtgttaaatctatggattgctttgggtagtatggacatgttaacagcattaattctttcaatccattctttcaatccatgaacatgggctatatttccatttatttgtatcatcttcagttacttttatcagtgtttcatagttttcagtatataagtcttttattatcttggttaagtttattcctaggtatcttattctttttgatgagattttaagtgatttattttcttgatttctttttctaataaaataataaatgtatcatgctcagtcctgtctaaatctttgcaaccccatggactatactgtagagtaagggagttagaggaggtgaggttcggaaaaagaacaagaccagcgctttacaggaacagatcacctttaatgaggcgagaaggggcagcagtcaggttagtgagctgctgcactaacccaagaaaagattaagtatatataggcatatatgtggaaatctactgtcttaagggagcctgttattctctaagattgttcaggttatctcttaagtggctggggcaaggaattctggagattggccagagggtgggactggctgggagctgggcataaccaaccttaatgtccttttttttttccttctggtgagagagtactttgttttgcatagaatggtggggaggacccagagaggagttttaactccaggctattttgagccatgtaactttccttcatatacagttcagttcagttcagttcatttcagtcgctcagtcgtgtccgactctttgtgaccccatgaatcgcagcacaccaggcctccctgttcatcaccatctcccggagttcacccacactcatgtccatcgagtccgtgatgccatccagccatctcatcctcggtcgtccccttctcctcctgcccccaatcccttccagcatcagagtcttttccaatgagtcaactcttcgcatgaggtggccaaagtactggagtttcagcttcagcatcattccttccaaagaaatcccagggttgatctccttcagaatggactggttggatctccttgcagtccaagggactctcaagagtcttctccaacaccacagttcaaaagcatcaattctttggcgctcagctttcttcacagtccaactctcacatccatacatgaccacaggaaaaaccatagccttgactagacggaccttagttggcaaagtaatgtctctgcttttgaatatgctatctaggttggtcataacttttcttccaaggagtaagcgtcttttaatttcatggctgcaatcaccatctgaagttatattggagccccccaaaataaagttagccactgtttctactgtttccgcgtctctttcccatgaaatgatgggaccggatgccatgatcttcgttttctgaatgttgagctttaagccaactttttcactctcctctttcactttcatcaagaggctttttagttcctcttcactttctgccataatggtggtgtcatctgcatatctgaggttattgatacttctcccggcaatcttgattccagcttgtgtttcttccagtccagccgtttctcatgatgtaacctgcatataagttaaataagcagggtgacaatatacagccttgacgtactccttttcctatttggaaccagtctgttgttccatgtccagttctaatgttgcttcctgacctgcatacaaatttctcaagaggcaggttaggtggtctggtattcccatctctttcagaattttccacagtttaatttctttaggtagatatattcctaagtatttcattctttttgttgcaatggtgaatggaattgattccttaatttctttttctactttctcattattactgtataggaatgcaagggatttctgtgtgttgattttatatcctgcgactttactatattcattgattagctctagtaattttctggtggagtctttagggttttcatgtcatctgcaaacagtgagttttacttcttgttttccaatttggattccttttatttctttttctgctctgattgctgtggccaaaacttccagaactatgttgaatagtagtagtgagactgggcacccttgtcttgttcttgactttaggggaaatgctttcaatttttcaccattgacgataatgtttgctgtaggtttgtcatatatagcttttattatgttgaggtatgttccttctattcctgcattctggagagtttttatcataaatggatgttgaattttgtcaaaggctttctctgcatctattgagataatcatatggcttttatttttcaatttgttaatgtggtgagtaacattgattgatttgcggatattgaagaatccttgcatccctgggataaagcccacttgggcatggtgtatgatctttttaatgtgttgttggattctgattgctagaattttgttaaggattttttcatctatgttcatccgtgatattggcctgtagttttctttttctgtggcatctttgtcaggttttggtattagggtgatggtggcctcatagaatgagtttggaagtttaccttcctctgcagttttccggaagagtttgagtaggataggtgttagctcttctctaactttttggtagaattcagctgtgaagccgtctgggcctgggcttttgtttgctggaagatttctgattacagtttcaatttccgtgcttgtgatgggtctggtaagactttctattccttcctggttcagttttggaaagttgtacttttctaagaatttgtccatttcgtccacgttgtccattttattggcatataatggctgatagtagtctcttatgatcctttgtatctgtgttgtctgttgtgatctctccattttcatttctaattttattgatttgatttttctccctttgtttcttgataaactggctaatggtttgtcaatttcatttatcctttcaaagaaccagcttttggctttgttgatttttgctatggcctcctttgtttcttttgcatttatttttgccctaatttttaagatttctttccttctcctaaacctggggttcttcatttcttccttttctagttgctttaggtgtggagttaggttatttatttgactattttcttgtttcttgaggtatgcctgtattgctatgaactttccccttagcactgcttttacagtgtcccacaggttttgggttgttttgttttcattttcattcgtttctatgcatattttgatttcctctgtaatttgttggttattcagcagcgtgttgttttcagcctccatgtgttggaattgttagtagtttttctcctgtaattgtgatctaatcttactgcattgtggtcagaaaagatgcttggaatgattttcatattttttgaatttaccaaggctagatttatggcccaggatgtgatctatcctggagaaggttccgtgtgcacttgagaaaaaggtgaaattcattgttttggggtgaaatgtcctatagatgtgaattaggtctaactggtctattgtatcatttaaagtttgtgtttccttgttaattttctgtttcattgatctatccataggtgtgagtggggtattaaagtctcccactattattgtgttatcattaatttcctctttcatgcttgttagcatttgtcttacatattgtggtgctcctatgttgggtgcatatataattataattgttatgtcttcttgcattgatcctttgatcattatgtagtgtccttctttgtctcttttcacagcctttgttttaaaatctattttatctgatatgagtattgctactcctgcttccttttggtctctatctgcatggaaaatgttttctggcccctcactttcagtctgtgtgtatcccctgtttttacatgggtctcttgtagacaacatatacaggggtcttgtttctatatccatccagctcagttcagttcagtcgctcagtcatgtctgactctttgcgaccccatgaatcccagcacgccaggcctccctgtccatcaccatctcccagagttcactcagactcacgtccattgagtccatgatgccatccagccatctcatcctcggtcgtccccttctcctcctgcccccaatccctcccagcatcagagtcttttccaatgaatcaactcttcgcatgaagtggccaaagtactggagcttcagctgtagcatcattccttccaaagaaatcccagggttgatcttcagaatggactggttggatctccttgcagtccaagggactctcaagagtcttctccaacaccaatcagccagtctttatcttttggttggggcattcaacccatttacttttaaggtaattattgataagtatgatcctgttaccatttactttattgttttacgtttgagtttatacaccctttttgtgtttcctgtccagagaatatcttttagcatttattggagagctggtttggtggtgctgaattctctcagcttttgcttgtctgtaaagcttttgatttctctttcatatttgaatgagatccttgctgggtacagtaatctgggctgtaggttattttctttcatcactgtaagtatgtcttgccattccctcctgacttgaagagtttctattgaaagatcagctgttatccttatgggaatccccttgtgtgttatttgttgtttttcccttgctgcttttaatatttgttctttgtgttttatctttgttaatttgattaatatgtgtcttggcgtgttttaccttgggtttatcctgtttgggactctctgggtttcttggacttgggtgattatttccttccccattttagggaatttttcaactattatctcttcaagtattttctcatggtctttctttttgtcttcttcttctaggactcctatgatttgaatgttcgggtgtttaacactgtcctggaggtctctgagattgtcctcatttcttttaattagtttttcttttctcctctctgattcatttatttataccattctatcttctaattcactaatactatcttctgcctctgttattctagtatttgttgccttcagagtgtttttgatctcatttattgcattattcattatctattgactcttttttatttcttctaggtccttgttaaacctttcttgcatcttctcaatccttgtctccaggctatttatctgtgattccatttgatttcaagattttgtatcattttcactatcattatttggaattctttttatcaggtagatttcctatctcttcctcttttgtttggtttggtgggcatttctcttgttcctttacctgctgggtattcctctgcctctttatcttgtttatatttctgagtttggggtgtcctttctgtattctggcagtttatggagctctctttattgtggagtttcctcactgtgggtggggttgtacaggtggcttgtcaaggtttcttggttagggaagcttgtgtaggtgttcttttgggtggagctggatttctcctctctggagtgcaatgaagtgtccagtaatgagttatgtgatgtcagtggttttggagtaactttgggcagcttgtatattggagctcagggctgtgttcctgtgttgctggagaattgacatggtatatgttgctccggaacttgttgggccttgggtgatgcttggttcagtgtaggtatggaggcatttgatgaactcctgtcaattaatgttccctggagacaggagttctctggtgttctcagggtttggacttaagcctcctgcttctggttttcaatcttatttttacagtagtttcaagacttctcctctatacagcaccattgataaaacatctaggttaaagatgaaaagtttctctacagtgagggacacccagagaggttcacagagttacatagagaaaagaagagggaggagagagtagagttgacctgagtgagatgaagtggtatcaatagatgagagagcaagctagccagtaatcacttccttatgtgcactccacagctggaccgctgagagatgttcatggagttatacagagaagagaagagggaggaaggagacagaggtggccaggaggataaaaagggggaatcaaaaggagagagacagatccggccagcaatcagttccctgtgttctccactgtctggaacacaacagaaattcacagagttagttagagaagagagggggtagggaggagacacaggctacctggtggagaaaaaggagagtgcaatgggggagagagcagtcaagccatcaatctcactcccaagtaaaaacggctactgaagactgggttcttaaacgtacaaaattgatagcaaataccagaaagcaaagattaaaaatctagagtagagtttggaattttaaaaatacagtattaatgaaaagaagaaaaaaaagaaagagcaaaaaagtcacaaatattataaaaaaatatacatatatatgaagtttgctttaaaaaataaggtttttttttttttgtaaagtaatagtaggttataaaagtgaaagttaaaggagtaagagaggacttaaaaattaaaaaaaaaagatcgtaaaaatagtaaaattatatctaggacgttctctggtgtttttgtgggtattgtggggtcagttcattttcggatagtttcttggtccaacttatatttctcaggatctataggctcttcctatgtagtcggtactaacgacagggttttaatctattgcacctgtcacttccaaggcaattccctctgttttagcttcttctgtttgctggtctcttcagtgtctgatttctgccctgacacaaagggggcggtggtggacacttatcttaggctcacttattcagtcgcgctgtggggagggagggacgctgcaaacaaataacactggtgtgtgctcgcagtgcctcagccacactgggcccgcccccgctcacagcatgtgtactctccctgcccacactgctcaggctctaggttgctccaccaggaaccgtccaaggccggccctgggctgcatgcacctccaaagtctaagccgctcaggttcaggcacttgggtagtccccagaggcgcagactcggttggacctgtgttttgtgcctttcccaggtctgagcagctcaggtgatgaggtgtttggcaagcgcggtcgctgtgacttatcgcctccgctgatcctgccgctcagttttctgtgtaaaaccggtgcaccttctcaggaggatgttgaccatccagaaccccaagaagtcttagttagcaaagaagcctgcttgcagttttgtagataatgtctctctggggctgcgactgccctcttccagctctggctgcctgtcactggaggggcatggtctgcagccgggtatctctgttcagtcctttgttctgtgcgtgggcctggcagtgtcttaggttagggctgggtttttgcatgatagttatcccacagtctggtttgctagcccaagttagttcactcagattgcactcggggcattcaggccagatccttactctaaacaatgcagcctgcgcctccctgcccagccccttctttctaatggggggtacaggtgtctgcgctgcttctccactgggggagttaccgttgggcttgtaatttgtggattttaattatttatttatttttcctccctgttatgttgccctctgtgcttccaaggctcagcagtgagagtgcttcctggtgtttggaaacttctttctttttaagattcccttcccaggatggagctctgtccctacctcttttgtcattttttttgacttttatatttttccctacctccttttgaagacaatgagctgcttttctggttgcctgatgtcctctgccagcattcagaagttgttttgtggaatttactcagcatttaaatgttcttttgacgaatttgtgggggagaaagtggtctccccgtcctattgctctgccattttagtaccgccctctctcattttagttttgatgttcatatctttaataatgtgcagggctgaacatgttatgtttgttggcgatttgtatgtcttctttggagagatgtctgtttaggtcatttgctcgttttttttttttttttttaaattgagttgcttgtgctacttgtatattttgcagattaatccctttgtaattgcctcatttgcaaacagtttctcccattctgagtgttgtctttttgtctcatttatggttttctttgctgtgcaagatgttttaagtttaattaggtcctatttgtttatttctatttttatttttattactctaggagagtgaagtgaaagtgctagtcactcagtcatatctgactttttgtggccccatgaactgtagcccaccaggatcctctgtccatgcctttctccaggcaagaatactggaatggatttccattccttctccaggagatcttcccaacccaggtattgaatccaggtctcctgcattgcaggcagattctttaccatctgagccagaatactgatggtatattactctagtagttaggtaacaatgatctttctgtggtttatgccaatgaatgttcttcctatgttttcctataagagtttttagtgtctgatcttacatttaggtctttattcgattttgaatctatttttgtgtctggtgttgtgtagtagtctaatttcattctttaacatgtagctgtcagttttcccagcaccatttattgaagccactgtttttttccattgtatagacttgtgcctggatccagccccggtggatccacggtgattcgaaggtggggggacggcgtcggcgtctttggaaaaatacatatttaattacagatatatagagagattagaaacggatagtgtagtaggagatagtgtagtggagaaaaggaggctgaatccagatgggaattcagccagagaaacgggagcaagaaagaagcaacatggtggaatcagtctttcccgaaactgatccgatttctttattttggggtttgcttatataccttttgttacatatagggatgaatacagagtcacgcgggggtcagcagtcctggcctttatcaatatcaggtgcttcacataaatgtaaaaaaaaaggtcttagggatattacatcatcttctggccatgagtgagacctgctgacattttatgatcctttctttctgataaccaaaaaaacttatttcttccaagggtgttttttcttaaaccaggcaccaccctccaaataaaattacattcctatagggtgagggtgtagtgagttacaatcaagaaaggaatttatttaacccaaggttaacatgattaatcttaaaggttaatgcttatttctcctatatgcttaaaggttaatacttatttctcctatatgttagttatattcattataagggcagggaatatgaagatttagcagcaaacatcagcccaacaaatgaaaatcctttcaccaatgttccccttaagatctatttagtcttaagatagtgataaagttacatttttacatagcaaggacacagtgatttataacaaagtacagtgatctattacaaaagagaaaattcattaactcaaaaagtctagtattgctaaccttaaaaactactatatttccttttctatattccaaatacgttgattaatatattcccaggtgcctaaggatatggaggcctggcggcaatcattgactcaacaagaagaaaaagccctatgctaattaagactctcaaaataactccaaaactctccatgctgtttatggttgagaagtagtaaacaatcatgtggtagtggcaggagtatggataatcctgtcacacaagctagtctgtcagcagagaggtttgacctgagacatccttgtcccacccaggggagggaattagcagcaattattgacacaacaaatgaaaaacccctcacaaatataattcctaaccaacccactatactaataattttgaactcccccaaagaatttgcctttagtaagtctaaaacatctcgtgcctctcaggttgggaggctgtaaacaatcacatgtggccggacgaacctatacagtgggctagataaacttcagaggagtccgtaagctgaaacagtcttgtcatgcccaggaatttttattgccttggagctgcatgtttactccttctccgagagaaatggttatgggggagagcataaaacagactctggttttggggtagatgctcgggaacagggggtttcctgaggcttgatcatgcctttgcatatgccaagcctccttcctcatgacctttgccatgggcggagctcctcacgctggcccctgcagacttgcccttttttttgtcatggattaaggggccataagtgtgtgggtttatctttgggctttctgtcctgtcccattgatctgtatttctgcttttgtgccatttccatactctcttgatatttgtagattcctttgggtagtattactattttcacaatattgattcttccaatccaaaaacatgtttttgtcatcttagatttctttcatccgtgtcttatagttttctgactacaagtgttttatctcctttgataggtttatttatagatactttattccttttgatatgatggtaaacgggctcatttcattaattttttatgatctttcatttttactgtataggaattgaggagatgtctacgcattacttttgtatcatgcaaccttagattcattgattgtatctagtagttttctggtgttatctttatgatttcctatgtatagtatcatataatctgcaaatagtgacagattacatcttctttttccagtttggattccattttatttttttattttctgatggctatggctaggacttctaaaactattgttgaatagtagtggtgagagtggtcatacttgttttaccccttatcttattgggaatgctatcagtttttcaccactgaaaaagatgttttctgtggatttgtcatatatgacccttattatattgaggtagattcttcctatacccactttctggagttttatatatatatatacacacacatacataaaacaaatgagttgaattttgtcaaaagctttttctgcatctattcagattatcacatggtttttattcttcagtttgttactgtggtgtatctcattgattgatttacatatattgaagaatccttgtattcttggaataaatcccattttgtcttggtgtatgaccctttcagtgtgttgttggattctgtttgctagtattttgttgagactttttgcatctatgttcattagtgaaattgacttgtaattttcttttttgtgatatctttgtctagttttgttaacttggtgatggtggccttgtaaaatgagcttgacagtattccttcctctgcaatttttttgaagagttagagaaggatgagtgttagctcttctctaaatgttacagaatttgcctgcaaagccatcatgtcctgttctttcattttttggaagatttttcatcatagttttgatttcattacttgtggttaatatgttcatattttctatttcctttggttcagtcttggaaggttgtacttttctaagaatttgtccattttttctaggtatccatcttattggcatatagttgcttatagtagtcttaaatgatactttgtatttctgtggagtcagttgtaatttctcctttttcatttctaattttattgatttgaatattctccttttttcttgatgagtctggttaaaggtttatcaatattgtttttgttcccacagaaccagctttttgtttcactgattttagttattgttttcttcatttctatttcatttatttttctctgatatttatgatatatttccttctactaactttgggttttgcttgttcttctttctctagttgctttatgtataaggctaaattgtttatttgagattttccttgtttcttgaggtaggattacattgtcacaaacttctctcttaagactgcttttgttgcatcccaaacgcagagctggaggaagcacagactggaattgagatttccaggagatatatcaataacctcagatatgcagaggacaccaccattatggcagagagtgaagaagaactaaagggcctcttgataaaagtgaaagaggagagtaaaaaagttgatttaaagctcaacattcagaaaactaagatcatggcatccggtcccatcacttcatggcaaatagatggggaaacagtggaaacagtggctgactttaattttggggggctcaaaaattactgcatatggagactgcagccatgaaattaaaagatgcttacctcttggaaggaaagttatgaccaacctagacagcatattaaaaagtagagacatcactttgtcaacaaaggtccatctagtcaaggctatggtttttccagtagtcatgtatggatgtgagagttggactgtaaagaaagctgagagctggagaattgatgcttttgaactgtggtgttggagaagactcttgagagtcccttggactgcaaggagatccaaccagtccatcctaaaggagatcagtcctgggtgttcattggaaggactgatgttgaggctgaaactccaaaactttggccacctgatgtgaagagctgactcctttgaaaagaccctgatgctgggaaagattgagggcaggaggagaaggggagaatagatgagatggttggatggcatcactgactcaatggacatgggtttgggtggactcaaggagttggtgatggacagggaggcctggtgtgctgcggttcatggggctgaaagagtcggacacgactgactgactgaactggtaggtttggggccgtgatgttttcactatcatgtttttgatagatttttaaaatttcttgtttgatttctttagtgatctcttggttacttaatagcatgttatttagcttccatgttttaaaaaataattttttttcctttaattgatttctaatctcatagcattgttgttggaaaaggtggttgatatgatttcagttttcttaaatttgccattgcttgatttgtggcccaagctgtgatctatcctggagaatgttccatgtgctcttgggaagaaaatgtattttgctgctttctggtggaatgtcctataaatatcaactaggtctatctggtctagaatgtcatttaaacctgtatttccttatttattttctgtctggatgatctatccattggtataaatggggtgttacagcccctcagtattatcatgttactgttaatttccccttttatagctattatcatttgccttatgtattaaggtgctcttatgttgggtgcataaatatttgtaattgttatatcttcttattggtttgatcccttgatcattactctcttttaatggtttttattttaaagtctcatttatttgatatcagtattactactccagttttcttttgatttccacagaatctttttctatcccctcactttcagtttgtatatgtctttgggtttcaagtgagtttcttgcagaaaacatatatgtgggccttgtttttgtgtacattaagccagtctgtgtcttttggttggaacatttaatccatttgcatttaaggtaattttgtttttcattttatttattgtgttgtttatcactgtttgctctttagtttttctaggtccttgttaaaatttcttgtattttctgcatctgtgcctccattctatttctgatattttggatcatctatactatcattattctgaatattttttcagataggttgcctatcgtctcctcacttattttattttgtaggtgttttaccttgctcttttttatgtaacatagtttttgctgtctcatttttcttgatggatgaggctgtgcttctgtcttgcaggttgttttgtctgaagtgtccagaactggactttgcaagcaggtgggtggaggcaggtcttggtgcctacatgaggatctccaggggacctcacactgataaatattcactggcacatgaagttctctgttagtccaacagcttgtacttggtgattcctccatagaactataggcctgacccctggcatggttaccaagagaactattcccagaagtttaattttgagtgggaattggttttcatccagatttactggggaatggcctcctgttctctactccttgtgtagacatctctgtatggccaaaaaaggaactttagaatggaatacatatcaagaacacctttctgctgttctaactcttatctatttccattttatgtgatattttcctcttctgagtttgtactctatttcctgtgccagtatttttaccaagagaccaggagcaaaaacatgtgagttcgactttagtagctttgaacctctggtgctgctttttttttttttcatttgcaagcccctccaatattaggaggtgaggtgatatccgtaaactctagactcttactacacagcaatttggcttcttaatggcaggaaattgtgattccctgtctctcttgcttcctcttcccctctaactacttctgcttctgtgactccttttttcttatttcattgagtctttcccaggcactggaacttaatcagtaggtcatttctaatttatggaccttgtttttcctctttctatttccctccttccctaccacatattttctcataatctatatcctgtgcttcctcactggtttcaggtatcttgctctgtcaatagtaatgatagcagctctcttctctggctttgccctgtgtattgtccttctgccaagaccatttgtgttaggccagagaaaggataggtggggtgcctacctttttctcgaaacagtttcagttttacaagttgtctgacagctttatatacagtatgttttaggataacaaatatacttctcttttttatttaggattttaacaaaatagggtttgattctggtgagcaagtttgtgtgtgtatgtgagcatttatgtgtatgtatacctatacaaatctacattatatatacaatttttatactaccatttaaaataaaaggatgtttcttaataaaatgtcaaactcttgccattaaaaaaatttcctggtacctcctcttgtcaatgtccttgcccctgtggtgagctgcagtctacccacaccttcccagtagtagaaactactctaagtagtttctgagcccactgtgtgagaccaacctcttgtgtgttcctctcaccagtgtctgttcctggagctggtccagatcacacatgtccatggagaccagcagggcataagccttcaaaaacatacccacagaggctggtgcaggtggagaaagacttggagggggatggccttcggcccaactggacccttggctagaggagccccttctggagtggcacttgggctgccaggacccacgaggccagaggaagctttacaggacccacatggctggaagaagccttgtcagcctttatttcttcaaatactttttcagctacatagtatttctcatttccttctggaattttgattacatgaagattataccttttgtcatagacccacaggtctgagggtctgtcaaaatttttttttctgttgtttgtattagataatttctattgttctaactcccagttcagttgttcttttctctttcctccactttgctcttgaacccatatactgaattttaaaattttgctattgtgctttttagttccatttggcttttctttgttgaggttttctatttctttgctgagattttctattttttcatttgttccaattgtgtctgttattgccttttgaaacattttcattttgcattttggttgtcttaaaaatctttgtcagataatttcaacatccctatcatcttggttcagttcagttcagttgcttaattgtgtccgactctttaggaccccatggactgcagcacaccaggtgtccctgttcatcgtcttggtattatcatctattttctttcaagttgatattttcttggttgtcaccgtgacaggtgattttgacagaaacttgctcattttgagtattatgaagctccaattcctatttaaaccttctgtttagctggtttcctttgatatcacttcagcagaagggctggcactgcctcattcctgccaggtaagattagaaatccaagttccccagttagcctgccttgatatcaagctagggaaggatttcctgctatttctggatggtggtgtgggagctccctactgagcccctgctgataccttcttagctgggagggattaggccacctcattattgctccacatgtggcctccagggacacagttgtgaggtggcctcgttattgcagtggtgaaagttctgactctccacttggcctcctctcacactgcaataacaagggcaaagagtttcccttattgcaaggtgggactcaagttcaggttccccattcatggtctccacctacatgaggaggcatgtatatggaagaggttggacttcctagtacccaggacagatgaatgttccatctccctatgtgctttcttagacaccactccagtggggatgggagacttgtccgcttattacagcctggtgagggtgggagtttaggtttaccacttggcctatgctgtctcattgaatgttggtttgcagtgtttggctgcagtagttattgtctaaaagctttctaacctactaggctgctgcatccatgtttctttggctagagaggacaggcttttcttagggctttttttgatctacatctgttggtatttctaggttgctgacttcttcagcaccttgcttgggatatatgagacatgataaaaatccaaggacacagtctcactgctgtgtcatttcctgggtccctaactaacctgtttgccttcttctgcccacctttcagagttttcttactgaaataaaaacaacttcttagcaaattgttttatataaaatgtcagatttttatttgtacttcataggaagaagagggaaaaatagttctactctgtgtttctggaagcacaaatcctcagatgtaagtttttagtgctgacaatatgtttgcatgcttgcctgaatgattcaggagacaaggaatagaattgtaacaaagcaatcgaagcaggtgagagtgggaggtctccagggtacctggtagggctgcaggcaggcatgtccttggaaggctgggtactttattctaattgcttcattttgtcagtgtggaacttttttctcttggagacattccttgcccttgctgtgttcttctctgaatctcagtgtctggctctggctcaggttctgtggtcagcaacttttgctgagtttggccaataggagaatctactgagggattggggaagggaagaaaggacaggccagtactttgctttgcaccaccctgctttaggaggcatctcttctggggctccagctcctaccagaaagccccccctccatggttcctgcattcatcttctccctctgtctctcagccatggtggtggaggtctcctgctggtgctaatctctggcctctggttagcttttcagcatgtccacctcccatgaaaccagcttctgtgtttatgtacacagaacaggtttccttactggatcctggctgactccctcagtgaggaaagaatgaggcaaagtcagtggctgagactggaaaaatgggaagatatatatgggtttgaggaaggagacagaagagaacaggagtgaaaattgccttgggagatgcattaagattgctgggaagtgctgagcccattgagaatcctgcatgtagaggtcagatgagaccaacagcaggacccagggttctctatggccacattcagccatttaactggtggctcagggtgggtgagccaggtttgaggtcttgccatgggtggcagatagactctgggatgacctccatgatccccactgcctggtgttcacactcatgtgtgatgaccccttgcccttaacctgtaactggattccaagcagtggaatatggcagaggtgatggatgggctgttactccatagctgtaggaagcctgtgggaagtaagtgtggcctccagtcaatagccagcaagaagttaggtcctcagtcttatagctaccaggaagtgaattctgccaatactgagtgatcttggaagctgattcctaactgaatgactcttgagttccaaagcaaaagattgaactaagccttgtccctgattcactgagatgctgagattataaatgtgtgttgctttgagctactactattgtggtaatttattaagcagtaatagaaagctcatataacaggtgagcttgacagaatacaagagaaagcaagtaaaaggagggtgtttgctggaccacaaaatctcagtcgggaaaggggagtgagaacgtggaggtgttggctgatgtgggagcaggtaagtttcctgctgagagtccaggaagtggatagttaagccaaaaaatagcagcaagtgtagtcatggagggggcgtggtggaagagagagtgagagagagtgatcacagctaggtctcagatcttcaaaaaatgaagggacatgctgggaaaacagtagccatgaggtaagggtggatgctgtattgcaatggcacctggagtactttagggaggaaagaagaaggcagtggagaactaagaggataattctctgaaggggagcgaatgagacccagtgtgtaatgaaatgtgggccccttgttcaaaaaatgggaaaaatgccattaatagtattaaaatataaagattttcttttcttccatagtctgtcaatttttcatggtgtattaaattgctatttggtattatgattctaaagaaaaattaagcataaatttttagcataaattgtattgttcatctttatattgtatagcatcagtttaaaatacaaatgtgagagtatttaacttgtagagggaatcacagaagttgcataatttgtgtttcctgacttaaatgtgcatatggagtttgttttgaccagacaaggaaacattgtgtcaaactaactctaatatttttattttgccttttgctacaagtacattctatcaacactctctgccttctgcttactgatgagtaagtcatcttttcaatgtaagtagtgggtgaaagcagggaaatcatagcaataagaagatactaaaacttccacggtcatttgggtttcttcaaaagttgttgcctttctgtacttgtaaatttttgttccaccagaatgtatggactcttgggctgtcaacactccacttactcagttttagacaaagcacacttactttatacttgcttggaactcccacacatcctgggtcccccagaatttgtgatcatagggcattgcaagcctctgtgaattcagtgacaaggagtggtggatccatgaattgctctcattccacctacaggtgtgtacattgcttcccagtgctgcaaatcctattcaacaatagctcacagtgattttggcttcaaagtgtcaattaaaactatgcataatttgagagctgcaagttttatttggagcagaaagagaactacagcccaggagacagcaactcagagagctctgagagactgctccaaagaggcagtcagggaaagtcagtatataagattttggtgaagagaaaattcactttctcaaggggagcatgtatgccagtgttttctggccctctgtcagactagggaggtgggcactctgctcctttctctcagggaaccctgcaggcccccaggagtgttcctggtcattgctcacagtgaacttaatctgtgtagaaaacttcctgggtaccaagccttgtgttgagaactttaggagtctttgtctctcttgagcccctttatggcccagtgaggttgatgccagtaagctccatttattagagaaggaaatggcaatccactccagtattcttgcctggagaatcctatggacggagaagcctggcaggctattcatggggttgcaagagttggacatgacttagtgactaaaccaccaccaccaccaccaagtgcttactttacaaaaggtttctgttagtcccgagtataaggtgagtgtgcaggaaagagagcaagtgagctgggcagtcaggcaagaaaagggaggtttattagagggaaaagagcgggtaactggcccttaaggagagccagcattctcccttttgatggagtccttcttataccccaccaatgaaaaattctctgaagggatggtcacatagctggaggtctggaatctggtggtctcacagctttgagaagataggagccagtgagataacagcatgccatttgggcaatttggtcagtcttacagatcactgtgatttattctttctttgtgaggtctacataagaagccatcttatcagtgagaccccatgtgggccctgtcaacgaagagctgatgttccgcgtgaagggatttagcaattttctagctatgaagagataaaaggattgggatcatgaaatcagttcctgaaaataaccaattgtctaaatacctgttctgccagatcccctggaacacagagtgcctcactccaccctgaactctctcagggggtgttgaaggtcaaaagctagagcagcacagggttcagtctctgcagaggcagatgacaaatgccttgttcagtctctggcaaatgttctcagcaagtgccaatttgtagttgacaggcaagtgccaatttgtagttgacaagagcaacctttgatagcaaaccattctgctgccaaccacaggtaattgtggggttgagggatgctgccaactattatataaacaagtagaatgataaaaggttaaaacataatccccaaagtaagacaccataaccttgcaagtatagtgatttttcgcatttttatagtaggtattattgattccagatgtgtgtagcagtaagcagcagcttgcagcaagaagcagcaagtagtagctggaagcagggtcttagtttcctagtatgggagtccttaccactggaccacaggagccagcagttagggctaaggtccatagtcttgcctgcccagtcaagaactaattcaggtgaggaggcagaagataaagagtaaagtaaaaagtttattgaaaagaaaagtatgtgaagaaatgtgcatgggcaaacttaagagagttacaccttttggaaatttgaatcctttataataaacaggcagttctctgggtctttgtcttcactcaggccaatcaccttgctttgttccccttggttaatttgtcgaaggactctcccctggggtgtgcatgcacaccctagccaagatgggtcttgaagtgaaggcttctgggaggagcaagactcattatggcctggaattaatcctctgacttttaactcctaggggccttttacatgtgtagtgtctcctttatcagacagggttgtttcctttctttgtccttgccatgattattccctttaggaaagactggctatttaccctgtttcttctgctggctctaacttccacaactggagacaatctatctcttatctcaagaaatgcaaagaggaggctggctgactgtaaattcttcaactgaagcccacctgtctcttaactcaagaatgcaagcagaagggtcgctataaatttctaacctggagaccttctatttcctacgtcattattgttttcttactgcaagagtattaatttgctagatgcgaaattgttaaagtcacatcctagataaagacaaagaagaaagcgctaatcatctgtatctctatcacacagaagtagccatgctttggaggctatgaccttctggttgttccatgtatattctgctgctgctgctgctaagtcacttcagtcatgtccgactctgtgtgaccccatagacggcagcccaccaggctcccccgtccctgggattctccaggcaagaacactgaagtgggttgccatttccttttccaatgcgtgaaagtgaaaagtgaaagggaggtctctcagtcgtgtctgaccctcagcaaccccatgaactgcagcctaccaggctcctccgtacatgggattttccaggcaagagtactggagcatatattctaggttttaccaagtccaagctccctctacttgccgcatgatgggccaataaatacaagcaagatgttaagacaaggaagacactttattcaggaagccagctgacttggaagatggcaggcttatgccttaaaataaccaacttgttggggtctgggtgccaggttcttttgtagagtcagagagaaagaagcagagaggaagtaaagtgaaagggtattcaatcttacaaaacatttctaggggagaggagttcagttcaattcaattcagtcgctcagttgtgtccgactctttgcgaccccatgaatcgcagcagccaggcctccctgtccatcaccaactcctggagttcactcaaactcatgtccattgagtcagtgatgccatccagccatctcgtcctctgtggtccccttcttcccctgccctcaatccctcccagcatcagagtcttttctgatgagtcaactctttgcatgaggtggccaaagtactggagtttcagttttagcatcagtccttccaaagaaatcccagggttgatctccttcagaatgcactggttggaattccttgcagtccaagggactctcaagagtcttctccaacaccacagtgcaaaagcatcaattcttcggtgctcagccttcttcacagtccaactctcacatccatatatgaccacaggaaaaaccatagccttgcccggatggaccttagtcagcaaaataatgtctctgcttttgaatgctatctaggttgttcataacttttcttccaaggagtaagcgtcttttaatttcatggctgcagtcaccatctgcagtgattttggagctccccaaaataaagtctgacactgtttccactgtttccccatctatttcccatgaagtgatgggaccggataccatgatcttcattttctgaatgtttgagctttaagccaactttttcactctcctcttttatcaagaggcttcttagttcctcttcactttctaccataagggtggtgtcgtctgcatatctgaggttattgatatttctcctggcaatcttgattccagcttgtgcttcttccagtccagtgtttctcatgatgtactctgcatataagttaaataagcacggtgacaatatacagccttgatgcactccttttcctatttggaaccagtctgttgttccatgtccagttctaactgttgcttcctaacctgcatacagatttctcaagaggtaggtcaggtggtctggtattcccatcacttttagaattttccagtttattgtgatccacacagtcaaaggctatggcatagtcaataaagcagaagtagatgtttttctggaactctcttgctttttcgatgatccagtggatgttggcaatttgatttctggttcctctgccttttcaaaaaccagcttgaacatcatgaagttcacggttcatgtattgctgaagcctggcttggagaattttgagcattactttactagcatgtgagatgagtgcaattgtgtggtagtttgagcattctttggcattgcctttctttgggattgggatgaaaactgaccttttccagtcctgtggccactgctgagtttttccaaatttgctagcatattgagtgcagcactttcagagcatcatctttcaggatttgaagtagctccactggaattccatcacctccactagctttgtttgtagtgatgctttctaaggcccacttgacttcacattccaggatgactggctctagttgagtggtcacaccatcgtgattatctgggtcatgaagatcttttttgtatagttcttctgtgtattcttgacacgttttctttatatcttctgcttctgttaggtccatacaatttctgtcctttatcaagcccgtctttacatgaaatgttcccttggtgtctctaattttcttgaagagatctctatctagtcttacccattctgttcttttcctctatttctctgcattgatcgctgaagaaggcttttttatctcttcttgctattctttggaactctgcattcagatgcttatatatttccttttctcctttgtttttttgcctctcttctattcacagctatttgtaaggcctccccagacagccattttgcttttttgctgttgttgttgttgttgttgtttttactttttttttttttttttttactttattttgcttataatactgtattggttttgccatacattgacatgaatcagccactggtgtacatgagttgatccctgtctcctgtgcaatgtcacgaacctcattccatagttcatcaggcactctatctatcagatccaggcccttaaatctatttctcacttccactgtataatcataaatgatttgatttaggtcatacctgaatggtgtagcagttttccctactttcttcaatttcagtctgaatttggtaataaggagttcatgatctgagccacagtcagctcctggtcttgtttttgttgactgtatagagcttctccatctttggctgcaaagaatataatcaatctgattttggtgttgaccgtctggtgatgtccatgtgtagagtcttctcttgtgttgttggaagagggtgtttgctatgactagtgcattttcttggcaaaactctattagtctttgccctgcttcattccgtattccaaggccaaatttgcctgttactccaggtgtttcttgacttcctacttttgcattccagtcccctataatgaaaaggacatcttttttgggtgttagttctaaaaggtcttgtaggtcttcatagaaccattcaacttcagcttcttcagcattactggttggggcatagatttggattactgtgatattgaatggtttgccttggaaacgaacagagatcattctgtcgtttttgagattgcatccaagtactgcattttggactcttttgttgaccctgatggctactccatttcttctgagggattcttgcccgcagtagtagatataatggtcatctgagttaaattcacccattccagtccattttagtttgctgattcctagaatgttgacattcactctcgccatctcttgtttgaccatttccaaaatgccttggttcatgcacctgacactccaggttcctatgcaatattgctctttacagcatcagaccttgcttctatcaccagtcacatccacagctgggtattgtttttgctttggctccatcccttcgttctttctggagttatttctccgctgagctccagtagcatattgggcccctactgacctggggagttcctctttcagtatcctatcattttgactttacatactgttcatagggttctcaaggcaagaatactgaagtggtttgccattcccttctccagtagaccacattctgtcagacctctccaccgtgactcccctgtcttgtgttgccctgcgggcatggcttagttttactgagttagacaaggctgtggtcctagtgtgattagattgactagtttctgtgagtgtggtttctgtgtatctgccctctgatgccctcttgcaacacctaccatcttacttgggtttctcttaccttgggcatggggtatctcttcatggctgctccagcaaagcacagctgttgctccttaccctggatgaagggtatctcctcactaccgcccttcctgaccttcaccgtgggatagctcctctaggccttcctgcacccacacggtcactgatccttggacgtggggttgctcctcctggccgccacccctgaccttgggcatggggtaactcctcttggccaccacccttcaggcatagggtcctcccggcttctgcccatgacctcggacgtggggtagctcctctcagctgcgctgagtgcgccggtcgcagccacccacgcttaggggagaggaaggggtgtgttaatctcctatgcacaggtgggctgggacagattgtctctcatgagctgaacaaaggcactgtagtttacagtcaggcagggttatttgaggcaaaccattatttatgattataatgacaaaagcaatgaaaagcaagtcaaagaaaatttccaatgtggagtcagaattggcttcctctctgcaacatatttattgcaagagatatatcccattgtaccagtggtgtttaccacattttaaacgtttcccattatcaatatttttagaggatatttatttttgaatagtgttttatactgtgaaagtctcacaatttaccctaattaatactttgttgttgaatagttagttcactgctagtgtgaaatatgctaaaatattcatcctaggagatgagcatacattggaatataatattagatattagaatgctgaaacatgataaaatccttgttataagaggtctttttactataccattcagtagtataaattccttaaggtgcaaatgatattcgcagtttgctttttatcaacagcagtttctttctgtttgaccccagtgagaagagtggcaacagaaacatgcacctagagaacaaagatggcaggctgacctctggcatgctggagatggagctacatcagacatctgctccctcgagtgctggcctgggagggtcagggttggtggaactcaacaccagcaaccacaggccacagcaaggagttggcaaggcagattccctgagcccctaccacaatggggctgctgggcagagctgctgggctcctgtggaccaggattttggctcattcctcaaggaacggtggtgagtttaaaacaggtttaccttataaatgtggaattcacaaatactggatttccatgaacatagttcccttacattttttttgtgggaaaaatttccagatattctccaaggctctttccagcactagatcactttcctggcctgttttgaatgaatgctgtttctaaaatgtggctaatgtaaatccaaaaggtaataaagatagaaatcagattggcctcatcaactgtgtacaaactggttagtttttcttagagctattaaaattaggatatagatacacaggaaagaagagtgtgttagttgtctagtgtcagataacgtgttagtcactcagtcgtgtctgactctttgcaaccccatgaactatagcccgccaggctcctctgcccatggaattctccaggcaagaatattggagtgggttgccattcccttctcctgcggatgtccccgacccagggatcgaaactgggtctacatattctaaagttcagcatcttaaaatgacacatgtttgtttccttacagttttgtgagtcagaaatctgagcattgcttagctgggtcctccacctaagggtctttcacaggctgagaacaagctgtcagcagaggctgactgtcattcaagtgggtagggtctgcttccaaactcatcattgttggctgtacttagttcttcctgggcagatggtctaaggttctcagttccttgccaggtggcctgctccatcaaggctagcatgagagacagtcctttgtaacctaatcatagaagtaactccccatcactcttactgtgttctgtttgttagaatgagtcactaggttgtgcccacaatgtaggggatgggatcacacacggacgtgaacacctggagtagattattgagggcatggcagacaaaggttgcctgtcaaaaaagtggatgaatctgcttggcaacacagaagacacaagcgacatgagtttgatccctggatcaggaagatcccctgggataggaaatggcagcccactccagtactcttttctggaaaattccatggacagaggagcctggtgggatacagtccattggactgcagacagttggacacaactgagcacacacgcatatacacacacacacacacatttttagtttagtttaataaagcatattccatactgtttttcataatagctccatcattttacattcccaccaacagtgtatgagggttcccttttctccacatccttaccaacaattgatatttgtagacttttgatgacagccattctgacaagcctgagatgatatctcattttgtgattttgacttgcatttccccgatgatgagtgatgttgagcatcttttcacatgtctgttgggcatctgtatatcttctttggaaaattatctattcaggtactctgctcattttttaaccagattgtttggtttttttgatgttgagctgtgtgaattctttttatatttgaatattaactcctttttggatgtatcattcgcaaatatcttctcccattaagtaggtggcctttttgttttgttgatagattctttcactgtgcaaaagctttgatgtgtacatttatttttacttttgtttcccttgtctgagaagacatatcccccaaaatattgccaagacagatgtcaatgagcatactgcctatgttttcttctagagttttatgatttcaggccctgcatttagtctttaatccattttaaggtttttttttgttgttgttgtttttgttaggtatgaggaagtagtctagtttgattttttttttttttgcttgtagaggtacagttttcccactattatttattgaagaggttatcttttccccattgtatactcttgcctcttttataatagattaattgcccatttgagtgtgggtttatttctgagcttttcatttcttctgtttgattgagctatgtatcttttgtgtgtgtgtgtgtgctagtaccatgctgttttgatttttgtaggtttgtagtatagtttgaagccaagaagtgtgatacagcagttttgctctttttaaagtttgttttggctattgaggggtttttatgtttccatccaaattttatatgggattctatgggaaatactattgccattttgataggtcttacattgaatctgtagattgctttgggtaatattaacattaatacttgggtcattttagcaatattaattcttccaatccataagcacaatatatctttccattgtttgtgtcatcttgaatatctttcattaataagtgtgggtcttttaccttcttggctagagtcattcctaggtgttttattctttttaatgcaattgtaaatagtattgttttcttgttttctctttctgatagtttgttgtttgtcattgttcagtcgctaagttgtgtctgactctttgtgaccccgtgggctacagcacaccaggcttctctgtccttcactatttccctgagtttgctcaaactcttatccattgagttgatgatcaatggccatccaaccatctcatcttattccaccctcttctccttttgccttcagtctttcccagcataaggatcttttccagtgagtaggctcttcacattaggtagccaaagtattggagcttcagcttcagcatcattccttccaattaatattcagggttgatttcctttaggattgactgatttgatctccttgctgtccaagggactctcaagaggttctctagcaccacagttcagaagcataaattattcagcactctacctttatagtttgttattactatatagaaatgaacagattcctatatattaattttatatcttgccactttatcaaattcattgataagttccagtagatttttgatgtcatatttaggattttctatttacagtatcatgtcttctgcagtgacagttttctttctacattttctatttgcattaaaaaattttttcttgcctggttgctgtagctatgaatttcaacattgtgttgaataatagaggttcaagagggcatccttgtcttgttcctgaagttagaagtaatgctctcagcttttaccattgagaaagatgttagctgtggacttttcatatatggccttttctatatttatgtatgtttcctccatacccactttgttcagagtttttatcatgaatagatgttgaattttgtcgaaagcttttccctgcatctattgatgtggtcatataatttttattcttcagtttgttttttgtgatgtataatcttggttgatttttccatccttgcattcctgggatactcacttgattatcatgcatgatcttgttaatgtatttttgaatttggtttgttaatagatttttgaggattttgtatctctgttcactggtgaaattggcttgtaattttcttattttaattttaaaagctatcattgcctagttttggtatcagagtgatgttggctttgtagaaagagtccagaagtttttttcctctgcagttttaaagaatagtttgaaggatagatgttaatgcttccttaaatgtttggtagaattagcctgtgaagccatctggtcacggggttttgttttttgggagttgtaaaaaattactaaatcagtttcatatactgataatttatctgttcatatttcttattcactcagtatttggagattgtgcacttataggaatttgtccatttcttctaggttgttcatttcattgtttgtagtaatttcttatgatctgtatttctatcacttctccttttctcatttctgattttattgactttggccctctctttgttttcttgataagtttggctaaaggtttgtcaattttgtttatcttttcaaagaagcggttcttaatttcattgatctttttattggcttattttggttttatttcatttatttctgcattgattttattatttccttccttttactaacattgggttttgttcatattttttctagttccattaagcataagcttatattgtttatttgggacttttctgctatactgaagtaggcatctctctttataaacttcactcttagaatggcttttgctgcatctcatggatattggatcattgtgtttctgttttcatttgtctccaggtattttttttatttgctctttgatgttttcagtgatccattgcttatttagtaacatattggttagtttctatgtgttttatttcttgcaggttttttgttctttttctccttgtagttgatttctagtctcatagagttgtggttggcaaagatgatttcagtcttcttacatttattgaaattgttttgtgacctagcatatgagctatcctggagaaagtcccatgtgcacttgaaaagaatgtatatcctggtgctttgggatggaatgtcctatggatatctattaagtccatttggtttaatacgttatttaaggccagcatttctttattgataatctgtctggatggtctgtccattgatctaagtggggtgttaatgttctctagtattattgtgttactgtcagtatcttcctttatatctgttaatatttgatgtatgtatttaggcaaccttatgttgaatgcatatatatttacaattgctgcattttcttcttgggttaattccttgatcattatgtaatatcattctttgtcttttatgacagctctttgttttaaagtttattttgtttaagttttcctaccttggttttctttttgtttccatttgcataagatacttttttcctgttccctttcagtctgtgtgtgtctttagaaatgagtctctggtaggcagaatatatatgggtcttgttttaatatacattcaggctctttatattcttagattagaacatttaatgcatttatcttttaagtagttattgataggcatgtacttattacacttttatgatattaattgttttggggtcatttttgtggttctttttgttcttttcttttcttaaactctctttacttttgatctgatgactatctttggtgttcatggtttttctcttttttgtgtatctattgtagatttttcgttagaacttgagttttatatggagcaatctatctatatatacatggttactttaagttattaatctcttaagcttgaatgtttttaacaacactgaagttttattcccccctaaacttttacattttgacatcatattttatatcctttagctttgtgtatcctttaactaattttggacattgatgattttactactttttcttttaaactattactatctttataagtagttgatctcttacattgtgtatatttgcctttgccaatgagatttatccttcaataattttcatatttctagttgtggcctttccttttttgtttagagaagtcccttaaataattcttgtaaagctggtttgatggtgctgaactcttctagattttgcttgtctgtaaattttttgatctctccatcagatctgaatgaaagccttgccaggtagagtattcttggttgtggtttttcacttttatcactttgaatctataaaatcattcacttttgggccacatagcttctgctaaaaaatcagctggtggccttgtgtaagtttcctcatacattactagttgtttttcctttgttattaaaaaatatatataaacatttattttatttggaggttaattactttacaatattgtattggttttcccatatatcaacatgaatccaccacaggtatacacgtgttccccatcctgagcccccctccctcctccctccccatacaatccctctgggtcatcccagtgcagcagccccaagcatgcagtatcatgcatcgaacctggactggcgattcatttcatatatgatattatacatgtttcaatgtcattctcccaaatcatcccacactctccctctcccacagagtccaaaagactgttttatacatcagtatctcttttgctgtctcacatctgggttatcgttaccatctttctaaattccacatatatgcgttagtatactatattggtatttttctttctggcttacttcactctgtataataggctccagtttcatccacttcattagaactgattcaaatgtattctttttagtggcttagtaatactccattgtgtgtatgtaccatagctttcttatccatttgtctgctgatggacatctaggttgtttccatgtcctggctattataaacagtgctgcgatgaacattgggatacaggtgcctctttcaattctggtttcctcgatgtgtatgcccagcagtgaggttgctgggtcataaggcagttctacttccaggtttttaaggaatctccacactgttctccatagtggctgtactagtttgcattcccaccaacagtgtaagagggttaccttttctctataccctctccagcatttattgcttgtagacttttggattgcagccatcctgactggcgtgaaatggtacctcattgtggttttgatttgcatttctctgataatgagtaatgttgagcatcttttcatgtgtttgttagccacctgtatgtcttttttggagaaatgtctatttagttctttggccaattttttgattgggtcgtttatttttctggaattgagctgcaggggttgcttgtatatttttgagattagttgtttgtcagttgcttcatttgctattattttctcccattcggaaggctgtcttttcaccttgcttatagtttcctttgttgtgcagaagcttttaagttcaattaggtcccatttgttttttttttttttttgcttttatttccaatattctgggcagtgggtcatagaggatcctgctgtgatttatatcggagagtgttttgcctatgttttcctctaggagttttatagtttctggtcataggtttatatctttaatccattttgagtttatttttgtgtatggtgttaaaaagtgttctagtttcattcttttacaagtggttgaccagttttcccagcaccacttgttaaagagattgtctttaatccattgtatattctggcctcctttgtcaaagataagatgtccaataggtgcgtggatttatctctgggctttctattttgttccattgatctatatttctgtctttgtgccagtaccatactgtcttgatgactgtggctttgtagtagaacctgaagtccggcagcttgattcctccagttccattcttctttctcaagattgctttgactattcaaggttttttgtattttatacaaattgtgaaattatttgttctagctctgtgaaaaatactgctgcgtgatagggattacattgaatctataaattgttttgggtagtatactcattttcactatattgattcttccgatccatgaacatggtatatttctccatctattagtgtcctctttgatttctttaatcagtgttttataattttctatatataggtctttagtttctttaggtagatatagtcctaagtattttattcttttcattgcaatggtgaatggaattgtttccttaatttttctttctattttctcgttattagtgtataggaatgcaagggatttctgtgtgttgactttatatcctgcaactttactatagttattgattagctctagtaattttctggtggagtctttagggttttctatgtagaggatcatgtcatctgcaaacagtgagagttttacttcttcttttccaatttggattccttttatttcttttcctgctctgattgctgtggccaaaacttccaaaactatgttgaatagtaatggtgaaagtgggcacccttgtctttaggggaaatgctttcaatttttcaccattgaggatattatttgctgtaggtttgtcatatatagcttttattatgttgaggtatgttccttctattcctgctttctggagttttttttttttttgtcataaatgaatgttgaattttgtcaaaggctttctctgcatctattgagataatcatatggcttttgtttttcaatttgttaatgtggtgaattacattgattggtttgcagatattgaagaatccttgcatccctgggataaagcccacttgggcatggtgtatgatctttttaatgtgttgttggattctgattgctagaattttgttgaggattttttcatctatgttcatcagtgatattggcctgtagttttctttttctgtggcatctttgtcaggttttggtattagggtgatggtgggctcatagaatgagtttggaagtttaccttcctctgcaattttccggaagagtttgagtaggataggtgttagctcttctcaaaatttttggtagaattcagctgtgaaggcgtctggacctgggcttttgtttgctggaagatttctgattacagtttcaatttctgtgcttgtgatgggtctgttaagattttctattccttcctggttcagttttggaaagttgtacttttctaagaatttgtccatttcgtccacgttgtccattttattggcatataatggctgatagtagtctcttatgatcctttgtatttctgtgttgtctgttgtgatctctcctttttcatttctaattttattgattagattttcctccctatgtttcttgatgagtctggctaatggtttgtcaattttatttatcctttcaaagaaccagcttttggctttgttgatttttgctatggcctcctttgtttcttttgcttttatttctgccctactttttaagatttctttccttctcctaaccctggggttcttcatttcttccttttctagttgctttaagtgtagagttaggttatttatttgactattgtttcttgaggtatgcctgtattgctgtgatctttccccttagcactgcttttacagtgtcccacaggttttgggttgttttgttttcattttcattcgtttctatgcatattttgatttcttctgtgatttgttggttattcagcagcgtgttgttttcagcctccatgtgttagaattgttagtagtttttctcctgtaattgagatctaatcttactgcattgtggacagaaaagatgcttggaatgatttcattttttttttgaatttaccaaggctagatttatggcccaggatgtgatctatcctggagaaggttccgtgtgcatttgaggaaaaggtgaaattcattgttttggggtgaaatgtcctatagatatgaattaggtctaactggtctattgtattgtttaaagtttgtgtttccttgttaattttctgtttcattgatctatcataggtgtgagtggggtattaaagtctcccactattattgtgttattgttaatttcccctttcatacttgttagcatttgtcttacatattgcggtgctcctatgttgggtgctaatatatttataattgttatatcttcttcttggattgatcctttgatcattatgtagtggccttctttgtctcttttcacagactttcttttatctgatacgagttttatctgatacaagtattgctactcctgcattcttttggtctctattttcgtggaatatctttttccagcccttcactttcagtctgtatgtgtcccttgtttttaggtgggtctcttgtagacaacatatataggggtcttgtttttgtatccattcagccagtctttgtcttttggttggggcattcaacccatttacttttaaggtaattattgatacgtatgatcccattgccatttactttattgttttgggttcgagtttatacaccctttttgttttctgtctagagaatatcttttagcatttgttggagagccggtttggtggtgctgaattctctcagcttttgcttgtctgtaaagtttttgatttctccttcatatttgaatgagatccttgctgggtacagcaatctgggctgtaggttattttctttcatcactgtaagtatgtcttgccattccctcctgacttgaagagtttctattgaaagatcagctgttatccttatgggcatctccttgcatgttatttgttgtttttcccttgctgcttttaatatttgttctttgtgttttatctttgttaatttgattaatatgtgtcttggggtgtttcaccttgggactctcttggtttcttggacttggatgattatttccttccccattttaggtaatttttcaactattatctcttcaagtattttctcatggtctttctttttgtcttcttcttctaggactcctatgattcgaatgttggggtgtttaactctgtcctggaggtctctgagattgtcctcatttcttttaattagtttttcttttctcctctctgattcatttatttataccattctatcttctaattcactaatcctatcttctgcctctgttattctagtatttgttgcctccagagtgtttttgatctcatttattgcattattcattatctattgactcttttttatttcttctaggtctttgttaaacctttcttgcatcttctcaatccttgtctccaggctatttatctgtgattccattttgatttcaagattttggatcattttcactatcattatttggacttctttttatcaggtagatttcctatctcttcctgttttttttttggtttggtgggcatttctcttgttcctttacctgctgggtattcctctgtctcttcatcttgtttatatttctgagtttggggtgtcttttctgtattctggcagtttgtggagctctctttattgtggagtttcctcactgtgtgtggggttgtacaggtggcttgtcaaggtttcttggttagggaagcttgtgtaggtgttcttttgggtggagctggatttctcctctctggagtgcaatgaagtgtccagtaatgagttatgagatgtcaatggttttggagtaactttgggcagcttgtatattggagctcagggctgtgttcctgtgtggctggagaatttacatggtatgtcttgctctggaacttgttgggccttgggtggtgcttggtttcagtgtaggtatggaggcatttgatgagctcctgtcaattaatgttccctggagacaggagttctctggtgttctcagggtttggacttaagccttctgcttctggttttcaatcttatttttacagtagtttcaagagttctccttctatacagcaccattgataaaacatctaggttaaagatgaagagtttctccacaatgagggacacccagagaggttcacagagatacatggaaaagagaagagggaagagggagttagaggtgacctgaatgagatgaggtggaatcaatagatgagagagcaagctagccagtaatcacttccttatgtgcactccacagctggaccactgagagatgttcacagagttatacagagaagagaagagggaggaaggagacagaagtggccaggagaataaaaggggggaatcaaaaggagagagatctagccagcaatcagttccttaagtgttctccaccatctggaacacacagaaattcagagttggttagagaagagagggggtagggaggagacacaggcgaccgggtggagaaaaaggagagtgcaaagggggagagagcagtcaagccagtaatcttgctcccaagtaaaaatgggtagtgaagactgggttcttaaaggtacaaagttgataacaaataccaaaaagcaaagattaaaaatctagagtagggtttggaatttcaagaatacaatatgaaagaaaagaagaaaaaaagagaaaaaagtcacaaacattataatatatatatgtatatatataaagcttgcttttaaaaattagggtctttttttttgcaaagtaatagtaggttataaaagtgaaaattaaaggaataatagaggacttaaaaattaaaaaaaattaaaaaaaagaatgatcataaaaatagtaaaaatatatctaggactttctctggtgtttttgtgggtattgtggggtcagttcattttcagatagtttctcagtctgacatatttctcaggatctataggctcttcttatgtagtcggtactaacgacagggttttaatctgttgcacctgtcacttccaaggcagttccctctgttttagcttcttctgtttgctggtctcttcagtgtctgatttctgccctgacacaaagggggcggtgatggacacttatcttaggctcacttattcagtcgcgctgtggggagggagggacgctgcaaacaaataacactggtgtgtgctcgcagtgcctcagccacactgggcctgcccccgctcacagcatgtgtaccctccctgcccacactgctcaggctctaggttgctccactgggaaccatccgaggccggccctgggctgcatgcacctcccaggtataagccgctcaggttcaggcacttgggtagtccccagaggcacagacttggttggacctgcgttttgtgcccttcccaggtccaagcagctcaggtgatgaggtgtttggcaagtgtggtcgctgcaacttatcacctcccctggtcttgccacttggctttctgtgtacaactagtgcaccttctcaggaggatgttgaccatccagaaccccaagaagtcttagttagcaaagaagcctgcttgcagttttgtagataatgtctctctggtgctacgattgcctgcttccagctctggctgcctgtcactggaggggcatggtctgcagccgggtatctctgttcagtcctttgttctgtgcgtgggcctggtggtgtcttaggttagggctggcttttcgcgtggtagttatcccacagtctggtttgctagcccaagctagttcactcagattgcgcttggggcattcatgccagatccttactctaagcaatgcagcccatgcctccctgcccaggctccgcttgctagtggcaggtgcaggtgtctgcgctgcttctccactgggggagttactgttgggctcatagtctgtgggtttaaattatttatttatttttcctccctgttatgttgccctctgtgcttccaaggctcgccacagactcagcagtgacagtttcctgatgtttggaaacttctctcttttttaagacttccttcccaggatggagctccatccctacctcttttctctctctctctctcttttttttttttgtcttttatattttttcctacctcctttcaaaaacaatggttcacttttctgggtgcctaatgtcctctgccagcattcagaagttgttttgtggaatttactcagagtttaaatgttcttttgataactttgtgagggagaaagtggtctccctgtcctatatctctgccatcttaggaccatctctcctttgctatttttaatattctctactcatctttaatttttgtcattttaattacaatgtgtcttggtgtggatctctttgggttgatcctatttggaactttctgtgcttcttggacttgaatgtctgtttccttttccaggttagaaatgttttcaattactatgtcttcaaataagttctctgccactttctttctccttcttcttcgaatcctttaatgtgtaagttagtatgttgatgctgtcccagaagtctctccattttaataattcttttttcttttttctattcagcttgcatgattctcactactctttcagttcactgatctgcccctctgtatcacctaatatactctaaatttcttttggtgtatttttgtttacattatccttcaattctggttttttttttttttaataatttctgtttttcttaaacttctcgctgtgttcatccattcttctaaatttgttgagtgtgtttatggtcattttcatggaaactatattaggtagattggttatctccactttgctttgttcttctggtgttttatcttgttccatcattttggagtatgttcctctgttatttcatttttcttaattctatattttcatttcaaaacattaagtagaatacttatacttttgtatcttagagaagtagctttatgtaggagatatgcttatgtgtcccagaagtctactctttctggtctccagagccaaatgcactaggatgctcccggtgtgggctgtgtgggtccttctgttgtgatgagatgagtaccatggttggtctggtaggtgtgattggcctctggtctgctgatttccaggccctgccctgggagttgatgggtgtagctgggtcacaaggtagatgactgaagagctccaaagtgtcacagggctggtgctgcaaccactgctgcttctgctgttgccaaagccacagagttgagccaaagaaagagttggagtatttggatgaagatatgggatttggtctctttaactaatcattaaaaagcaatcaatttagccagtttatttgtgaaacaagaaattaaagactaactcctcttttagaaaaagatgaaagatcctggatctttgatggctggtctgggctaatggggctagtggagctagtgttattttgctggtgggtggcacttatgtctagggagtcccagggctagtgctggactgctagtaggtagaccagggtgctggaatctttggttctaggagcctgggggtcccagagttggtgtcagtccactggtgggccaagctgaatcctgcggtctctggctacagagtctagagtttttcagagctggtgctagctctctgttatgtgcatgtgaagtgtgtgcatgctcagttatgtccaactctttgcaaccctgtggactataacctgccaggttcctctgcccttgaaattttccaggcaagaatgctggagtgggttgccatttcctactctagggaatcttctcgacccagagattgagctcatgcatatgtctaccacacacttgctgtgaccaagcgagtaccccatgatgtgaggtacataaacgatctcaactattacatagtcagttcacttcagtctctcagtggtgtctgactctttgtgaccccatgaactgcagcatgccagggctccctgtccatcaccagctcctggagtccacccaaacccatgtccatcgagtcagtgatgccatccaaccatctcatcctctgtcgtccccttctcctcctgccctcaatctttcccagcatcagggtcttttccaatgaatcagcatagtcaccatttacaaaacatggggtgaaagcctgaacaagccatcttggccaatttgctctcgcctcacattctatgtgcagtccatctcctgtgatgtcccctaggcaagtaacactgacccttggatttataacttgctactgcagtaactacaacaacaatcagttacacccccaatacaaaacaaaacacaatgccaggtatcacctggaacttatgttgatgtccttgccctcatggggctagaaaagccagtcaccacatgtggagcacctttatgttgcatggccaggtccagtccaccatctttccttgtgaaattgcaggaaagcctctacaggggcaactccactcctgcagaattttattaaggactcatacaaccccctacaggtgccataccaactgcttcaaggaggagatttttgtggcattcacagcccacccaaagattccaaatactttcacactgttataaatctgcaagagaatcagagggtagtagcacatcacagcacacagcctttacagtacacagtcctactaaacctatatcacaggacacagcattgacagcacactgttctactaaaccttcatcacaggacacagcctttacagcacactgttctacataagacacagactttatagtacaatgttttactaaacctacatcacagcacacagcctttacagcacattgttctactaagcctacatcacaggacacagcctgtacagtacactgatctattaaacatacatcacagcacacagcctttacagcacactgttctcctaaccttacatcacaggacaaagcttttacagcacagtgttctgctaaacctacatcacagcacacagcttttacagtacactgttctacgaaacctacatcacaggacagcctgtacagcacagggttctactaaacttacatcacagcacacagcctgtacactacaccattctatgaaacctatatcacaggatacagcctttacaatacactgttctaccaaacctacatcacagcacacagcctttattgcacactgttctcctaaccctacacgacaggacacagcctttatagtacactgttccactaaatctacatcacaggacacagactttatagcacattgttctactaaacctacatcatagcacacagcctttacagcacactgttctaataaacctacatcacaggactcaatttgtacagcacagcgttctactaaacccacatcacagcacacagcctgtacagtacactgttctccttaaacttacatcacaggacacagtctttacagcacactgttctactaaacctacatcacagggcacagtggttacggtacgctgttctactaaacctacatcacaagacatagcctgtacagcacagggtttctactaaacctacagcacacagcctgtacagtacactgttctattaaacctatcacaggtcacagccattagagcacatggtttactaaatttacctcacaagacacagccattacagtacactgttctactaaatgtatattacaggacacagcctttacaatacactgttctactaaacctacatcacaggacacagctgttatggtacactgttctactaaacctacctcacaggacacaggctttacagtacactgttctagtaaacctaccttacaggacacaggctttacagtacactgttctagtaaacctacatcacaggacacagcctttagagtacactgttctagtaaacctaccttacaggacacagcggttacagcacagtgttctactaaacctacttcacatctaacagccgttagagtacactgtcgtacaaacctacatcacagcacacaacccttatagtacactgttctactaaatctacatcacaggacatgcacagtacactgttctagtaagcctacatcacaggacacagcctttacagtacactgttgtactaaacctacaatacaggacacaggctttacagtacactgttctcctaaacctacatcacaggacacagcctttacactacaatatctaaacctacatcgcaggacacagccttgacagaatgctcttctactaaacctacatgacaacacacagcctttacagtacactgttctaccaacctacatcacaggatacagcctgtacagtacactgatttactaaacctacatcacagcacagagcctttattgcacagtgttctcctaaccctacatgacaggacacagcctttatcgtacactgttccactaaacctccatcacaggagacagccttgaccgtatacttttctacataagacacagcctttacagtatacctctgtacttttgcatcctcataaactggatgggactcctgccagctctggcctcctttgggagtcttttgactttcaaaatggcatcttgtatgccatccctctacttctctcaataaggacccacaaaaccccaacagatgctgggcccatccctgtgtcccaaagtcacaaaagccatgttgccaagtgttcctgatgcattttccaaaactgtttactcaaatcggccaactctgcctgagtatatggttgaactcccatctgccgaacaaggcggcatggactgtcactggcaccgtggggtggattttcctgactgtcctgaaggcgaatatgaattgtgccctatgtgatgctgcgccagtgctcaatgtgcaaagacacttgtaagaactagagcaatgtatattggcactacagaaagaaccccctggctctgaagaacccagcatctctgacagagaggcagtaagtgacagagatgatgaacgttatgagactttggacctctgcttggcagtgagacccattatgcagcagaaagtgaagcacagcagtgttctctcatagctggtgcagcagccgtagcaggagacatgctatattctcttctcttgtgcctgacataatgcacagagccatgacacagcactagtatgttactgccttctaggtggagctcatgtatatgcacactgctgtggtctggcggtcatcatcaaggggcccccagtgtgactggttcatgacatatcgaccatatactctggcagagttggtcaacttggctaagcagttttggcaaatatgctgggaacccttggcaacatggcttttgtgaggaaaaactgcacagaatggcaaacatgactggactctattataacactaaactgagcctgaaagtattgaccccacagcatctagtctgtgtgaatttctgtttgtacttctagtgtggtttagcctggggtggaaaattgtgtctaattatcttaagctccaactttttacaattcagatataacatgtgaagtttaccactgattctcggggcacattcttggatctagctgtaaccaccagtgaacacatccttcagtttttgttaatgatcccttccttcactgtgtctttcaggtctcaccctcctttctcccaagtcttcagttccaggtctaaagacccctgctttacagaaaacactcctttgctgaggaatttctcacaagaaaaagggtgaggtttttttttttttgttttctttcttataaaattaagaaatctctgagcattacccttatgctcattacactcatgctggagaataagattagcttttacctgacatgtttggtctttgctagatccttgtcaattcaatgtgtgttcatggttctagtagttgtattctgtggcttatgaatttccaaataaccttgagcatgaccctgccatgagtgcatagcatatatacactcatccatgcacataactctgacaggctgtcttgagaggtcagggcttctcaactggggctgaggttggcgctgtcaggagagatttctgttgtcacaaatggggaagcagtactactagcatttatggtagaaggcaggaatgctgctaaacactgcaatgcacagaacacctccccacaataaagaattatctaactcaaatgtcaataattattaagttgaaaatgtatgatttgaaagaaaactctacttcttataaattccttttgaggataaacctgcctggttctgaaaccaataagcagagttgctctgtaggatgagttacagactgtctcccttagggtgaagaaccctaactcagacctccaattcatctcctcttccttctgcaggcaaacttccagaaacctgagtcacctcgttggtgttctctgattgctcacacattacaatcttgggacattgtcctggaccttcttttcttgcccactgacccttacactcagcctccctcccacagcctctgaagaacttcccaccttcttcctagctctttctataactgtttggtagccttcaccatttagggtgcatcagaatttgagggtgctcatatgccatgtgggttcttggtctcaccgtccaaagattcaagttcatgggaacttgatagggtgtaggaatcttgactgtcaccttccaatgcagagccaatctggcttcttccaggaaactcttgatgactagttgtgtttccctgaaaatgttcccactgagtccattttatgagagggaactcctctcttccttggttctccagaccaggcccactcaagtttaagggggctcaaatgtcccctcctttgtaaaactttggttcctccacagctcattcaagagtcaatgctccttctttgctctcaaacaccaaattcatgtcctgactttggaacttgtccttgtgttatccatgattatgcctgccaggctgagtccttttcatcctatcccagcacctagcaaggcctctgtcaccggggagataacaactctcatctctcctaatgagtaactttgaaaacgaacacttcacccatctattccctttaaggctttcctttgaattacctggtaaactgttaaggcctgagacattttcaactcatgattctctagaaaaccaagaactcaagaacatgaaagcttttatcccgggcttggaacacagaggccttgggatgctgagctctgtctcacatcacagttcagaagcacaatatggatattacatatgggtttcacatagcctagtttgcatctttgagcttcttcttatgaataaaacttttgttgttgttgttgttgtgaacaagtcctaaggcagtgataagggttcaggagaatcacaatgcccaattgagctaactgggtttgagaggcataacataatagattgtggctattgtgtcaatattgccatcccacaagtattccatgcaatacaggaaattctgagctttggagcagccttactagagacaagtgctgactgagaatctgtgctgaaggaattgttcaaaaactcaaggattcaataaaagtaaacaatgcatccacatgtaattttgataaaaatttatgatcccccttgatccatgcttctagataaaggtcttgttcttgggtccctctaatccagcactgatgttcctcattcctgctcgtgtagatgttgggcaggaaaacaacacaatcttctctacagctccattacagaaagatgcctagtacagaggagggaaggcttacatcattcattgtgcttcaggatgagtataacagaaccaggtgttgagaactccagcacagtcaaagagaaagcaaaaactgaaatgtactagaggtggtctgagccagaaaaaggtttactggaaaattccaaaatcagaacaagctgatgtttcttgaagggccacagtattttgaggattgtgtgaccccagaagatttccctgaagtcaagggtctgtgatgtcaggaaagatatattcccaccagtttgacagtattacagtgtttatggcccttttaaaaaccagggttgatttcacattttaggctcacctttgagatgaattgttttggagatgctactgttgctgtgaaaataaccacaaagcctcaatttccaggtcatggtgcactcccgtttgccacccagagttcattactggtgaagaatcttgggaggacagctcaactgagtgggagggaagatccctgctaagcagagaattggcaggttcctctgaatctgcctccttagagaagggggagcttctggacagtgctcacatcaggttccgtcttgccaagctgaggtatgatgacttggagcgccaccactggcatgggggtggtggtcacacagtgcatgccctgggactgggctgggacagggaagtgggtcttgccctcaggacgtccttcccaaggacacggtggaggtgaggaagaaggctaagtggtactttcctggaaagtagtctgcttttccttcaggccttggaagacagataagggcacatttgagccagcatggagcttttaagaatgcaggaaaacctaattatggaccttgatgactaacatcccatactcctttctgttgtgtggctggggtcttcacgtccatgagggtttgcagatgagaacagtccccgtggtgttctagaagctgatattatcatttataatcagtgactaaggtttctgcacatgcagcagagtgtttttagggctgtctccctgatcctgtttgtgacaccaattgtcttgctgaatctcactgtgtgtactgttcactgaacccatagtaggcaaggcacgagctaagaggctggaagaaaatgtgaagagctgtaggaaaggcgtctcctggctggcacagcagccatagcagcagacattacataactgcacacaaccattcagggcttttccaggtgaagcttatacatatttccagaacaaaagtagcccatagccaagcgagtaccatgtgaggctttgggcagtgctctaagtgatctcagctgttacatacccatgcaaagccattgtttacagaacatggggtgagagggtgtgagagcatgggacgagagactggtgccatcttgtgaatttcctcacaaggggcaaggaattgggtgggtctgagagaggccaagccctccatgcatatgtaggagggcacagcgcacacatgcatgggggatgtgagggcatttcgcaggaccacccgcaggggtcagaggagcggtactctccttgctttgtgtgctggggcttctgcatgagccttcacttgaaagaagtgttctattgaaaaccatgtgtttgaaagtggcatttttagagacagaatgaggcttctggaccaggaccaccaaggtccccattctgtatctgcgcagaggtagctgaggaaccaccaggggccaggcatgtgcatgcaactgtctccttactgcctggcattccctttgctccacagccttctgtggcttccactaagatgatctctgcagaaacccatggataggtgagaggacaccatgaagctgtcaaatattagtgtgattacttctctacataagggggcccatcttttctgaagctgttagaagggctgattagaagtgtacctgcctgcatcccaaagtatatctgtctttagccagagaggcccactctgagttgtcctgttgatgttacaggcaatcctgagaggtagataaaggaaggtacctcggagagagtaagaattttgcttgaggtcatgcatgggcttcccttgtggcccagttggtaaagaatccacccgcaatgtgggagacctgggtttgatccctgggttgggaagatacccttcttgcctggagaattccatggactgtatagtccatggggtcacaaagagtcaaacacgactgagtgtctttcactttcactttcatgcaggtttttgagagaagcagaggggtaggggcaggaatgtgaccccaggtcccccaccagtgcttgaccatagagatgttttttcgaccatgcctcctgataaggatagagtgaagggacaatgtaggtaattaaatcctacttggggaatttaagtattgacaatattacagtgtttaatagtggaaaaaatgtgagagactcttgtactttaatgattactcaagaaagcatgtttgcttaaccacaaaaccaatacctagcagacctttttagcaacaaaccatgcaacagaagcacaagacatgcctcaaaacaataaaacaatggtggcatgagacaccatcctgcctagtgagttcaataacatgctctctgcacacataaaaaaataataatttgtgaacttagcttgatcatatagggaaaagaaaaaatcccctgctcaacctggaggaggatggtggaagcttgacatttactcaagaaaggcaaagatgtcttctccccttccccactttatctttgattataaaactgtggcccactgagttttcaggatgtgacactgcctcacccactcacctataagcctcacaaatgtcctattccaataaatcacttctatctattactttatctctcgctgaattctttctgcactgagacataaaggaccaggagctctttggagccccctgaaaagacacctaacggtttcacttctagccatgtgtagtttctttaccatgactggtcttagctataggtgtggtaaatattcagccagtttaatctgctttaaagtcatttgaattatgtgaaagcatgtgaacaggttcctggtcctcgttgttcaccatgatggtaagccctgatactgtttacacccttctccagcatgctggctcacaactccagaggatgcgaggttcttcaaatatcctgtggcatggaaaataagatcagtacatttaagcctttacattcagtagttgttttattttctatgattgatagagtagttgcctcaaactttccacttaactaaagatttagtgacattctttttaacatgcctagaaagtactatacattattgttgaaacttgtaaaagctattttggatggtcagctctgctgtatgtgtcagttatgtagaaagacatttgtgtttaggatagttcaattaatgctttatgctttaaaaagaaatattttttattcccatttgaataggaactattgatgataatttggaagcatgatatgattattcatcagattcattaaatctataagaatgaagaacaaggttttgctcttttgaaaggatcagaaagattttgagagagatgtcccaatatagactttcttctttcattctacaaacatatgtcaagcacaggctgtataccagcaccctatctttggcaggggcggagcacaaataccccagtgcctgccctggggaagcaaccaagggaaagcaccctccagcaactgggcagtgataatatcttcaagagatggggtctggtgggccctgaggaggtgaaaggagtagagataagcctggagtggctgccaggaccataattgcccaaaggcctgagggtcacaattaagaagtgtgtaatgatgactatcaggggtccagagagggctggattgtctgttaaattatctcttaaggaattcttaaaggattctgctggtacaaccagttacaacactgcaaattctttcttgaattgtttgtttatgtctcagtcaatgtttattcaatgatcaaatccatattcttaccttccagaaaacttaagggaaaataattgataaatatgaatctgagagccaagataaagcttgtttccagaaaaccagagcctttaaaacgctagtgaagaggcctaaatcttgaacttcagcatctctgacaagaagatgtgttcagacattcaggtttaatgttgtctcctcctgtaacctcctctgaactgcttctcatgaagctgtatgtttacaacaggtcagagatgttctcagcagtatcctccttcatatcatgttatagaaagaattctcaaaggattctatgtggaattcttttagctggacattaccccagccttcagcagacatctgaggtttgacctttgtgggtgcatgcaaataggactgccattaacgtgacttgggacctgtcttttctcttgcaggtgctgtgtacggtggctaaaagtcgcaggcttatttgtctttgtggtgctgtgctctgtgagtaccatggcatgctgagccttgctgtctgtttagcagagtccctgggtgcttcgggctgggtagcagggtgcctgaggtatgggacacacacacatttcttagaaggagatgctgagggaatgtgagatggcagtcgaagtggctagggagtcctgtccctagcaatgttcctctacttttgtcctactttgtacagtggaaaccatgagaatctggctgtggtctgtagagggcagcttgccctggggtcttaatccctactttaagtggcttgccaaattctcttttcaaacacatgcaacaagcactctttatttgtgttgggacatgtccagcaatcatttttgcccctaggaatgtctcagtgcccatttggagtggcgcccagctgtttgggagagagtgaagttctgtgtctgcctcttccctggagactgctctgattttacttgccctacatccccagggatggttgcagagctagaaccctgggggcaacctgggtgctcctctcatttaaggtgtcatgagtgtcattgccagcatctgtgtggtatgtgccttgatgtggccctagccaagaccacattataggcacttaaaatacatttgctgaatgagcaactgtgagcctcccccgacccaatctgtgtgtgtgcatgtggatgtgaggatccatgtctgcctgtgtgtttgtgtgtctgcagtcctctgtgggacaagtaggtcttttgtggtctgtaaccattttgatcttgtgtgtgtgcctagggagttatttttgcagttaataattattatctaattttagcattggcataggacactttgtatgggccatttttgagagaccccaatatgtgacggggtatgagattgtgagcaaggaaggggtgggtgagtagtgtttccatacttgtgccctgtggactccaggactggtgtggttatggctcttctcagcaggcagcctgtggtgacagctgtgctgggtgccctttgtgattggaagctgtgtgtgtgtgtgaccatgtgtagctgtaaatacatggtcttcattatctgtgtgtgtgggcatgaggactggggttctatgcatgtgcaggatagtgcatgacaagactcttctcagtgtgacgtgtagagaacaatgttgcatctcagacagcaagcgtgcatgaagtcaatattggttgaattgaattgaatataggcaacactttaataacccacaaggggggagaggaggggtccacagaaaggaaatctaggctaaagacaattacaatgaactgaaaacttcatgagtttacttttttggttaccaatttgcctctctacttcctattcaaacaattgtgtgtttctgaagacccagttgcttaacacagcctggtgagtgggtgtactgggattttcaagggtgtactgggaggtatggttgggctaagtctcccctgatccctgtgagctcacctgagctctgtgtctggtcttcactcttctggtaattgaaattttggtgttttgtggacacaaccaaagcagaatttgaggaattagttttgaacctctgtaatctgttatctcatcatcactataatttagtttctgagggtgtataagttgctctgaaaattccacagcgtgagctctcaccatcatataggttgtattccctactctcccatacaggaaaaccatgtttaccctcctctgacaatttaattttaggtctgggtagtcaatccttaaaactgtcaaatatcaataatcaaggcccattgcagcaaaaaaaaaaaaatagtttaatggatcagaattttaacttttaatatctcagaaaagctattcagagtaagcaagtaaattttggatacatcaagcagcacaattatcataaccctattttcagctcatcaaagttacttaaatcctattgctgtcacaccacaaatctatcattaaatgtttctgattgttgcagattttatttagcctgtatccagatcaaggaaagctctggcaattgctggctgtgtcaccgctggaaagctactgtatctgaaccttttttgagatggacagtcacccgtggttgagtcacaaagtgaaaagactattatgatggttgcccaaggtcacagcataagcaatcatgattactccccatgtgtgttttgttcctccaggatatttgaaagataacgcttcagaacataaagggagggggctttagtgagattgcagtgggtgggtggtagggagattccccacggaaaggtgacagcaaacagtgtatttcagttaaggcccagctttctgtggctgttgggtgctctttctgtcctcccaaccacacccccagcccctgacctcttatgttttagcttaaatcgttcctgtttacctagctttaagttcattggttctttccttggcagtgtcatctgagtttgatgattgcttggtttcttatcctctgggatctcttgccattttgtaggtctcagctgctacaacagaataccacaacctggatgacttaagcaacagacatttatttctcaaaggtctagaggctggacatccaaggtcaggatgggctgatttggtttctagtgagcactctcattttggctttcagatggccaccttcttgctatgtctcctgtgtttgtgtatatgtgtgagtgtgagtgtgtgtgtgtgtgtgtgtgtgtaaagagtgagagctctctggtgtctcttcttacaagaacactgatactatcaaatctgggcctcaacctatgatctcatttactttcagttatttccttagagacccaggcttcctaggtgcctcagtggtaaagaatctgcctgtagctgcaggagacgcagaagacatggattccattcctgggtcaggaagatcccttggaggaggacatgaacattcagtccataggcagagatgaaattttaagcttgaaggtgaacacaccttaaattctatgggccagggggagttatgtaaatccaattgagtgttggctatgctatggtctatggttgccatggtaaccatcagtgccccagacacctggaatttctcagctttctttcatttctttctttcaggccctgcactattcctacccatccttcaggggtagggctgctttctcatcttacctgcccccagctcttagggctctgttgtactcttgggctccagatttgatgtgcttccctattaaattcaagctttcttagggatctccccattccactcattgtccctgtgagaactttctggagttcatggaagaagagcctagaagatgttagcatccctattcggtggcttaccaggccaaggtcaaggcctagtcgagaagagggctcagaggatcctgactccagtttggtcaaggaggaggttcttgccggtgcttctgagcccagcattagataagctctgaagcaaactgaaggagaagcctgagagactccacagttcaggtgaacctcacagatttgttccgtgcactgcagtagcacattgccagcagttcagaagtactttgctcgtgtgtctttctttccatcatgcatggccctttaggacatagttctctgttctgagaacaccagaacagagtagatagtcatgcttgttagaagaacagtatggagactgtgagccaggaactcccaggagagtggccctggtgctcacagtggggttgggtcaagtcaagctcgaaagacagcttaaatttgagtcatggatttgagtaatgggaaaagcaagaggaccatggttggatacaacagaggaagaagatgatttctttgtcttctctcttccatgacctggtctggctgggactctggtataggttcaaaggacttgaaggatgatactgaaaacaaatatttattagttagaccaatatgttttggggacataaaatgtggtgagaatcatgttggtctccagagaagtagagaaatgaatagcatgtagtttctttacttgaggagctagatcaggggggagaaaaatctaaaacagacaatagtatgttgtgagtgagcactttaacagaataagcctgatctacagaggactcaggaaggagtgaggatcctctcatgctgtggatgacaagaaagggtttaaggagaggagagcttgagcaagatcttaaaagatagtggggttctctaggtttgggggaggcctctgaggcaaaggcaaaatatgaccttagcagagcagacctttcagaatggctggaaggcaaggatcaaagctgtctgcagggtaggcttgaccacaggtccaagttgctgggatccttaagtcactgctgacaccagaacattgcagtgggctttgactcccaggcacaatgtgggcatctggaaaggcagagggaaaggagggcggaggtacatgtggtccagtgtcccttggattttgtgtgcactccatttgagtggtggttaatcatagtgtgttttaatcttccagctagggcgtgacacccccgcaaggacaaaggccttgttccattctccttgctttttgtttgcaatgtgctgtgctctgattagtcattcagtctgactctttgcaaccccaaagattgtaccccaccaggcttctctgttcatggggattctccaggcaaggatattggagtaggttgccatgccctcctccaggggatcttccccacccaggaactgaactggggtctcctgcattgcaggcagatcctttaccagctgagctaccagggaagccccataaacattcattacattattagaagaagcctctgcttttctgatattagccttcaagggtgctgatccatctcctgggtttttgcaaggtctctaaagtttcttctgtgctgaaatatcttttcccactccatacatatcatatgtctgccttgggaaaagaccaagacaggaataatttcagtgtggcagaatcatcagtgtctctttgggcctttccctactatatcctgcctcatgtgtgacttctgtttgccttttgtcctttttggaagccatgtagcagcatagctatgggtagatgctttctagccaagagctggctgcccattctcagctctaatataggaaacagtgctgataaaaacacttcctttttaaaaaatattaaaaattaattttaaaattaattttaactaaaaatttattttaatggggggcggattacttttgtattgtagtggtttttgccataccttgacattaatcagccatgggtatacatgtgtcccccattctgaacccccctcctacctccctccccatcccatccctcagggtcatcccagtacaccagccctgagctccctgtctgatgcattgaacctggactggtggtctgtctcacatatggtaacatacatgtttcagtgctattctctcaaatcatccctccctcgccttctcccacagagtccaacagtctcttctttacatctgtgtctcttttgctgtcttgcatagagggttatcattaccatctttctaaattccatatatatgcgttagtatactgtattggtgtttttctttctggcttacttcactctgtataataggctccagtttcatccacctcgttagaactgattcaaatgtattcttttcaatggctgagtaatactccattgtgtatatgtaccacagctttcttatccatttgtctgctgatggacatctaggttgcttccatgtcctagctattttaaacagtgctgtaatgaacattggggtacacgtttctctttcacttctgttttcctcagtgtgtatgcccagcagtgggattgctgggtcgtatggcagttctagttccagttttttaaggaatcttcacactgttctccattgtgattgtactagttttcattcccaccagcagtgtaagagggttcccttttctctaaaccctctccagcatttattgtttgtagactttttgatagctttcctgatagcagccattctgactggcgtgagatggtacctcattgtggttctgacttgcatttctctgataatgagtaatgttgagcatcttttcatgtgtttgttagccatctgtatgtcttctttggagaaatgtctgtttagttctttgtcccattttttgattgggtcatttatttttctgcaattgagctacatgaactgcttatatatttttgagattaattctttgtcagttgctttgtttgctatgattttctcccattttgaaggctgtcttttcaccttgcttatagtttcctttgttgtgcagaagcttttaagtttaattaggtcccatttgtttatttttgcttttatttccattactctgggaggtgggtcatagaggatcctgctgtgatttatgtcagagagtgaaaaacactttatttatcaggatatttttgtatttaaaaaacaaacaaacaaaccaagtgcatcttgttgggggaatttttaaaagggtttactattcactggcactccccaacaatctgtttaaatcctgtaaacaccctggcaacagtgaagttctgccttcgcccaagtcagccccataaaccacctgtttctttaagggttttaaggaagagtaaaggaattggtcactgaatcgtcctgcaatcagtgagctgctgttaagacttttgagaccttacacaaaacatagatcattttgagaatcattttttttttgcacctacagcagctttctctcctggagcaagatagctgggctagctgctgtttagaatccctggggtggcccccagaccttgcagcagaggtgagagtcagctggcacagagagaggtagcttgagagcacagacccttccgtgcagcacaccagcacggggtgtaggagtgaaggggccagattgtggtggggatgcaagggcatgagggttacatgttgagaggaagtagcatcttttccctatatcttccctgatttagtccttcacaagctttgaagggatttccctcttctcactgcaatggacttcactggtttagccaatttcggatttcttgttcagttctccctgtgatttctcaccagccaccttaggatttgggcattgctgtggattagttcatctgttcattcaggaggccatcctgcctgctgctcaccatgagtccaggaactgggacaggtgttttattctggctgccaaagtggtagcagagatgatcgtaggatgtgagacaccagctagatgttaaagcagatgattcaaaacacaattaaagaaaacaaaaccaactgtgtgtgtcaggagtgaggggctgaagaaacaggagcaggcagggaagatggaagggatggcctggacattcctttccttgtgtgcctcccgagatgggtgttccctgggagggtgggggcggaggggggtgcagtccaggcctctccctcttgtgccgtagtttgccttgacactcccccagctgtgaacctcagcagccatgcagactccatgctgctccaggtgggcctggcaggggccctggtggccggcagccccagtcgtctcgggagagaagaacacgtgctggtggaggtgacccaggccaacactccaggctccaggtggcggcagccacagcaggttacacctaaaagttacttgaaaagaattgtaaaaaatcattttatttctttataaattgaatttcttcttgaatggatttgatgggagccaccattattaggcaagccattatcttttactttgtcatggaaattctcttttctctaaggtggttataaaactctcaccatttcagtaaagtcaggcttttgaggtttcttttttttttttttccaatttagagtgttttttttttttttttttttgacaattcagggaaacatatttttgaaagtgcagttaaatctgagccttaccttatggtacagaagatagttcaacaccatggttcccttgagtttgtggactcttagctaagactgtgtctttccccgagcttcttcttctgtaccaatatgaccttgtgctcagcatctaaggcaaggactttagttcacatcctgcaaaggttaggagagccagcagtcctagccaccatgtcccagagcccagacaagtctctctctcgtccccaagatcctggcctcagggactcccctggatttccatgatgacttccatatgaagtcatatccctagttcacagattttccctgttataactaatagaaggaaacgctgctggtatatgaggctgtgtcatccaaaatggagtataactgcagtaatggtgggtacagcacccgtcacatttttctgccatacagagcagtgtccccagagccagagtctcattatgaagaaggctgcggtttcatggacaatggctgatgcagcactgatgttctaaactggttgctctggccatggtcttaggacataaacttggcttccctgtatgcattgcctatttcgctggcaagggttcctcagtaaagatgagatgggcacacttaatctgctgatggttccctctgtgaccttgtgtggaggagggcatgaccttttgtagcctgctgacacatcagcagttgcctacccttgggtctgtattgagcttcctggctccagaaacacaacacaggagatttttactgaaggttttttttttttttcttttttctgatacactctttccaaacatgaaagttttaagataagttgtgatctctcattcaggctttgaccagtttcagagttcctgttttttattttctttatgatttgtgggtggcaagacttctgtcctcccactgaaatttccccagcagccacagccaggcctcccacctttgccccaccagcacctccatctctgcacacatctggcccctttcatctggcttttccactctcctgcccttgacaagggcacctcagcctgtgaaactgaagctcatcctcagaccctcctcccacaggcttctgggacctgggtgtggagagtttcctgcctccagtttgcaaacagaaagcagtctttctggtcagttgcctcagtgggttcagaagactgtctccaatagcatgcagtgattttcttttctctaaataggttatatttacttctctatttttgtgtctttgtacatgaattctgtatttgtatttctatattctttttcttaagcacagctctccaaattatggatgtttccagctgcacatcacctggctgtctctaacatctctatgtgaaaaggacttgtgctcttttctttcttcttattctagacaagcacctgccctgaacactgctggaccccagctgatagcccagattcaaagccttaccaggatttcatgctttgacttttgcaggtcactcataactggactatatttttaaatccaagcagaagtgagcacgtggtggtgagcaggacctttgaggttcttagcaggtaggtcttggtgactgaagtctcaggaaagctcctctgggacatgttccctggagaagtgtgacccttgggactccagttatgaatagctaggcaagttatgggcttggagttgctccttttgtgtagccagtgagcatgagtctgtggcaggcgtcaaaaccacaggtgtcagcaagtaagactgcagaacccattttgaagcaaactatgttttacagctgatactttaaattcattaatatcatgaagctacacagtggggaattctggtataccttagaattcttttttctgtaacgtcactccattgttaagtctgtacttttggttactatataagttttctaggcctgcttatataaataccacagagaggtggcttaaacagtagacatctatttcctcaagctgtcagcagggtatgtccctcctgaggcccctctccttggtgtgtggatgctgtcttctccctgtgtcctcacgtgctcatcactctgcatctctgtgtgccaaattccttttcttacaaggacaccagtcatgttggtgacactgtttttcacttaatcacctttgtgaagaccttatctccaaatacagtcacatcctgaagtatggagaactaagatgtccagatatgaattttgaggggacataattcagctcagagcagttactgaaattttagagtctttattttcaccaggccacatactattgatctgcatgcttcttgttcttggtgttttcccaccattagtgacaacctgactacctgttctcaggttgcacatgacccttttccaaatttctcacatgtgagaatcactggatctgctatttgttagcatgggcttctcaggtggtactagtggtaaagaacccacctgccaataccagagtcataagagacacaggttcgacccctaggtcgggaagatcccctggaggaaggcatggcaacccactccagtattcttgcctggagaatcccatggacatagaagcctggctggctatagtccatagggttgcacagagtcagacatgactgaagtgacttagcatgtgcacaaagcaatcagatgtgtggtgaggaggaagatggagaattaaacggtttgaaccactgtgaacatccttgctcctgttcattgccgtactggtggcactgtggtgaggcaggcaatgcctgatggaggctgaggagctatgtcagaggggcctggctatggggaggctgtgtatatattcacgtggcttgcctgtgctcagggctccttatttggcaggttaggcactctgagatcggttcaggctctggttatagccatgggcgactggtgttgggaagaaagctgagggagcaagtactgatggttgatgtcaggtctgtttcctttatcagtggtaagatatttgcttcattcttcagagagcctgtttccatcagcgtccacgtctccctccagcagacccagactgttcctcttctgatgactcatcagtacctccgagcaagtgttgaagaacaagtgaccattgctgcggtcatcctcgctggggtctacgtgctaattatatttgaggtaacttgcatgcctgctctcctgggtttatctgtgcccacaggtaagtgtattttaacatgttgggtgctagggatgggctcagtcttgcattttaattgaattgaaatagtgtctttcctaaaaagtgacatttccctcattctaggtagaaaattgctctgtactggaatatttgctgaatcttggcagttgccatatgcgagatgagtttttccaggcactagaaaaattttattgagaaaactgaatgtgcacatgattttctcaccctcaatttgatgctcacacagaatgcccctgaagggacaagtgttgaaactttctgagaatcagggtcttcgtctgtaaaatgggcatgttaaaataccccctatctgcttcataggattgtgtgcacaatgaggaccttggagaccttgggctatgtgtggggaaggattattatctgttatgtttatcaactcagctaatgagccgaatcatttcatgtcccatcaattcagtgtttctgggaaattttaagtgtggctataccttcaatagcatgaaacaaagtacagacactgcctgactgggcagatccattgttgttttagttgtgaaaccagatttacagcaacacacagatgggactcttggctccactgggctgagcctggaggatcaggaggtgaaggtgaaggtaaaagagtgttttttctcaaaatatgaaaagtgccctggagcttcaaggaggtgatctgaggggggagtggccaggaaaattctcagaattccttgaggctgtctgatctgtctgtgaggaatgttggcttcagcaggttgagcccctagttgtccaacaaggtccatccatggatttagttgctctgtctcatttattctggggcagctctattctgtacccccccatcaatattattattgtttctgggttcctatgatcacacacacactctgtgatcaggcagagtctggaggaatccaggagcaagtttctgagcagttttctcctcaaggagccacagaaaacatattacttcctccagtggcattgtttaagggcaggctgcttgagacatagagcgcaaggtttttgttgaggtgattttataatcataaaattaatacacagaaatcccctgcattccaatacactaacaatgaaaactccaaaagagaaattaaagaaaaaaacccattcaccatcacaacaaatagtataaaatatctaagaatcagttcagttcagttcagttcagtcactcagtcatgtccaactctttgtgaccccatgaactgtagcacgccaggcctccctttccatcaccaactcctggagttcactcaaactcatgaataaacttacttaaagagacaaaagacctgtatgcaaaaagctataagacactgataaaagaaatcaaagaacatggacagatgaagagatacaccatgttcttgcattggaagaatctgtattgtgaaaatgaccataccacccaaagcaatctaaagattcaatgcaatccctatcaaattaccaatggcatttttcacagaactggaacaaaaagttttacaatttgtatggaaatacaaaagaccccaaataaccaaagcaaccttgagaaagaaaaatggagctggagaaaccagctttcctgatttcagagtatactacaaagctacagtcatcaagacagtatggtacaggcacaaaaacaaaaatatagaccaatggaacaagatagaaagcccagagataaacccatgtacctatgggaatcttatctttggcagtggaggcaagaatatacaatggaagaaagactgtctctttaataagtagcgtgcaaaaactggacaactacatgtaaaagcatgaaactagaatacttcctaacacagaacacaaaaataaactcaaaattgattaaagactaaaatataaggccagaaactataaagttcttagaggaaaacataggcagtacactctggcataaatcacagcaatgtcctccaacacctaccacctagagtagtcaaaataaaaacaaatggaacctaattaaacttaaaagcttttacacagcaaaggaaactgttcagttcagttcagttgttcagtcatgtctgactctttgcaacctcatgaaccacagcatgccaggcctccctgtccatcaccaattcccagagtccacccaaacccatgaccattgagttgatgatgccatccaaccatctcatcctctgttgtccccttctcctcctgccctcaatctttcccagcatcagggtcttttccaatgagtcagctcttcgcatcaggtggccagagtattggagtttcagcttcaacatcagtccttccaatgaacatccaggactgatctcctttaggatggactggttggattatttacaggaaactgtaaacaaggtgaaaagacagctcccagaatgggagacaataatttcaaatgaagcaatggccaaggattaatctccaaaacataagcagctcatatagctcaatgtcagaaaaacaagcaactcaataaaaaaattagcagaaggcctaaacagatatttctccaaagaagacatagagatggcaaataaacacaggaaaagatgctcaacatcactcattattagagaaatgcaaatcagaactacaacgaagtatcacctcacaccaatcagagtggctatcatcaaaaaatatacgaacaaaaaatgctggacaggatgggaagaaaagggaatcctgcgctgttggtgggaatgtaaactgatacagccattatggagaacagcatggagattccttaaagactagaaataaatctaccacatgacccaggactcccactaccgggcatatactctgagaaaaccacaattcaaaaagacacatctacctcaatgctcattgcagcactatttccattagccaggtcatggaagcaaccttgttgtccatcaacagagaaatggataaagaagatgtggtatattactcagctgaatataaaggaacggatgtgaatctgttgtaataagtcagaaagagaaagacaaatatcatatattaatgtatataaatgggatctagaaaaatgatactgatgaatctatttgtagggaaggaatggagttgcagacatggagaatggacttgtgcacagagtaggggaatgagtgggtgggatgcattgaggaagtagcattgacacatacacactataatgtgttaaatagatagctagtgggaagctgctatatatcacagtgagcccagcctctgtaatgacctagaatggtgtgatggggaagagaagggaagctcaagaggcagaggatacacacacacacacacacacacacacacacacacacacacacacacacagacatatgctgctaagtcacttcagtcgtgtccgactctgtgcgaccccatagccggcagcacaccaggctcccctgtccctgggattctccaggcaagaacactggagtgggttgccatttccttctccaatgcatgaaagtgaaaagtgaaagtgaagtcgctcaatcgtgtctgactcttagtgaccccgtggactgcagcccaccaggctcctccatccatgggattctccaggcaagagtactggagtgggttgccattgccttctcctatataacgactaatttgtgttattgtacagcagaagccaacacaacattgtaaagcaattttcctccaattaaaaaagaaaagaaaaaaataagaaaatatcacattatgcatgactgtttctcctaactctcaaagaatccagatgtacacaggtggtctcagctgttcctaccctccctctcctgataccttgcctttgcaggtggcacttgtggtaaagaacatgcctgccaatacaagagacataagagacgtgggttcaatccctgggtcaagaagatcccctggaggagggcatggcaagtcactccagtattcttgcctggagaatcctatggacagaggagcctggcaggctacagtccatggggtcgtacagagtgggacacgactgagtgacttagcacacacagaggaaagacagcactgtgggttagtctgggatcagaaacgccaacacagcctagcttgggtgctatccccaaaccacccttccctcacagacacattaatgcaccatgctgaggcgatttgtttggtaacatacagaccctgccaaaccatcacaggtagaaacacacagatgagtttctctcaacattacagatgagagaagaaagtgggtgtgctggctcttatgtgaagtgcctttgacactcagacctcaaagacagtgatgagacaatgaggtggcacctggcccacccctcagacgtggcccctgcttctcctacacacagaagaccctgggcaagaggaacagtcacaagagcagtaggggttgggggagaaagagcagagacctttgttgccaggccctcccaaaccactggccagtaggtgaaccctctttcattccttatgaagcttcttaggcaaactggactccttgatggaaggagatggttcatggcaacattctcagaggagactccagaatagcaatgggtgccataagttccctccagtggcagtgcagtgagaagtgcagcagtcggtgctcccccaaggtaggtccccaactcagcaagagtctctccagctatttaagaaccaggctcagcgggctctggcaccagaaagagaaggcaccatccctccctgtaggggtatggccacctcctgcatccagccagcctctcagcatctgcacatgtggtcaccaggcctctgctcactgtaatctataagagacccaggctgcttctcacctgggcaccactgaggcaagaagaagggggagtctctcttctcatatcccaacaagcagaacacagttcacaaccaaatctgacttcagagggaagggtgggcagttcaccatgcacaaggacaagaatgcattcacatggaagaacaagcagacaaggtccaccactttcaaagaggccaaagcacactcttcctaggagataagggagggtagaaagaggatccacctggaaggtagcgcagtaagcagagcactgttactacctcgtagccagacaagacccagcccaggaaaataggagctggcccaggtcttccaccagggcacagagaggtagggtgtcacctcaagggacagccagttcatgccctacaaaccaaaaagttctctaagttttgcagatgaagaaagtgaaatgtggggaatttacttagcatcaaaaagcccataatcatcctactacatcatggcagtaagaaacaattggcaaacacggccttcaattggacgcacattgtaagtgctaaaatgcctatgaaacacagaatggtactgaattcaaggcccagaactgtaccacttgtacactgtcctgggaatttttagaaacacaggattcagaaccgaggaatgtctaggaaacccatcaccatgtttcacctatcactatggatcagttggctcctgccattgccctcacgtactgggagggaaggggctcaagaaggtacaggtacctccttaaacaggggtgctcctgctgcccaatgctccccagtccaggagaatttatatgagatgacacaaagcaaaggcccccagagctcatgtgggatccctagagagcaaggcacacatgcagtggcatacagttgcttggggacagtgtacagcagccagcacactacatgggcagaaatggcagccatgggagttccacatatctgcagatatttaggtatctcattctcctgatgagtctccctgcactttatttatccttacatttaccaaagtagcccaaggaagaagattagtcaaccatctcacgttttgaacgtttaaatgtaaactgggagatgatgtcagcatcatggcagcatgagctagccctccttttcgtcccccgtttctgatagctaactaggcatccatccacaaagaaaaagtacctctgcaggagcagtgagattcaaaggacctaggaagagcctctcctgcctgtgcatccgttaataagcaaacacactagcctaagctgtgaaaccagcaggagccagcaatggcaacctcatctctcttggctgctatcagggaaaacctagacagtgctgacctgagcagatagccaggaacaggagaaagtttgtagaagcccagcctttctgagaggaaattacagcatatcactgaaggaaaacaatacaagttaggacacactagagagggtaataggaccatggtcagcactgcccgtctcctaaggccacactccatcgggctgaactagctgacaggaagtaagtgcttggcttccccagctgtgcaggatgcaggaagagaaccaacttctctctgccagaaccagagtactcaggcagggcatccatgactgcagggagggaggtcaggaaagagtcaagtgaaactatcaaagggcgttaaaggaaggcatttcctgctgactgcactcagcacttcagcaggaaatctgatttttgacctggagaagctcatcctaggaccccctcaaggcctgcagccatccctaactccaacctctccctgttttcccctactgcctttgtagtggctcctagcacatgctctctgtgtggtggtgagagcactgttggtcaacagtagatggaatgctgccagaaaacagaccgaccatgggcaaaggagaactgcagctatagcaccacctactgccaataaaagaggcttttccagtgctagcctggtgagctgcagagccggagaacacataaaagcatacaaattttgttacaagaaggagcaagaagagtgcagcaggtgtgtccacaggagatcagggaaagtatcaggtgtaacagaacaaacgaacagtatatcccacctgaatacaactaataaagatttgaggagatgtctgctactttgccgacaaaggtccatgtagttaaagctatagtttttccagcagtcatgtacaaatgtgagaactggaccataaagaaggctgaatgccgaagaattgatgcttttgaactgtagtgtcagagaagactcttgagagtcccttagactgcaaggagatctaaccagtctatcctaagggaaatcagtcctgaatattcattggaaggacagatgctaaagctgaaactccaatactttggccacctgatgcaaagaactgactcattggaaaagaccttgatgctgggaaagactgaaggcaggaggagaaggggacaacaaaggatgagatggttagatggcatcactgactcgatggacatgagtttgaacaagctccgggagttggtgatggacagggaagcctggcgtgctgcattccatggggtcacaaagagttggacatgattgagcaactgaactaactgactaactgactgctacttcaaatgagaaagcatcaatgtaaagctacaaggaatatgaaaaatcaaggaaatatatcatcaccaaagataacaacagtcattcaataagttaactcaaaggcacagaatattgctatctagctgataaagcatcaaaagtagctatactaattcagagaacaaagtactggttacctgcagggagggagtagaggcaaaatataagggtgggagagtgggaggtacaaattattgggtgttaagataagctacaagaatgtattgtataatatgaggactattgcaaacattttgtaataactgtaaatggagtgtaacttttaaaattgtaaagtaattagcctccaattaaaataaataaataaattaaaaatagttatactgaggatactcaatgagctacaaggaaagataaaaagataattcagtgaaaccaggaaaacaacacacgaacaaaatgaggaaattaacaaatgaatagaaatcatgaaacagaaacaaacagaaattctggagctgaagaactcagtgaggaagatggaaaatgcaatagaacatcaacagcagagcagaccaaatggaagataaaataataagtgatcaagaggaaaggaactttgaataacccaatcagaggagaccaaagaagaaaatgaaaaagagcaaagaaaaccttcattgtctgtcagatgttcatgtaggataactggattccagaaggagacaagtgagagaaggaggaagaaagttaatttaaagaagtgattgctgagcttccagttcagaatggcagagtagaagggtgggcactcatctcctcctgcaagagcaccacatcacaaccagctgttgaataaccatccacagaagggcactggaacctaccaaaggaaaaaaaaaagatgccccacatccaaaaacaaaggagaaactgctgcaagacagtaagagggacacagtcacagtaaaatcaaatcccatacctgctgggtgcgtgacccacaaactggagaacattaataccaaagaggttttcccactgttgtgaaggttctgaaccccacgtcaggctttccagcttgaggatctgacaaagggactgggaattcccaagaaatttaccttgaagtccagccggatttgattacaagacttccacaggactgggggaaccagagattccggtcttggagggcacaaacaaaaccttgtgctcatcaagactcagagcaaaggagcagtgactccacaggtgactgaaccgaaacgacctgctagatttggcgggcctcctatggaggcgtgcgtcagaaggggctcaccacagtgatgggggtattggcagcggcagtctgggaaggtcccctaaggtctaatggtgaccctcttggaggtcaccattaactggaccatagagtccatagacttgagggctgggtcttctcaggtcaaaaaactaccagggagggagggcaaccccactcatcagcagataactggattaaagctttacggagcaaggccctgcccaccagagcaagacccagtttttcccaccaccagtcccttccatcaggaagtttacacaagcctcttagcctcctccatcacggggcagacaaaagaagcaagaactacagtcttacagtgactaaaactaaaaccacattacagaaaggtaatgaacatgaaaaagcagaaggttatgtcccagatgaagggacaagatgaaaccccagataaacaactaaatgaagtgcagattggcaaccttccagaaaaagaattcagaatattgatagtgaagatgattcaggaccctgaggaaaaaaatagaggcaaagactgagaagaggcaagaaatgtttaccaaagacctagcagaactaaagaacaaacaaacataaataaataatacactagaagcagggatcaagaccatccccatggaaaagaaatgcaaaaaagcaaaatgtctgaggaggccttacaaatagctatgaaaagaagagaagcgaaaagcaaaggaaaaaaggaaagatactcccatttgaatgcagagttccaaagaatagcaagaagagataagaaagccttcctcagtgatcaatgcaaagaaatagaggaaaacaacagaataggaaagactagagatctcttcaagaaaattagggataccaaggggacattccatgcaaagatgggctcaataaaggacagaaatggtatggacctaacagaagcagaagatattaagaagaggtggcaagaatacacggaagaactgtacaaaaaagatcgtcactacccagataatcacgatggtgtgatcactcacctagagccagacatcctggaatgtgaagtcaagtgggccttagaaagcatcactacaaacaaagctaatagaggtgatggaattccagttgagctatttcaaatcctggaagatgatgctgtgaaagtgctgcactcaatatgccagcaaatttggaaaactcagcagtggccagaagactggaaaaggtcagttttcattccaatcccaaagaaaggaaatgccaaagaatgctcaaactaccacacaatctcacatgctagtaaagtaatgctcaaaattctccaagccaggcttcagcaatatgtgaaccgtgaacttccagatgttcaagctggttttagaaaaggcagaggaaccagagatcaaattgccaacatccgctggatcatggaaaaagctagagagttccagaaaaacatttatttctgctttattggctatgccaaaccctttgactgtgtggatcacaataaactgtggaaaattctgaaagagatggcaataccagaccacctgacctgccgcctgagaaatccgtacgcaggttcagaagcagcagttagaactggacatggaacaacagactggttccaaataggaaaaggattacgtcaaggctgtatattgtcaccctgcttatttaacttctatgcagagtacatcatgagaaacgctgggctggaagaagcacaagctggaatcaagattgccgggagaaatatcaataacctcagatatgcagatgacaccacccttatggcagaaagtgaagaggagctaaaaagcctcttgatgaaagtgaaagaggagagtgaaacagttggcttaaagttcaacattcagaaaacgaagatcatggcatctggtcccatcacttcatgggaaatagatggggaaacagtggaaacagtgtcagactttatttttgggggctccaaaatcactgcagatggtgattgcagccatgaaattaaaagacgctcactccttggaaggaaagttatgaccaacctagatagcatattgaaaagcagagacattgctttgccaacaaaggtccgtctagtcaaggctatggtttttccagtggtcatgtatggatgtgagagttggactgtgaagaaagctgagcactgaagaattgatgcttttgaactgtggtgttttagaagactcttgagagtcccttggactgcaaggaggtccaactagtccatccttaaagagatcagtcctgggtgtttattggaaggactgatgctaaagctgaaactccagtactttggccacctcatgcaaagcgctgactcattggaaaagaccctgatgctgggagggattaggggcaggaggagaaggggacgacagagaatgagatggctggatgacatcaccgacttgatggacatgagtttgagtaaactcctggagttggtgatggacagggaggcctggtgtgctgtcattcatggggtcacaaagagttggacacgactgagtgactgaattcaactgagaagcaatcaatagcagaataactgaagcagaatggataaaggacagaatggtagaaatcactggcacagacagaatatagaaaaaataatgaaaagaaatgaagacagcctaagagacctctgagacaacattaaatgtaccaacatttgcattataggggtcccagagggagaagagagaaagagagaaaggacctgagaaaatatttgaagagataagacctgaaaaattcacagacatgagataggaaatagtcaaccaagtccaggaatcacagagagtcccaggcaggataaacccaaggaggaacacactgagacacatagtaatcaaactgacaaaaattaaagacagagataaaatattaaaagcaacaaagagaaaaacgacaagtagcatacaagggaactcccatcaaggtattagctgatcaatggcaacccactcccgtactcttgcctggaaaatcccatggacggaggagcctggtgggctgcagtccatggggtcgcaaagggtcggacatgactgagagacttcactttcacttttcactttcatgcattggagaaggaaatggcaacccactccaatgttcttgcctggagaatcccagggatggcggagcctggtgggttgctgtctctggggtcgcacagagtcagacacgactgaagtgacttagcagcagcagcaacacaaattctacaagccagatatatttaaaattatgaaaaggaagagcctacaaccaagaatactctacccagcaagactcttcttcagacttgatggagaaatcaaaagctttccagataagcaaaagttaagagaattcaacaccattaaaccagctttacaacaaatactaaaggaacttctctaggcaggaaacacaagaaaaggaataagacctgccaacagaaaataaacccaaaacaattaaaaaaatttttaatacatatagataaccaccttaaatcacctttctttagaaagcagactggtgatagttgtgggcatccagactttgaaaaccatgatttatctattgtcctaaattccctggtggttcagcttgtaaagaatccacctgtaatgtgggagacctgggtttgatctctgggtttggaaaatcccctggagaagggcatggctaccactctactattctggcccagagaattctgtggattgtgcagtccatgggatcgcaaagagttggacacaactttcactttcactttcaataggtatggtatagaatggccaatcttcacatatacttataccaatacagtcttctgtgtgttttaaaatcctgtggattagagtgaagtaatgttctatgcttctttccagattgttcacagaacactagcagccatgttggggtccctttcagcattagcagcactggctgtgattggtgatgtaagttgtaacattttgagtcaaaggcttagcatttgatagaatgttagcttcaaagacagtccaataattaggtgttagatggttagtttttaatatactatttcacatttcctgttaaaggcatgaactaatgaactttatagcattgatgagcaattaacatttgactttatcacacacaccccatcctagctgaggaaaagctcatgatggtcaagtattcatccaggccatgcacctgagcaatgttagagccagccatatgcactgtcagctcttggagaccaggggaggccatcctggctggagcagagaggtgggagacagtgaggttggggacagacatcaggaggtccctggaagtgcatgtcccctcaggatctgagcatgttccatcctgcagggacattggaatgaatgtagagaagcaagagaggccaaatactctggagatggaggcctggggttgtttgaggagcagtgctgaactgaccaagttggccacacatggaacttgggattgaaaaaaaaaaactctgtagaatttcagagattgctctgaaaaatgtttctaaaggccaatcagtcaaccaaagagtaaaaataatatgtgagactttgttatttatttatttttcttttttatggctagaattggtataaacaaacactaactctcagggtaaaatgtcccagaatcctaaaacttacacataaacctctgttattttgattaattgttaaggagtagtgtagtagtagttatttaattttggaaataattgatgtggcacatgccttgtgctgcaggaaaatctctggaccactgtaaagtcctttttcaacaaccagactctccaagtgtcctcacttcccagtcagggctcccagttccccatgatcctaccttcccttagggacagggacagggcttaagaagtctgcctttctcattgacaagtgcatagttttgatgtgacgatgctttggatcatgactgtttttcagtaatgatataataggatttcaaaggcaagtggacggtgcgatttttgtgatttttaactctggccatgagtgggttttctgtaaagtgcacatgtttacagcttaacaccaggaggatgatgcccaggactaattagctaatttgtggtttgattgcagagacccagcctgacccatgtggtggagtggattgattttgagactctggccctgctgttcggcatggtaatgacagtcctcccggtgggcctgggccccaagtttgctataacctgggactttctcttttactgctgtcactgctaattcttaaggacaccatgctgcttgactgttagggcttgactgagaagtgtttgcaggtctagctaatttctcctgatgaggaatggagtgattggtgctctggttggttagctggaaaattttagcctaaagcctctaacagagaaataatcttgccattgagaaaatttggcatttttttgagttactgtcctaaaatataaaatgatatatcttaaaaaaatgaaccatataaatttttcagtgattgaaaatgtacctttaattatatggataagggaagaagggaagaaattgcccctaagtaatagtttgttaatttaccatattttcaagtgaccactctactgcatgctatgaagagtgtcaccaaatcaatctgtaggaagggaattttaagacaccctagtgagttagagtggaacatgagtcataaacagatttaactggaataaggggaatttgacaagggtctggacagcagtgggaaaggctcatgtgtttttgaacagaccccacagtggctgcgtgatctgaaggagggctgtgctgctctaggcttcaatttgatccaaagtaactgtctcctttgtggatgcagtgtgggattcaggtcagtgctctgaatccaggctttatagagaaactaatgtttgtattgggttctgaaaagtatatagggtttggatatatggaaggaaaaaggaaggcataccagatatctcataaggttttgttataagaaaagcttaaatgattggtgtattagtttgctgggattgccataataaagtaccatagactgggtgacttaaacaacagaaatgtatttcctcatagttctggaggctaatgtccgagatcaagatgtctgcagtgttggtttcttctgaggcttataggtgatcatctgctcgagtcctcacatgattgtccctctgggcatgtctgtgtcctcctctcttcttataaggtcaacagtcatattggattagggcttcactttaattatcctcagtacagttatattggattttaacaatgaatggcttaattttttctcagttggaatcagttcaacaaggttctatatagaacttcggggtgtgtgtgtatacaaagacagtctgtataactagaaccccatcttttttaccctgtttcttgccagtcatccacccatgggaccactcacccagtccctgagttccagtctctcttgggtggttctggcagcagacatgtgtaacagtttcaccacaacaatggaagaccacacaggacctacccattcacattcatgtgtagcttccattggtgtgaagcgccatgctctataaatggcctcacagtggccatttggataggatgaacaatgatggtcattataggcaaggtagagatttgtactgttttgcactgtttttgtgaaacacagttttgggcccactattttgtaaagtactttagtttacataattctattgaattatcacaacaaccttacaagggaataagacatacagaagtaaggtgagaaaaccaaagtacagagaattaaataaatttttttgctcaaggctctgtttgactgtttgcaactccatggacagcagcatgccaggcttccctgtccaccaccaaatcctggagtttgctcaaattcacatcgagtcagtgatgccatccaaccatctcatctggttttgccccattctcctcattccttcaatctttcccagcatcagggtcttttccagtgagtcagttcttcgcatcaggtggccaaagtattggagctttagcttcagcatcagtccttccaatggatattcagggttgatttccatcaggattgactgattcgatctccttgcagtccaagggattctgaagagtcttctccagcactacagttagaaagcatcaattcttcagcactcagccttctttatggtccggttcttacatctatacatgactactggaaaaactatagctttgactatatggacttttgttggtaaagtaatgtctctgctttttaatatgctgtctaggttgatcatagcttttcttccaaggagcaaaagtcttttaattttgtagctgaagtcactgtcctctgtgattttgaagcccaagaaaataaaatctgccactatttccactttttccctatctatttgccatgacgtgatgggactggatgccatgatcttagttttttggatgttgtattttaagccagtttttttcactctcctctttcactctcatcaagaagctctttagttcctcttcactttctgccattagagtggtgtcatgtgcatttttgaggttgttaatatttctcccagcagtcttcatttcattgtaactactcttataaattttaagccagttaaaaaaatatataatttaagtcagtttaaaagtcttaaaacttttaattgttgcttgtgtgaacacctaggtgcaaaaggccacattttattctatttcctgccctatttctagctttgtgactgtgagcaagtcacttttcctctctgcctgacagtttcctggtctataagtcagagagtaattataacgcagatgtttactgtgaagttcagatggaatgataatgtactttgggcacatactcttggacaaatgtaaaggtgcaaatcttctagtaaggggcttgattcagagagttagtaagtggaccacactcaacaaaagagtgagacgtttgatgaggtggtagctttcatatggaggcgagagctcagatgtgtaaatggtcactgatgtcatttcaggatggtgctctgaaacattctctgtctcttttttctcttttccctatagatgatcttagtagccatattttcagaaactggattttttgattattgtgctgtaaaggtatgtatgatgtggcatttaattgttatgtatcaattgatactttttttctatcattacatatttatagtgaataaaactatgtttcaaagcaaatgttttaaaattctgtcctccttttcaaaatcactgctgcaaacctgagtataattgctatgctaaataaagtgtctttgagtatcactttcagattctcaacaaataaccaaagaagaggatccaggagactagtattcaagttgactatttgtgtgatggtgttcaaattggcaggttgagagctatgcaccaaaactgttttgcacttcagagtaaatattttaagtcatcagtttctgattactttttttttaagtgaaataatttcaatgattactttatgacattgaacatataagcattcatttttataactgggaccctggggaatccttcaccattttctgactggtagaatttgtgttgatcctatcatcaggattgggaggaaaagactaatgcaaactagggtgaggcttgaattttttttttgaaactgaaaagttcttttaaaaaattagttatttatgaagccctttccaaactttgaatgatagaacgatgttgtgatttttgccaattttgtgcactatcttgcacctcccaggtagctatctggcctcttcctcccaataccttgaaatgagaattggagggaagaagtgtaggcctgcatggatttaaaagttcaggtccagtcattactgcctcatctcagcaggtttaggagtttgtaggtctaagttttaatccaccatgtagtgtttatttagacccttagttcttagagtccctaatgaaaagttgcatctgttttctggccccattggtcctagcttcttctttattgcattccaggcataccaattgtctcgaggaagagtgtggaccatgatcttcatgctgtgtctcgttgctgctgtcctttctgccttcctggacaatgtcacaacagtgctcctcttcactcccgtgaccataaggtatgcaaagtggccttgtgtggacatcaggccagctgatggcagtgtgtgctggctgccctcctcccacatgatggggtctgacctgcacatccactgggactgtggctctgactgcacagctgtgatggcagtagcagtggttgcagaaatgcctacaggaatcaggacacacaaatgtttatgtcctgtgggacagagcatcacgggccaggagttctactccatgggctctatggagttctcagccagagagcaggaggtggggctactgtcttgctctggcaggatccttgtgggattattggagggttgcaagacctggcctggcaaggcgttgcaaggtaactttgggaaagagaaattcagtttgattccattttgctccttttaattccacccatttcattagtgggactgattgcatggggcctcctggggcttgggcttcagcctgtgattgtgcagccccttccaaggtcatggacctacacttttatctagacgttatgtcctttattttaaagatggttcttagcatatcctggtcttcccctgcttcgactcaacatgtgctggtgctggctggttctagagagaccgaggggttacaggtatgcctggtggcttctgggaagctaggtagtaaggacatttttctaaatgtcctcacttcagctgaggacaactctcttcagctgcactgatctgggttgttccatcaaaggaattaaaacaagccagcgttctgaggattctaccagataagagattctcctgcttatgaggcatgagactcagcaagttcaatgtcaccaacaaggggctacttccagagtgcaggactaattctgggtgatgcctttggtgtttgggagagtagtgactctcagaggaggagcaagttagaatgtggagtaggaagaggagaaggaagggtagagaggaacagagagttagcagcagcccatggataggcctgcagtgttatgagttaatctgttgcccaggcttctgcaagcctggctgcattgtcatggtccatgtgcaagtatggatttgaggggcaaaacgctacatttagtcttcctgcacagggcgtgtagcacctcccaatatccagaggtataattcttctgagggtaaatggtggataaagcatatgctaaaaccaaccctgcccctggacacttcagtgggaaagaggcagttcacacctaccaccctccaaccagggcaactctgctgctgacagtggtttgaaaccatctcacaatgtgccagattccagcaagtcactacacactctgatgatggcaccctgattctcaacatcgctgtacagcttgcacgactgagggttgtctcagccttgctgggatttgtttacatcctcactctgctaggaattggctttgtaattttatgtgagaatcagttcagttcagttgcacagtcatgtctgattctttgctatcacgtggactgtagcatgccaggctttcctgtccatcaccaactcctggagcttgctcaaactcatgtccatcaagtcggtgatgccatccaaccatcttatcttctgttgtccccttctcctcccaccttgagtctagacaccaggattcatagtctctggagaagaattcaatctggggtcaataacaaggcttgatctctcagagcttatgtgtatttaataaagttttattaaagtataaaagagatagagaaagcttttgacatagacatcagaagggggtagaaagagtacctgcttgctagtctatacctatcagtgagttcttaattagagaaaggagatgattcaaaactcagagtagcaccaggtccctcaaccacaacatacagtttgagataacattggcaccaggtgaatcatcccaggccataaaacgatcgacatgaatcttgaagaaaggcaggtttccaagtaaatatatagtttcattaacatagattaggagaacaatgtatcagtaaaacatacaggtttgttgagccccttataggttctgagtcttaagcagaacctatttgaagagaatctagggtaaatacatagttcattaacatagcttaagaaaagcgtttccataagaaaaacgcattggttagctcaaggtttgagaagttaggttcaggtggagccaggtgttttcatggcaacacagaattttaagataaaccttttaattttgtatagagaaggggaaaaaatctgacacttgtagtttgtttcctcctgccgcttaagagagaaataaaaaacatgtgacccttgcagcctatttccttcatttggagaccccctagccttcctgtctgttaccctctcaccagcatcagggtcttttccaatgagtcagttctttgcatcaggtggccaaagtattggagcttcaactttagcatcagcccttccaacgtatattcaggactgatctcctttaggattgactggtttgatctccttgcagtccaagggactctcaagagtcttctccaacaccacagttcaaaagcatcaattctttggtgcccagctttctttatggtccatccatacatgactactggaaaaaccatagcttcgactagatggaccttgtcagcaaattaatgtctctgctttttaatatgctgcctaggtttgtcatagcttttcttccaaggagaaagcatcttttaatttcatgactgcagtcaccatctgcagtgattttggaggccaagaaaataaagtctgtcactctttcccttgtttccccatctatttgccatgacatgatgggaccaaatgccatgatcttagttttttgaatgctgagttctaagccagttttcactctcctcttgcactttcatcaagagtctctttagttcctctttgctttctgccataagggtggtgtcatctgcatatctgatgttattgatatttctcttgataatcttgattctggcttgtgctttatccaaccccacatttcacatgatgtactctgcatataaattattttttttaatatttatttatttatttatttttaatttttcctttacaattctgtattggttttggcatagattgacatgaatccaccacaggtgtacatgcgttcccaaacatgaacccccctcccacccccctccccacaacatctctctgggtcatccccgcgcgtcagccccaagcgtgtcatatcctgcatcagacatagactggcatttcgattcttacatgatattatacatgtttcaatgccattctcccaaatcatcacaccctctccctctccctctgagtccaaaagtccgctatacacatctgtgtctcttttgctgtcctgcatatagggtcatcattgccatcttcctaaattccatatatatgtgttagtatactgtattggtgtttttctttctggctcacttcactctgtataatcggctccagtttcatccatctcatcagaactgattcaaatgtattctttttaatggctgagtaatactccattgtgtatatgtaccacagctttcttatccattcatctactgatggacatctaggttgtttccatgtcctggctattataaacagtgctgcaatgaacattggggtacatgtgtctctttcaattctggtttcctctgtgtgtatgcccaacagtgggattgctgggtcataaggcagttctatttgcaatttttaaaggaatctccacactgttctccatagtggctgtactagtttgcattcccaccaacagtgtaggagggttcccttctctccacaccctctccagcatttattgcttgcagattttaggatcgcagccattctgactggtgtgaagtggtacctcattgtggttttgatttgcatttctctaataatgagtgatgttgagcatcttttcatgtgtttgttagccatccgtatgtcttctttggagaaatgtctatttagttctttggcccattttttgattgggtcgtttatttttctggaattgagctgcaggagttgcttgtatatttttgagattagttgtttgtcagttgcttcatttgctattgttttctcccattcggaaggctgtcttttcactttgcttatgttttcctttgttgtgcagaagcttttaattttaattagatcccatttgtttatttttgcttttatttccagaattctgggaggtggatcatagaggatcctgctgtggtttatgtcggagagtgttttgcctatgttctcctctaagagttttatagtttctggtcttacatttagatctttaatccattttgagtttatctttgtgtgcggtgttagaaagtgatctagtttcattcttttacaagtggttgaccagttttcccagcaccacttgttaaagagattgtctttactccattgtatattcttgcctcctttgtcaaagataaggtgtccatatgtatgcggatttatctctgggctttctattttgttccattgatctatatgtctgtctttgtgccaataccatactgtcttgatgactgtggctttgtagtagagcctgaagtcaggccaaattgattcctccagttccattcttctttctcaagattgctttggctattcgtggttttttgtatttccatacaaatcttgaaattatttgttctagttctgtgaaaaatattgccggtatcttgatagggattgcattgaatttgtaaattgctttgggtaatatactcattttcactatattgattcttccgatccatgaacatggtatatttctccatctattagtgtcctctttgatttctttcatcagtgttttatagttttctgtatataggtctttagtttctttaggtagatatattcctaagtattttattctttttgttgcaatggtgaatggaattgtttccttaatttcttcttctactttctcattattagtgtataggaatgcaagggatttctgtgtgttgattttatatcctgcaactttactatattcattaattagctctagtaattttctggtagagtctttagtgttttctatgtagaggatcatgtcatctgcaaacagtgagcgttttacttcttcttttccaatttggattccttttatttctttttctgctctgattgctgtggctaaaacttccagaactatgttgaatagtagtggtgaaagtgggcacccttgtcttgttcctgacttaaggggaaatgctttcaatttttcaccattgaggataatgtttgctgtgggtttgtcatatatagcttttattatgttgaggtatgttccttctattcctgctttctggagagtttttatcataaatggatgttgaattttgtcaaaggccttctctgcatctattgagataatcatatggtttttatttttcaatttgttaatgtggtgaattacattgattgatttgcggatgttgaagaatccttgcatccctgggataaagcccacttggtcatggtgtatgatctttttaatgtgttgttggattctgattgctagaattttgttgaggattttttcatctatgttcatcagtgatattggcctgtagttttctttttttgtagtatctttgtcaggttttggtattagggtgatggtggcctcatagaatgagtttggaagtttcccttcctctgcaattttctggaagagtttgagtaggataggtgttaactcttctcgaaatttttggtagaattcagctgtgaagccgtctggacctgggcttttgtttgctggaagatttctgattacagtttcaatttccgtgcttgtgatgggtctgttaagattgtctatttcttcctggtttagttttggaaaattgtatttttctaagaatttgtccatttcttccaggttgtccattttattggcatataattgctgatagtagtctcttatgatcctttgtatttctgtgttgtctgttgtgatctctccattttcatttctaattttattgatttgatttttctctctttgcttcttgatgagtctggctaatggtctgtcaattttatttatcctttcaaagaaccagcttttggctttgttgatttttgctatggtctcttttgtttcttttgcatttatttctgccctaatttttaagatttctttccttctgctaactctggggttctctaattcttccttttctagttgctttaggtgtagagttaggttatttatttgacttttttcttgtttcttgaggtatgcctgtattgctatgaactttcctcttagcactgcttttatagtgtcccacaggttttgggttgttgtgttttcattttcattagtttctatgcatattttgatttcttttttgatttcttctgtgatttgttggttattcagaagcgtgttgttcagcctccatatgttggagtttttaataggtttcctcctgtaattgagatctaaccttagtgcattatggtcagaaaagatgcttgtaatgatttcgatttttttgaatttatcaaggttatatttatggcccaggatgtgatctatcctggagaaggttccatgagcacttgagaaaaaggtgaaattcattgttttggggtgaaatgtcctatagatatcaattaggtctaactggtctaatgtatcatttaaagtttgtgtttctttgttaattttctgtttagttgatctgtccatatgtgtgagtggggtattaaagtctcccactattattgtgttgttgttaatttcccctttcatacttgttagcatttgtcctacatattgcggtgctcctatattgggtgcatatatatttataattgttatatcttcttcttggattgatcctttgatcattatgtagtggccttctttgtctcttttcacagcctttgttttaaagtctattttatcggatatgagtattgccactcctgctttcttttggtctctatttgcatggaatatctttttccaacccttcactttcagtctgtatgtgtcccttgttttgaggtgggtctcttgtaagcagcatatagagggttcttgtttttgtatccaatcggccagtctttgccttttggttggggcattcaatccatttacgtttaaggtaattattgataagtatgatcccattgccatttgttttattattttgggttctggtttatactccctttttgtgtttcctgtctagagaatatcctttagaatttgttggagagctggtttggtggtgctgaattctctcagcttttgcttgtctgtaaagcttttgatttctccttcgtatttgaatgagatccttgctgggtatagtaatctgggctgtaggttattttctttcatcactttaagtatgtcttgccattccctcctggcctgaagagtttttattgagagatcagctgttatccttatgggaatccccttgtgtgttcgttgtttttcccttgctgcttttaatagttgttctttgtgtttgatctttgttaatttgattaatatgtgtcttggggtgtttcgccttgggtttatcctatttgggactctctgggtttcttggacttgggtgattatttccttccccattttagggaagttttcaactattatctcctcaaggattttctcatggtctttctttttgtcttcttcttcagggactcctataattcgaatgttggagcgtttcatattgtcctggaggtctctgagattgtcctcatttcttttaattcgtttttcttttttcctctctgtttcatttatttctaccattctatcttctatttcactaatcctatcttctgcctccgttattctattatttgttgcctccagagtgtttctgatctcatttattgcgttattcattgtatattgactcttttttatttcttctaggtccttgttgaacctttcttgcatcttctcaatccttgtctctagggtatttatctgtgattccattttgacttcaagattttggatcattttcactatcaatattcggaattctttctcaggtagattccctatctcttcctcttttgtctggtttggtgggcatttctcctgctcctttacctgttgggtattcctctgtctctttatcttggttatattgctgcgtttggaatggcctttttataatctggtaatttgtggagttctctttattgtggagcttcctcactgtgggtggggttgtatcagtggcttgtcaaggtttcctggttagggaggcttgtgttggaggtctggtgggtggagctgggtttcttctctctggagtgcagtggagtgaccagtaatgggttatgagacgtctaaagttttggagtaactttgaactgcctgtatattgaagctcagggctgtgttcctgtgttgctggagaatttgtgtgatatgtcttgctctggaacttgttggcccttgggtggagctttgtttcagtgtaggtttggaggcatttgatgagctcctattgcttaatgttccctgaattcaggagttctctgatgttctcaagctttggacttaagcctcctgcttctggttttcggttttatttttacggtggtctctagacttctccatctatacagcaccaatgatatagcatctaggctaaagatgaaaggtttctccacattgaggggcacccagagaggttcactgggttacatggagaagagaagagggagggggtagttagaggtgactggaatgagatgcggtgagatcaaaagaggagagagcaagctagtcaatagtcacttccttatgtgcgctccatagtctggacctctcagaggtattcacggagttatacagggaagaggagagagaggaagtagacagaggtggccaggagagtaagggagaggaatgaaaaggagagagacaggtccagccagtaatcagttccttaggtgctctccaccgtctagaacacacagagaatcacagagttggatatagaagagatggggggggggggagagacagaggccacctggtggagaaaaaggagagtccacaaggaggagagagtggtcaggccagtaatctcgctgtcgggtaagattgggttatgaaatgtacaagattgacaacaaaaaccgaaaagcaaagattaaaaacctagagtagaggttagattttcaaaaatacaatgttaaagagacgaagcagaaggaagaaagaaaataagagaaaagataaaaaaataataatattaaaaaaaaataaggaaaaaaaaataaggaaaaaaatatatataagaaaaaaaaaaaaaaaacccaaggttaaaaaagagataccaacaacaaccacgcgaagactatgtatggtgtttgccttaaaaaagtagagtctttttttttttgaaaagtaatagttatagaaatataaaatagagaaatagaagacttaacagttaaaaaaaaagtttgagaaaaaaaaaaaaaaagaaagcaaaaaaaaaaaaaaaaaggaatgattgtaaaaattgtgaagatatatctggcccttctctgatgttgtgggccgtgtggggtcactttcaaggcgtttccctctgtttaacttctgtttgctggtctcttcagggtctgaattccgtcctgacacatgggggcggtggtggacactttttttttttttttcttttttaggctcactagttcagtcgcgctgtggggagggggggatgctgtttttgaagacaatgatctgcttttctggttgcctgatgtcctctgcctgaattcagaggttgttttgtggagtttgctctgcgttgagatgatcttttgaggattttctgagggagaaagtggtcttcccttcctattcctccgccatcttaggaccgccccctctgcatataaattaaataagcagagtgacaatacagccttgacgtactcctgtcccaatctggaagcagtctgttgttccatgtccagttctatctgttgcttcttgacctacgtacagatttctcaggaggtaggtaaggtggtttgatattcctatctcttgaagaattttccacagtttgttctgacacagtcaaaggctttggcatagtcaataaagcagaagtagatgtttttctgggattctcttgctttttctatgatatagcagatattgacaatttgatctctggttccattgcttttttctgaatccagcttgaatatctggaagttctcagttcacatactattgaatcctaacttggaaaattttgagcagtactttactagtgtgtgagttgagtgcaattgcgtgatagtttgagcattctttggcattgcctttctttgggattagaatgaaaactgactttttctagtcctttggccactgcggagttttccaaatttgctagcttattgagtgcagcactttaacagcatcatcttttaggatttgaactagctcagctggtattccatcacttcatctagctttgtttgtagtaatgcttcctaaggcccacttgacctcacactccaagatatctggctctaggtgagtgagcacgctataattgctatgtgggaatagcaattccattacttgacctcacactccaagatgtctggctctaggtgagtgagcacactataattgctatgtgggaatagcaattccatttattagtatacaaattgcatttttcatgattaaagtattggtgtgctcagattcactgtttatattatactattatattctttatgactctctaagcttaatcacatttcttctgcctctgtctggaatgagtaacattagtctttagagttgggcttccctggtagtttagatggtaaagaatcctcctgcaatgcaggagacctgggttcgatcactgcgttaagaagaacccttggagaagatactcattccagtattcttgcctggagaatccccatggacagaggagcctggtgggctacagtccatgggcaaagagtcggacatgactgagcgactaagtacagcacagcacaccatctttacagttagacatccaaatctggcattgttgattagcacacactaatccttttcttattaaaagcagagcctgtggcttccttagttgaaagctgctgctgatgattggagtctgatcctcttttctgaactcccttctcaacttctatacagctctgtaggccaatcctactcagaagagctactggctatactctgagcctgaagatagtagaaaggacccttgaggcacttccctggtggtctggtagttaagactctgagcttccattgcagagggtatggaatcactccctggtaaggaaccaagatccctcatgccacagggcacccccaccaaaaaaggtccttgagtgcagcaggggctccccttgctgccaacatcgagactcaggcctagcttctgtaagaaagtaggaatgtagtgggtgggtggagaagacaccatgaggttttccctgaactttctttagagcatcctttctcaactgtgtgctcagtggaccacttggggagctgtaaatgctgctgcttaggctcatctcccagggttgttctatcatgagctgggtagcaagactgttaacatccccagacaaatctaatgtttagctaaggtggaaagccactgctatagaatgtgtactccttgttagaattaagcacagtgcctcagcatttgaaaaggtaaggtgggtaaggagctaggttggcaggtgtggtgtgagccacagagtggcagtgctttgtgctccagccccaccttgactcagaggggtctggtggcaaagatgcattcatctgtgccacttcctgccctggaagggagcctgtacaccgagtgcttcctccagacctgcgggggtgaggcaggaatgtattttcacatggatggttcagctgggttgtgtgttaactttcagagaagtctagtgctgagagtcaactttatcctgtagctctatagcactgttgtcattgtttacccctcagcattgtctttctcatagatatgtgtgtgtgtgtgtgtgtgtgtgtgtgtgtgtgagtgtgtgtgcatgcttcttatacctgcaagtgctttgaaaatatttaggtcacacatgtgcctttcacaatatggatagtgggactgttttcattttccttcatttatgacagattgtgtgaggtgctcaaccttgatccaagacaagtcctgattgcagaagtgatcttcacaaacattggcggagctgccactgccattggggacccaccaaatgtcattattgtttccaaccaggagttgaggaagatggtatgtatcactataatcagattgtttccaataaatataggccccagcttacttgcacatttagtaatactttaccaacacggatatcacttcttcttatggagtgttcttggtcctcttgagagtgggaggttaggtgacttatcctctaacgtaggggtctgaattgacttcattctcattctgataaaattttaagaaaatgattacattttctatttagccatagtatgctataatatattaatgggaattgaggtttcttccaacaatattaagaattaaatgatctgctccctctcatttttcaactgaggtagatgaataagttcttcatggatgaagaacttaagtttttttaaaataagggcgagaaaatgaaagtctttctggatttttggtaagctcttattaatatataatttcttgtaaacaaaaataaaagcaaagtattaaagagagtgcaaatggtattttacatatcttagagttaaagttaaattatacaattaattttcatttgtcattctttgatcactagaattttctcaatatctcttctttgaagtatcaataaaaatgctttcaaattggtgtcacttattataggtgatacatttatgcctgtgtgtctctgaagtatgttagtatgtttgtgtatatttgctgtctttcataaaaatatttaagcctttgagagttcatggctctaaggtgttgaagggcattttgtgggcctactgtgttctagagattcagggtacaacttagatactttggctaaatttaatactccctggttgctctgaaagccaactgtggtacttcaccagtcttgctgcatgagttgaggggcaggcccctccttaccatgtcacataagcataccagaaagtgtgtgaatcctgtaatttgctttgtaatctgtcacccaggataggttgtatacacatgagagagagacctattttcacaggaaaataatgttttattatttttattttatagtaatacatttattttagagaatgtcagtcacattcacacacacagtcatacacacacatatcagaaataaaaaattttcataatcccaccatctagaaataaatcctctcaatattttgcttagttgcttggtggtagtttagtcactaagtcgtgtctgactcttgaaaccccatggactgtagcctggcaggatcctccgtccctgcaattctctaggcaagaatactggagtgggttgtagtttctttctccagaggatcttcctgacccagagattgaacccgggtttcctgcactgcaggcatattctttaccagctgagctacaagggaaaccacttattttggtgcatgtagtctgcatgaacgtttgtatgtggctatacatcagaaaaaaaaaaaaaagcttctctgaccaagatggagtaacagggactgtctttaccctcttacttgagacatcccaaaagaaaataaaccaaaatccaaaaaacaaacccagaaacaaaccaaaaccagacagtggtaatcaaggtactagatatcagtaaaaaagggcagtgatccctgagaaatgggaaacaaatgaaatgaacttatggttgccccagctcactgccttgagagattttccaggatgcagttcagggaaacagaacccatgtggagcctaccatatttctagagttggggaggtagaacttactttggagggaacaagacagagaaccagagaggggagagttggagacagagagaacctctgagtacttgcagagggaaactacctgtgtccagggaaagaataacccaaaaagattagagggaagagtgcttaatacactgagggccaagaataatgtctatttctgccaggaagactgtaaacctcttaattcatgaggtattggccctgattccacctaataaatctaataaacttcaaataatcaaattgtttttaaatagtttaactacatccaaaaacaaacatcaagaatatttataggaatgcaaaaatattcaacaacacacaaggtaaaaatcacaatgtctgacatccaatcaaagattaccaggcatgcaaagaaacaagaaaatttgatctatcatgaggagagcatgaaccatttcgaatcaacccagaatagacacaggtgctataattaacagacaagtgcgttaaaactttttctttctttctttctttctttctttctttctttctttctttctttcttttctttctttctttctttcttttttttttttttttttttttttttactgtattccaggtgttcattaagttgaaaagaaacatggtgcactgagatgacccagagggatggtacggggagggagaagggaggggggttcaggatggggaacacgtgtatacccatggtggattcatgttgatgtatggcaaaaccagtacaatattgtaaagtaattaacctccaattaaaataaataaatttaaattaaaaaaaataaaaagaaacatgaaagatattttttttaaaggcccaaatcaaacttctaaaaatgaaaactgtaatgtatgagattaaaatcttttgttaggattaaaacagcaaattaagaatttcataagaaaagattagtgaaattaaggacataggtccaaaatagaatgaaaagtaatgaaagacattcacgagctaaagggaaactccaagtggcctaatatatttataattcttatctctgaaagagagaggaacagagaaagacagttgaagaaaacatggtctaaaatttcaaattttatgaaagatataatctcagagattcagaaagtccagtgaattcagagcacaagaaacatgaagaaactacactaagccatgtcataattgttatacacgtgaaacttaaataattttataaactgatgatactttgattaaaaaaaagcataatgggttatttactgtttcaagacctatactttgacttggatatttcgttttggaaattataagaaatagttattttaaaagtagatatttaaaagatctatatgaaacagctatttttaacagcataaattgaaaaacctatgtaaaatattccaagaatcaaagaaggaagtgaaattgtaaaatatttttaattgaattatgaaaacaaaattcttagggttcctctcaagcaggagtcagcaaacttcttaaaaggccatatacttactattacaggcatatgggccttatggtccctgatgcaatctctcaactctgccactgttgcaggaaggcagccccagacaacacacaaatgaatgtgcatgtctatattctagactgcaagtgtagttttctggtccttgctctaaaacagtatttagaagggattatataccattaaataccaattggaaaagaagaattgtctcaaattagtgacctcagcttcaatctgaaaaaactagataaggaagagcaaattaaactgaaagtaagctgaagaaacacaggccagcatggagaacaggaaaaacaatagagaaaatcaatgaaagaaaaaaagctagttctttgataggataaatgattctgacaaacttctgaccaaactgatgaagaaaataagagagaagacataaattaccagtatcaggaataagagaattatatcactacagagtacacagacattaaagacattgttagggagtattgtgaacaactttatgtcaataacattcacaatttagattaaatggacaattcccttgaaagatatactctaccaaacctcactcaagaggaactaggtaacctgagtagccctatatttattaaagaaattgaatttgtaatgaaaaatattcccagaaagaacaaagcaaagcaaacaaaaacaggctaagatagcttttgtgaactctaccaagtgtttaaggaagcaataatactacaataccaattccacacaaaattttatagcaaattgaagagagaatacttctcaacttactttataagggcctgatgcctgaagcagataaatccaagataagaaaactgttgacaaatactttttatgagcacaaataatatatttaaaaattagctaatccaatttgatgacttataaaatgaataatacataataagtggaatttatcctagaaatggaagattggtgctatatttgaaaatatcaaccaatgcagtttactagcaaactaagtgaaaaaatccatatgattatctcaatagttatagaaaaatatttggcaaattcaacatccattactgatcaaatcactcaataaagtagggaaaaagtgagcttcatcagcctgataaagagcatctatgaaaatattatgaccagcatcatagttaaaagaggaaaactgaatattttcctcagatcagaaacaagacaaagatgtctgttcttaccacttaaatgcattttactggaggctcttggtacaataagtcaagaaaagaaatacaaggcatccacattggcaaggaagaattaagtctatttgcatattacatgattgttcatgtgaaaaatctgaaggaatctacaaaagaaaaaaaacaaaacaaaacgtgaaaaatcataactaaaattaacaagtgtacaatacaggatcaatatagaaaaattaatggttttctgtattctaacaacaaataattggaagtggaaataaaaatgccatttacaatagcatcaatatataaaataggtgaaatctgaccaaacatatgcaagaaaaaaccaaaatattgcagataataattaaagaagataaaaatagatggggcgatatattttggtcatggatcagaaaactcaacatcattaaagtattagttctccctagattgatctatagagtcatgcaattcctataaaaaaacagcaaatttttctttttgtagaaattgacaaactgattttaaaatttacatggaaattcaaagtatccagaatggtcaaaaacaagtcttaaagtgcagaacaaattggaaaggccagtactacctaatttcacaacttattataaagccacaaaaaacaaaaacagtgtgattagcatcaagataggtggaaggtaaatagaaaaaaggatataaatatcagatgcaaatttcagatataaatcctcacatacatgacttttgacaaagtgatttttgacaaaggtgtaaagccaattaagtggagaaaggataattttttcacaaatagtcctggaatgaatgaacatacatacgcaggagaaatgagtttcagtccacactttctactttatcaaaagattaactgaaatgtggattatagacataaatataaaggccaaaactttaaaattcttaatagaaaagataatttacagtagaatagatatagaagtagttcaagtgagatcatggttactgtaatttattagactaattttataacttggctttctgtttctgttgtctcttcttttaatggcaatatattaatgaatgctgcaacagcttagcttcctctggctggcatcacattagtatttatttacttatttattcaaggataattgctttatagaattttgttgtttttgttaaagcacaacatgaatcagccataagtatatatataccccctcccttttgaaactccctcccatctctctccccatcccacccctctaggttgatacagagcccctgtttgggtttcctgagccatacagcaaattctgctggctatctgttttatgtatggtaatgtaagtttccatattactcttttcatacatctcccctgtcctcccctctccccatgtccataagtctattctctatgtctgtttctccattgctgtcctgcaaataaattcttcagtaccattttttctagattccgtatatatgtgttgctgctgctgcaaagtagcctcagtcgtgtccgactctgtgtgaccccacagacggcagcccacgaggctcccccatccctgggattctccaggcaagaacactggagtgggttgccatttccttctccaatgcaagaaagtgaaagtgaagtctctcagtcgtgtctgaccctcagcgaccccatggactgcagccttccaggctcctccgtccatgggattttccaggcaagagtactggagtggggtgccattgccttctcagtgttagagaatgtgatatttatctttctgtttctgacttcaactctgtataataggctctaggttcatccaccccattagaactgactcaaatgcattcctttttatggcagagtaatattccattgtgtatatataccacaacttctttatccattttgtcggtggacatctaggttgttctagctgttgtaaatagtgccgcaatgaacaatgtgtttaggtacatgtttctttttcaattttggtttcctcagggtatatgcctaggagtgggattgctgggtcatatgctggttttattcttagttttttgaggagtctccatactgtcctccataggggctgtatcaatttacattcccaccaacagtgtaagagcattctcttttctccacactctctccagcttttattgtttgtagactttttgataatggccattccaactggcgtgaagtggtatcttgttgtagttttgatttgcatttctctaataatgagagatgttgagcctcttttcaatgtgtttgttagccatctgtatgtcttccttggaggaatgtctgtttaggtctttttctaactttttgattcagttgtttgtttttctggtattgagttgtatgaactgcttgtgtattttggaaattaatcttttgtcagttgtttaatttgctattattttctcccattatgagggttgtcttttcatattgcttatagtttcctttgccgtgcaaaagtttttaagtttaatcaggtcccacttgtttatttttatttctgtaagtctaagaggtggttgcagccatgttaaattaagagacgcttactccttggaagaaaagttatgaccaacctacatggtatattcaaaagtagagacattactttgccaactaaggtccgtctagtcaaggctatggtttttcctgtggtcatgtatggatgtgagagttggactgtgaagaaggctgagcaccgaagaattgatgcttttgcactgtggtgttggagaagactcttgagagtcccttggactgcaaggagatccaagcagtccattctgaaggagatcagccctgggtgttctttgaaaggaataatgctgaagctgaagctccagtactttggccacctcatgcgaagagttgactcattggaaaagactctgatgctgggagggattgggggcaggaggagaaggggacgacagaggatgagatggctggatggcatcacggactcgatgggcgtgagtctgagtgaactctgggagatggtgatggtcagggaggcctggcgtgctgcgattcatggggtcacaaactcagacacgactgagtgactgaactgaactgaactgaagaggtgggtcatagagcatcttgctttgatttatgtcatcaagtgttctgtctctgttttcctctaagagttttatagtttctggtcttacatttaggtccattttgagttaatctttgtgtatggtgttaggaagtgttctcttttcattcttttacatgtagctgtccagttttcccaacatcatttattgaagaggctgtttttccccattgtatattcttgcctcttttgttaaaaataaggtacccataggtgcatgggtttatttctgggctttctctcttattctattggtctatatttctgttgactgcagctttgtagtataatctgaagccaggaaggttgattcctccagctctattctttctcaagactgctttggctattcagggtcttttgtgtttccatatgaattgtgaaattttttgttctggttctgtgaaaaatgccattggtaatttgatagggattgcactgaatgtgtagattgcttttggtagtatagtcattttcacactattgattcttcctattcttcctacccaggaacatggaatatctctccatctgtttatgtcatatttgatttctttcatcagtgtcttataattttctgtgtagagttattttgtctccttaggtaagtttattcccagatatttaattctttttgttgtaatggtggatgggattgattccttaatttctctttctgatttttcattgttagtataaggaaatgcaagtgatttctgtatattgatttcatatcctgcaactttgctaaattcactgattagctctagtaattttctgatactatctttcaggttttctatgtacaatatcataacatctgcaaacagtgagaccttcacttcttttctgacctggattccttttgtttctttttcttctctgattgctctagctagaacttccagaactatgttgaataataagggtgaaagtggacatccttgtcttgttcctgatctttagggggaatgctttcagtttttcaccattgagaataatgtttgccgtaggcctatcatatatggtctttcctatgttgaggtaggttccttctatgcccatattttgaagagttgtaatcataaatgggtgctgaaatttgtcaaaggctttttatgcatcgattgagattatcgtatggtttttatctttcaatttgttaatatggtgtaccacattgattgatatttgtttttatttatttatttatttatttatttattttaaatttatttattttaatttttactttacaattctgtattggttttggcataggttgatatttgtatattgaagaatccttgcattcctggaataaacgcaacttgattatggtgtatgaactttttgatgtgttgctgaattctgtctgctaaaattttgttgaggatttttgcatctatgttcatcagtgatattggcctgtagttttcttcttttgtgttgtctttgtctggtgttgatatcagggtgatggtggcctcatagaatgagtttggaagtgttctttcctctgaaattttttgaaaaagttttaggataggcattaactcttctctaaaagcttgatagaattctcctgtgaagccatctggtcctgggtttttgttttttgaccacaacttcaatttcagagcttttaattgggttgttaatagtttctatttcttcccagttcagtcttggaagattgagcttttctaagaatgtgtccatttttttccaggttatccaatttattaccatatagtttttcataatagtctcttacaatcctttttatttctgcattgtctgtcgtaatctctcctttttcatttctaattttgttgatttgattcttctctctttttttcttgatgaatctggctaaaggtttgtcaattttgtttatcttctcaaagaatcagcttttagttttattaatctttactattgtttctttcatttctttttcacttatttctgctcggattcttatgatttctttcctcttactaattttggggtttttttttgttcttctttttccagttgttttatgtgtaagttaggttgtctattcgatgtttctcttgtttcttgaggtaggattgtattgctataaactttctccttagaactgcttttgctgcatctcataggttttgagttgttgttttttcattgtcagtcatttctagaaatttttaatttcccttttgagttctttagtaacctgttggttatttagaaacatgttttttaatctccatgtgtttgtgtttcttacagttttttcttgtaattggtatctagcctcatagtgttgtggttggagaagatgactgatatgatctcaattttcttaaatttgttaggtttgatttatgacccaagatgtggtctgtcctggagaatgttccatgcacacttaagaaggtatattctccatttggatggaatgtcctgaagatatcaacgagatctatctcatctaatgtatcatttaagattgtgtttccttattaattttctgttttgatgatctgtccattggtgtgagtggggtgttaaagtctcctactattattgtgttactgtctccatttagtctgttagtgtttgtcttatgtattgggttttcctatgttgggtgcatatatatttacaactgttatgtcttcctcttggactgatcccttgatcattatgtagtgtcctttcttatctcttgtaatattctcattttaaggtctgttttgtctgatacgaggattgctactccagttttcttttgcttcccatttgcatggaatatatttttccagcctctcacattcagtctatgtgtgtctttaggactgaagtgggtttcttgtggacagcatatatatggatcttgtttttgtatccattcagccagtctgtgtcttttggttggagcatttaatatatttacatttaaagtaattattgatatatatgttcctattgccattttcttaattgttaggtttgattttgtagatctttttcttctcttgtatttcttgactattaagtccctttaacatttattgtaaagctggtttggtggtactgaattctcttaacttttgcttgtctgaaaacttttttatttctccatcaatttttaatgagatccttactgggtacagtcaaaacataaaaacaagtcaaaacagaaggataataaatgtttttcttgagtcactgctgtcagagtcctttcccttgctgggaatcacagtccacctcaccttcccagaatgccctccaacactgttctgatctctggaccagctctgggggcagctcagattctaatctgatactactgctgtgtgttatctcctccaatgtccatagctatcagaactagtgcgttttcttttatgggaactctcagtgacattttatatattccatatgcacagagtcttcctagttgatcatgtggatttagtctgctgcttgtacagatggtgggaatgttttgggtcttcttccttagccagcttgcccctggatttcaactgtggttttatttctacctctacatgtgggtcctccactagggtttgctcccgaggctgccctggaggacttaggtttgcccctgtgagggtcaggtgtggaggtggtacagctgcttgggttgcaggagttctgacagtgcggtactcaggggagttgtcagctagggtggcaggaaatatagttctctagaagggtatggcaaccagtcttggccaatagcttcagtattcttgcctgaagaaccccttctctgacagggaaacctgacaggtcacagtctacagggtcacaaagagtctggacacgactgaagtaaccctgtgtacatagatgcaaggctttttttttttttttttgctgtgacagctctgccccagtgagttttgaacgtgaaggtgttgcaacttcttggcttgtggggaccctggcagtgccaagtgtgcagggacatggactgtctctgatgcagaagttatggtcctgtcagagtctttttttgaccctcttttagctggtgatcagaagacctctttggtcaatctttctccacagctccgcatgttcaggcacttagagggctcccttgcctggggttcttctctgttgtttggcatatcaggcacatagaggggccccctgggtagggtcctactctgtagatcaatgtgtcatgcacttaaaggggcaccctgggtggggtcctaatctgtagttcagtgcatcaggcatttgatgagccagtctctctattgttcagctagtgatgctggcgtgtggggagagagaggctatggtgatggctccataatgtaagacacgtgactgagcagtatcgccttgcttccatggctgcctggctttcctccacagacatttcccaccacagtctcctccctcacatcccctcgatctgtctctccatagtcaacagcagcccttgccctaagattgctccccaacccctaaactccagtcccagccactgtgccttccagggttctgggtccctgtccagggtatgtgtggccgtggcagggactgtctgattctcattccatttagactgccacagatcagctgtttccctctcagccttaaatgtttctcctgaccagacaattgccctgatgtggagattgaacccctgcttcagttcccccacctgctgagggcaggtccagttctattgaatactcctgtttttcccccaggtccttcatcctactgagttttgcatggttctatatattcttttccactggtcaggtactcctgtctggtctcagctggtgttctgcatgcacttctgtgtctgaaggtgtgttcctgatgtatccgtggagagagatgtaccccacattcacctactcctctgccattttgttcccctacattagttttaatgtaagactctagacataattcagcattcagaaaactataatcatggcatctggtcccatcacttcatggcaaatagatggggaaacaatagaaacagagacagactttattttcttgggctccaaaatcacagaggacagtgactgcagccacaaacttaaaagacacttgctccttggaagaaaagctatgacaaacctggacagttttttaaaaagtagagacattactttgctgacaaagatccatctagtcaaaactatgattgttctagtagtcatgtatggatgtgagtgttggaccataaagaagtctgagcaccaaagaattgatgtgtttgaactgtggtgttggagaagactcttgagagtcccttggactgcaagaagatcaaacaagtcaatctgattttaacagaaattaaccctgaatattcatttgattgactgatgctgaagctgagtctccaatactttgacctcctcatgcaaagagctgattcactggaaaagaccctgatgcagggaaagattgaaggcaggaggagaaagatatggcagaggatgagatggttggttgacatcaccgactcaatggacatgagcaaactctgggatatggtgaaggacatggaagcttggtgtgctggacacaactgagcaacagaacaacaagaactaggcataatgtctctcttggacacaaattgagctaactctacattcttttaaacctcttcttggagtcctagatctgaattctctgacatctgtgggatgttacccaagatagggcctgggtcctgggctttaccaagtcacctagaaagatgaagggaaagagcagtctgttagactattcccatattcgtccatggcatcctgacatggtgttgtgaatatccagagtttaaacctgacagtaagggagaaaggtaaggttttgtaaaaacatctaaagggccctggaggtgagcaacctctctgattgcactaaagctaagccttggccccttacccagctttgtgccaaaatgacatcccctggggacgtggatttagggctgtcttgttttattaaagatgacattccttgtcttcccctccttttttgggttaaactatatttttcagaaaaggtatctaattaatgtctttttgtggataaccaagagtggttgtaattcattttatagtagttcagagataagggaatatttatttacatggtgtgagctttgctgagcttccctggtggctcagatggtaaagaatctgcctgcaatgcaggagacccagttcaacccctgagtcatggaagattccctagagaaaagaatggctaccctctccatgattcttgcctggagaattccatgaacagtggaacctggaaagggtcagattcctctgaccctactctacatggggtcataaagagttgaacatgactgagcaactaacatttttcactacttatttatgtgtaaccacaaatgaaaacatagttccagggacagtgtctttataagagattaacataaattctcattatcaataatgacagcacagctatacatttgaatcacatgatgggcagagttatttggtattaatatgttcatatatatataactgagtcactttgttgtacagcagagattggcacagcattgtaatcaactgtatttcaataaaaaataaaaataaaaaagtaaacatacccttgacatggccctagagggacaagacccagctccatctgtcagtgggcaggaaccagtcccttccaccaggaagtctgcacaagcctatcaagtcagtcttacacaccaagaagggaggaaccaaaagaaagaggagctgcaaccctgcagcctttggaatagaaagtgcaatcacagaaagttacacaaaatgagatagcaaaggagtatatttcaagtgaacaagaaaaccccagaagaataactaagtgaagtagagataagcaatctacccctcaaagtattcagaataatgatagtaaagatgatccagtgcattttcttggcaaaacgctattagtctttgccctgcttcaatctgcattccaaggccaaatttgcctgttactccaggtgtttcttgacttcctacttttgcattccagtcccccataatgaaaaggacatctgttttgggtgttagttctaaaaggccttgtaggtcttcataaaaccattcaacttcagcttcttcagcgttaccggttggggcatagacttggattactgtgatattgaatggtttgccttggagacgaacagagatcattctgtcgtttttgagattgcatccaagtactgcatttcggactcttttgttgactatgatggctactctatttcttctaagggattcctgcctgcagtagtagatataatggtcatcttagttaaattcacccattccagtccattttagtttgctgattcctagaatgtcaatgttcacccttgccatctcttgtttgaccacttccaatttgccttgattcatggacctgacattccaggttcctatgcaatattgctctttacagcatcggatcttgcttctatcaccagtcacatccacagctgggtattgtttttgctttggctccatcccttcattctttctggagttatttctccactgatctccagtagcatattgggcacctactgacctggggagttcctctttcagtatcctatcattttgccttttcatactgttcatggggttctcaaggcaagaatactgaagtggcttgccattcccttctctagtggaccacgctctgtcagacttctccacagtgatcctcccatcgtgggttgccccgcaggcatggcttgttttcattgagttaggcaaggctgtggtcctagtgtgattagattgactagttttctgtgagtatggtttcatgtgtcttccctcttgcaacacctaccatctgacttgggtttctcttaccttgggcgtggggtatctcttcacagctgctccagcaaagcacagccgctgctccttaccttggatgaggggtatctccttaccgccagttcactggtcatagcaaacaccctcttccaacaacacaagagaagactctacacatggacatcaccagatggtcaacaccaaaattagactgattatattctttgcagccaaagatggagaagctctatacagtcaactaaaacgagaccaggagttgactgtggctcagatcatgaactccttattgccaagttcagacttaaattgaagaaagtagggaaaaccgctagaccattcaggtatctttatcttatctttatacagtagacgtgagaaatacatttaagggcctagatctgatagatagagtgcctgatgaactatggaatgaggttcatgtcattgtacaggagacagggatcaagaccatccacatggaaaagaaatgcaaaaaagcaaaatggctctctggggaagccttacaaatagctatgaaaagaagagaagtgaaaagcaaaggagaaaaggaaagatataaacatctgaatgcagagttccaaagaagagcaagaagagataagaaagccttcttcagtgatcaatacaaagaaatacaggaaaacaacagaatgggaagactagagatctcttcaagaaaattagagataccaaggaaacatttcatgcaaagatgggctcgataaaggacagaaatggtctggacataacagaagcagaagatattaagaagaggtggcaagaatacacagaactgtacaaaaaagatcttcacgacctggataatcatgacgatgtgatcactaatctagagccagacatcttggaatgtgaagtcaagggggccttagaaagcatcactacgaacaaacctagtggaggtgatggaattcctgttgagctgtttcaaatgctgaaagatgatgcagtgaaagtgctgcactcaaaatgccagcaatttggaaaactcatcagtggccataggactggaaaaggtcagttttccttccaattccaaagaaaggcaatgcaaaagaatgctcaaactaccacacaattgcactcatctcacatgctagtaaagtaatgctcaaaattctccaagccaggctcagcaatacgtgaaccgtgaactccctgatattcaagctggttttagaaaaggcagaggaaccagagatcaaattgccaacatctgctggatcatggaaaaaggaagagagttccagaaaaacatctatttctgctttattgactttgccaaagcctttgactgtgtggatcacattaaactgtggaaaattctgaaagagatgggaataccagactacctgacctgcctcttgagaaatctatatgcaggtcaggaggcaccagttagaactggacatggaacaacagactggttccaaataggaaaaggagtacatcaaggctgtttattgtcaccctgcttatttaacttatatgcagagtacatcatgagaaacactggactggaagaaacacaagctggaatcaagatttccgggagaaatatcaataacctcagatatgtagatgacaccacccttatggcagaaagtgaagaggaactaaaaagcctcatgatgaaagtgaaagaggagagtgaaacagttggcttaaagctcaacattcagaaaacgaagatcatggcatctggtcccatcacttcatgggaaatagatggggaaacagtggaaacagtgtcagaatttattttggggggctccaaaatcactgcagatggtgactgcagccatgaaattaaaagacgcttactccttggaagaaaagttatgaccaacctagatagtatattcaaaagcagagacattactttgctgactaaggtctgtctagtcaaggctatggtttttcctgtggtcatgtatggatgtgaggcttggactgtgaagaaggctgagcactgaagaattgatgcttttgcactgtggtgtttgagaagactcttgagagtcccttggactgcaaggagatccaaccagtccattctgaaggagatcaaccctgggatttctttggaaagaatgatgctaaagctgaagctccagtactttggccacctcatgagaagagttgactcattggaaaagactgatgctgggagggattggtggcaggaggagaaggggacgactgaggataagatggctggatggcatcactgactcgatggacgtgtctgagtgaactctgggagatggtgatggacagggaggcctggcatgttggaattcatggggtcgcaaagagtcggacatgactgagcgactcaactgaactgaaagatgatccagaattttagaaaaagaatggaggtatggattgagaagatacaagaaatgtttaacaaagagctaggagatataaagaacagacaaacagacatgaacaatgcaataactgaagtgagaaatacactataaggaatccttagcataataaatgaaacagaagaagaaataagtgagctagaagacagaatggttgaaatactgccacagactagaataaagaagacagaatgaaaacaaatgagaacagtttaagagacctctggggcagtattaaatgttgcattacagtgggtcccagaaggggaagagagagagagagagagagaaaggaattgaggaaatatttgaaaagatattgataatagctggaaatgtccctaacatgggaaaggaaatagtcacccaagatcaggcactcggagaatcccaggcaggataaacccaaggaggaacatgacgagatgcatattactcaaactgacaaaaattaaagacaagagaaaatactaaaagcaacaaaggaaaagcaacaaataacatacaaaggaatccccataaggtaatcaagtgatttttcagcagaaactcttgaggccagaagggagaggcatgttatattaatattttaagtgatgaaagggaaaagcctacaatcaagaatatgcagtaatgctctctttcagatttgacagagaaattaaaaactttacagacaagaaaatgctaagagaatttaaagtcaccaaatcagctttgcaccaaatcagctttacaacaaatgtgaaagaagtctctaagaagaaaaggaaaagctacaactagaaacaagaaaattatgaatggaaaagttcaccagtaaaggccaacaatcagcaaaggtaggatatcatccacacacaaatatatccaaaccagccactgcgagaagagagtacaaatgcaggatataggaaatgcatttgaaatgaaaagaccagcaacttaaaataatcttgaatatatatatatactgtgatatcaaaacctcataactacaaaccaaatatacacaatagatatatgcacaaaaaagaaaagagaatccaaacacaacactaaagttagtcattaggtcataagagaagagagcaaaagaggaagggaagaaaaaatacttataaaaacaaatccaaaacaattaaaatgacaataaaaatatatattgataattgcttcatttaaaatagattaaatgcttcaaccagaagacatccatccatagaatggatgcaaaaataagacccatatataggcccatatatatgctgtctacaagaggcccacttcagaaccagggaggcataaaaaatgaaagtgaggggatggaaaatgtataccatgtaaattaaataaaaagaaacctcaagtaaatattcatatgagacaaaatacctgttaccagagacaaaaagggcactacataataatcaaaggatcaatccaagaagatagtgtaacagttgtaactatgtatacacctagcataggtatataaggcaaattttgttgttcagttgctaagtcttgtttgactctttgcaacaccatggacgtcaggcttcactggccttcactatctcctggagtttcatgtgcattgagttgggaatgctatctaaccgtcttatcctctgtcatcccttcactctttcccagcatcagggtcttttccaatgagttggctcttcacatcagcttcagcaatagtccttccaatgagtaatccagagtcggagtattgctgaagttgattggcacttcaactgaagtgcttcagttgaaggagcttcaacttcagcaaaagttcttccaaagaatattcagggttgattttctttagaattgactggtttaatctccttgcagttcaagggactctcaacagtcttctccagcaccacagttggaaagcatcaagtctttggctctcagacttatttatagttcaactctcacatctacatgactactggaaaagccatggctttgactacatgaatctatgtcagcaaagtgatatcttgctttttaatatgctgccttgcttggtttatcataatgttccttccaaggagcaagcatttttaaatttcaaggatgcagtcaccatccacagtgattttggagcccaaggaaataaaatctgtcattgtttccacttttcctccatctatttgccatgggacaggccaggatcttagtttttttaatgttgagtttcaggccagctttttcactcttcttcaccctcatcaagaggctctttagttccttttcactttctgcctttagaatggtatcatattcatatctgaagttgttgctatttcccctggcagtcttgattccagcttgtgattcaaccagcctggcgttttgtgtgatgtactctgtgtagaggttaaataagcagggtgacaatatacagccttcgtgtcctcctttcccaatttggaaccagtccatcattccatgtccggttctaactgttgcttcttgacccacatacatgtttctcagaagacaggtaaggcgatctggtattctcatcttttttaagaattttcagtttgttgtgatcctcattgtcaagggttttagcatagtcaatgaagcagagtagattttttatggaactcccttgctttctccatgatccagcaaatgttggcaatttgatctctggttcctctgcctctttgaaatgtagcttgtacatctggaagttcacagttcatgtactgttgaagtatagcttgaaggattttgaacataacctagctagcatgtgaaatgggtataattatacagtagtttgaacattctttgacatgcccttctttgggattggaatgaaaactgaccttttccatccttttcgtggccaccatggagttttccaaatttactgatatattgtgttcagcaccttaataacatcatcttttagaattttaaatagctcagctggaattccgtcacctccactggctttgtttgtagtaatgtttcctaaggcccacttgacttcgcactccaagatatctggctctaggtgagttaccacatctttgtggctatccatgtcattatccaagaccttttttgtataaggcaaatacataaaagaagccataaaggcaaatccgtaaaaggagaaatttacagtaacacaaaaatagtagggagttttaacaccccattttttatcaatggacagatcatccagatagaaaatcagtaaggaaacacagtttttatatgacccactagaccagttggacttaattgatatttttagagcattccatccaaaagcagcagaatatacattcttctcaagtgcacatggaacattctccaggatagatcacatttgggtcacaaatcaatccttggcaaatttaagaaaattgaaatcatatcaagcatcttttccaacttcaacctatgagattataaaatcaattacaagaaaaaactgaaaaaatcactagcacatgggggctaaacagtatgctagtaaacaaccaatggatcactgaagatatcaaggaggaaaggaaaaaaaaatgcctagagacatgaaaatgaaaacacaatgatccaaaatctgtgggacatagcaaaggcagttcaaagagggaagtttatagcaatacaaccttacctcaggaaacaagaaaaatctgttaaaccgcctaaacaacataacctgtctcttatatctaaagcaattagagaaagaacaaacaaaatccaatgttagtagtaggagagaaatcataaagatcaaagcagaattaaatgaaatatagacaaagatctatagaaaagatcaatgaaactaaaagctggttctttgaaaagataaacaaaattgataaacctttagccagactcattaagaaaagttgggatagggctcaaatcaacaaaatcagaaatgaagaaagaaaagttataaatgacaccacagaaatacaaaggataagagactactacaagtaactgtatgcaaataaaatgaataaagtaaaaaaaaaatggataaattcttagacaagtataattttccaagactgaatgtggaagaaataaaaaaatatgaatagaccaatcataagtattgggattgaaactatgatttaaaaaatcccaactaataaaagtccaggaccagatggcttaacaggcaaattctgccaaacatgtaaagacttaatacctattcttctgaaactctttcaaaaaattgtagaaggaacactggaactcattctgtgaggccactatcactctgataccaaaactagacaaagataccacaaaaaagaaattataggccaatatcgctgatgaacatagatcaaaaatcctcaacagaatattagcaaacagaatctaacaatacatttaaagaaccacacatgatcatcaagtaggatttatatcagaaattaaaggatttctcaatgtctgcaaatcaatcagtgtgatacaccacattaaccattgaagagtaaaagtcatacaaccatctcaatagatgcataaaaagcttttgataaagttcaacaccaatttgtgacaaaaactctcaagaaaatgggcatagagagagaacatacctcaatataacaaaggccatatatgactaccccacaacaaacatcattctcaaatgagaaaagctgaaagcatttcctctaagatcaggaacaagagaaggatatccactgttgtcaattttattcaacatagtttgggaagtcctaaccatggcaattagagattaaaaggaagtaaaaggaacccaaattgtaaaagaagatgtaaaactgtcactatttgaagatgacatgataccgtacaatacaaaatccttacaatgctagcagaatactagagctcatcaatgaatttgtgaagttgcagtatacaaaataaatacacccacgtctattgcatttatatacactaacagtgaaaaatcaggaagagaaatcaaggaaatagtctcacttaccattaaatgaaaatgaataaaatatctaggaataaacctttctaaggagggagaagacttgtactttgtaaactataagataccgaaaaaagaaattgaagattacattaacagatggaaagatagaccatattcctggatgggaaaattcagtattgtcaaaatgactatactacccaaagcaatttacagattcaatgaaatccctatcaaatttgctgtagtatttttcacagagctagaacaaaaaaattttaagtttgtatggaaacataaaaatccccaaatagtcaaagcaatcctgagaaagaaaaatggaggtggcagaatcagacttcctgacttctgattatgctaaaaagttatagtaatcaagacagtatggtactggcacaaaaacagaaatatagataaataaaacaagataaagagtcaagaaataaacccacacatctatggtcaacctacaacaaaggaggcaagactgccatggagaaaagacagtctttttagtaagtggtgcttggaaaattgaacagctacatgtgaaaaatgaaattagaactttgttgaacactatatacaacaataaacctaaaatggattaaagagtttgaatgctttaattgaatgctataaaactcttagaggaaaatacaggcagaacactctctgacataaattgcagcaatatattttttgatttgtttcctagagtaatggaaaaaaaagcaaaagtaaagaaatgagacctaattaaacttaaaagttttttttttctcacagcaaaggaaatcataagcagaatgaaaagacaatgaaaagacactgaatggtagaaaatgtttgcaaatgatataatcaacaagaggagaatggtgtggcagagaatgagatgattagagagcatcactaactcagtggacttgagtttgagtgaactccaggaggtagtgaaggacaaggaagcctggcatgctgcagttcatggggtcacaaagaatcggacatgacttagtgactaaacaacatcaagggattaatacaaaatttacaagtagctcatgctgatcaatatcaaaaaagcaaacaatccagtcaaaaaatgggcagaagacctaaacaacatttctccaaagaagacattacagatgactaatagggactgaaaagatgctcaatattgctaattattagggaaactcaaaacaaccatgagatatcaccttatacagttcagaacagccatcatcaaaaagcctacacacagtaaattttagagagagtataggaaaaagactctactcatggacatcaccagatggtcaatgccaaaatcagatctttgcagccaaagatggagaagttctatacagtcagtaaagtcaagaccaggaactgactgtggctcagattatgaactccttattgcaaaattcagacttacattgaagaaagtagggaaaaccactagaccatttagatacaaccgaaatcaaatctcttatgattatgtagtggtagtgacaaatagattcaagggattagatctgatagacagagtgcctgaagaactatggatggaattcgtgcaaaaggcaaaatggaaaaaagcaaaatggttgtctgactaggccttacaaatagctgagagaagaagaaaattgaaaggcaaaggagaaaaggaaagatatactcatttgaatgtagagttccaaagaatagcaaggagagataagaaagccttcctcggtgataaatgcaaagaaatagacaaaaacagtagaatgggaaagactagagacctcttcaagaaaattggagttacaaagggaacatttcatgcaaagatgggcagaaatgtacagaataaaggacagaaatggcatggacctaacagaagcagaagatactaagaaaaggtggcaacaacacacagaagaactatcaaaaaagatcttcatgacctaggtaactacgagattgtgatcactctcctagaatgtgtagtcatcctggaatgtgaaatcaagtgggccttaggaagcatcactatgaacaaagctagtggaggtgatggaattccagatgagctatttcagatactaaaagatgatgcctttaaagtgctgcactcaatatgccagcaaatttggaaaactcagcagtggccacaggactagaaaaggtcagttttcattccaatccctaagaagggcattgccaaagaatgttcaaactaccacacaattgcactcatctcatatgctagcaaagtaatgctcaaaattttccaagccagagttcaaccgtacataaaccatgaacgtccagatgttcaagctggatttagaaagggtagagaaacctgaggtcaaatttccaacttccattggatcatagaaaaagcaagagcataaaaaaaaaatccacttctgctttagtgattacaccaaagtctttgactgtgtggatcacaacaaactgcagaaaattcttcaagagatgggaaataccagaccaccttacttgcctcctgagaaatctgtatgcaggtcaagaagcaacagttagaactggacatggaacaatgcactggttccaaattgggaaaggagtatgtcaaggctgtatattgtcattctgcttgtttaacttatatgcaaagtacatcatgtgaaatgctgggctggatgaagcacaagctagaatcaagaatgctgggaaaaatatcaatgatatcagatatgcagatgacaccaccattatggcagaaagcgaagaaggactaaagagcctcttgatgaaagtgaaagaggagagtgaaaaagttggcttaaagctcaacattcagaaaactaagatcctggcattcttagcaatggtcccactgcttcatggcaaatagatggggaaataatagaaacagtgtcagactttatttcgggggggggggctccaaaatcactgcagatggtgattgcagccatgaaattaaaagacgtttgcttcttggaagaaaagctatgaccaacctagacagcatattgaaaagcatattcctttgctgacaaagattcatctagtcaaatctatggtttttccagtagtcatgtatggatgtgagagttggactacaaagaaagctaagcaccaaagaattgatgtttttgaacttcggtgttggagaagactcttgagagtcccttggactgcaaggagatcaaaccagtgaatcctaaaggaaatcattcctgaatattcattggaaggactcatgctgaaacttgaagctgcaagccacttgatgtgaagaactgacactgaaaaagaacgtgatgttgggaaagagtgaaggcaggaggagaaggggacaacagaggatgagatggttgtatgacatcactgacatgatggacattagtttgaggatgctccaggagttggtgatggagagggaagcctggcatgctacagtccatggggtcacaaagggttggacacgactgagcaactgaactgaactgatagaaaaaaagacatccatttacattgttggtgggaatgtaaattggtacagccactatagagaacagcatggaagttcttaaaaaaaaaaaaaacaactaaaagtaatactaccataagatccaacaatcccgctcattggcatatgtctggataaaaccataatttgaaaaatacatgcaccataatgttcaagacagtagtatttccagcatcaagacatggaaccaacctaatgttcatggttaatggataaagaaaatgtggtacatacatacaatagaaatttacttagccatataaagaaatagtgccatttgcagcaacatggatggacctagacattatcttacaaagtgaagtaaatcagagaaagataaatatatgatatcacttatatgtagaatctaagaaagtatataaatgaacttatttacaaaacagaaatagacttgcagacataaaaaactaatttatggctaccaaagggataaagggaggaggagggataaattaggatttttggattaacagaagcacactagtatataccaaataggtaatcaacaatgacctactgtatagaacaggaaactctactcagtattctgtaataacctacaggagaaaagaatctgacaaagtgtagatttaggtatatgtataattgaatcactttgctgtacagttgaaactagcacaaacttgtaaaagagctatactccaatataaaataaaaattaagaaacaaaacaaaaatcactactaggcctcataagagtcaagaaatcacatctgacaaatctctgctttctctgtgtaagaattagtcagaaattacaggaagttgtgaggaaaattattccaagtcaccctttgcactctgctcacttgtagatctcttgggatgggtcccatttgcagaatttctagtattgaataggcagatgggcagacctccagtgtccactggtcctttcctggcattggcacaagtctacagtgctccaggatcccatgtgcaatgacacattgtcctttcatctctcaactgattgatggggagatagtcttcctttgtcggttacacttgctcctttttgcctgttctagggagactccccactaatgaacatgattatttaaacaccttttaaacaacactggaagagtttctttaggagagccatgtactctatgctcttgaatggcattttcacccatcacaggaaggcatttcttaccatgacccagatatgtgtgcactagaacattcctcaggtcttttccaccaggcccccaggccctgtgccactgggatcttcctcctggctctgccacaagctactgtgccagtggagcactcttctgctcctccatccactgacatcctccatccagaacttcgatggtgttggtctctgctcgttctcatcctgtctcttttgtaagttcttaatctcctttgtgagttttctgtttccacacatcttcaacatctatggattttggggttctgattttttgacttttttccctgttaggtgagcattttctagtggagcttatgaccttagtggcttgcactgttgcctgaatgctaggattgcccacctctgtctctgccagagtctcaccttcctcagatcatgtgtgccagtgccctagcctccacatacttgatggatccctcacactgaagatgctctacctggatcacatccattctgcagtgctggggtcatctccttgctgggtctccagacatgtttctatcctcagattacaccatgatatttagtaaaacatccagtagttttactttatacactttaaagagaatttctttgaagtaattgtgtcagtggggttcaaaccaaaattgtttcttgaattaccctgctacaatccagttgactgttttgactttcacaaagctagcctgaaagcttcatccctagaaaatggaattggtgggccaggagctagatatcccttaaatatatgtagtttattaggctctgaatgctctaatgattctgagggatccttgattattttatatgcctcaacatttgaccacttactctatcaaatgaggacattgtggaaaattaagaataaagtggcttagtgtagtcaaaatgaaaacagtacaaaatgaggctgagagggaagggaagaaacagaaccagtactttggaagaaagggctgcatttaagtactgcactgatgtaagtatgacagtaggtagtttggttactgaatacgttaaagagacaattttaggaaattgtagagccatgtaaaaacagcaaggaggccctgacacatgcactgaacaagcttagaaaacacatatgtagcctattgtgcattgcacctgcctgtgttttttcttgaaattttcagtctggatttttccattctatatttttcttacttaaaaaatctacttgttacaattctagaagcaaccaaatacttcttttcaacactgtgttagttttgctgtggaggcctttataagacaccttttgtccttttctttctcctcatttcacccttttcatctgatttttccttcaactgctccatcatttctaatgggagaaaaattaacagttttgttacaggttttcttcactatccaaaaatagagttttcccatataaactttcagaagtcaaaatggcatagagtgagaaaacaatcacttgtttccctaaaagcaaaaatcctcttcagatttcttccttagtgaaaacagatgctaatgtaggtcttttgtaaaagcaaagcaaagtggcataaagtgaaatttcaaaaagtgggggacatctgtattgtgttccaaagggacctataattattcaggatataagtactttggccttcatgagttcctgtctccaaaaaatattaattacatttcacgactgaattcatacacaggaaatacattaatatattttaagctatcttcttccctattttgttcctgattttaaaacaaatgaaatgattttcatttaaaaagtgttttggacctttttattttttaattttatttattttattttattttatttttttattttattattttttttcttttttattttaatttttttcttttttcttttttatttttttaatttttactttacaattctgtattggttttggcatagattgacatgaatccaccacaggtgtacatgcgttcccaaacatgaacccccctcccacccccctccccacaacatctctctgggtcatccccgtgcgtcagccccaagcgtgtcatatcctgcatcagacatagactggcatttcgattcttacatgatattatacatgtttcaatgccattctcccaaatcatcacaccctctccctctccctctgagtccaaaagtccactatacacatctgtgtctcttttgctgtcctgcgtatagggtcatcattgccatcttcctaaattccatatatatgtgttagtatactgtattggtgtttttctttctggctcacttcactctgtataatcggctccagtttcatccatctcatcagaactgattcaaatgtattctttttaatggctgagtaatactccattgtgtatgtgtaccatagctttcttatccattcatctactgatggacatctaggttgtttccatgtcctggctattataaacagtgctgcaatgaacattggggtacatgtgtctctttcaattctggtttcctctgtgtgtatgcccaacagtgggattgctgggtcataaggcatttctatttgcaattttttaaggaatctccacactgttctccatagtggctgtactagtttgcattcccaccaacagtgtaggagggttcccttctctccacaccctctccagcaaaggtatttgggacatgcattctaaagacacaacatccatggtgatatcctcagaaacgtggtggattctaatggccattgaaagcatgccatgagccccagctcttcataggtttctctgctatctgtatatgatcagcctcacataattccatctgtcattcagatgctattttcaagggcaaccactggatgtgcagataaactgcaagtgattaataacttcagatcattgtacactggcaggcctaaattttcacacaacttactaatggttctaagttgtgatcatggtttctaagttgtgttttatctttagcaatgttataagtggtttcaggtattttctggaaaagaggggggacaaataagtaaattttaataaacaataatttgttgttcagtgtctgactctttgagactccatgaactacagcatgccaggcttccccgtccttcgccatctcctggagtttgctcaaactaatgtccattgaattagtgatgctacccaaccatctcatcctctgttgcccccttctcctcttgccctcaatatttcccagcaacaataattaatattgagttcactccttccatcccaggcctttagaagatgaccttccagactgctgccttgggaatggtctccaagtttgtcactagtgtccctgggacctactctctttacaccccactcaccccactggtcctgcctgagagtctcccccaatgttccgtcattatgcctctgaccctgttttgtggatcagtggtccaggagttcttgccagtgagaaactggttctcgcagcccagttcatggggacaacaacctgcgagggtctcagagggtgtcacatgtatttactgaatatttaagcaccgtgaaaacaaaaggaaaaaactgaccaatattgttgctgacttattcccttacaaatcaacctagtggagatttcatccaacaacaaaaatatcctcagcagttgactgtggaaaagagcccagagtcaggcaaaggaattgcgaggggaaggagagcacttctgcctgggacccttgagactggttgggacaccctgtggttcttaagtcctgatggccactaggtgacctgtggaggactgtgctttccaggcatggcgaagctctttcgtatcgatagcagtaacttaaatgaagtgtttaagaaaatgcaatttaccttcaaacagatgaatattgcctcatagtctttttatttttttcttttaaattgaagtatcgttcatttcggagaaggcgatggcaccccactccagtattcttgcctggaaaatcccttggatgaaggagcctggtaggctgtagtccacggggttgagaagggtcggacatgactgagcgacttcactttcgcttttcactttcatgcgttggagaaggaaatggcaacccactccagtgctcttgcctggagaatcccagggatgggggagcctggtgggctgccgtctctggggtcgcacagagtcggacacgactgaagcgacttagctagctagctatagttcatttacaacattgtgtaagttccaggtgtatagcaatatgattcagttttatatacatatatgttgcttcaggttcttttgccttataagttatcataaaatactgagcatagttcctggtgttataacaataagttcttgttggttatctattttatatatagcagtgatagctttatgttttgtctccctcagtcttgtttcaccggatcccagaggacatgtcagtatagtggtgaagtagaaccagctaaggttgggataagatgtgatgacctgtttttgtttccttctaaggttgcttgtcattcagataataattggtgttttattatgaaagaaacaactcttgaatgtttgcaaaactgcagtgaagagtacctgttctgtgggctttgtgtaggttccccagcccttgatctcagacttccctgggctctgccgtgaggttgtgcctgtgctgcctgtggtttcatgtctcctttcctgtttccagggtctggacttcgctgggtttacagcacacatgtttgctgggatttgcttcgttctcttgttctcctttccactcctcagactcctttactggaacaaaaagatctataacaaggaacccagtgagattgttggtgagtagaagcacctcctcatagagcttcagagtttactaacacaatattatttttttctgggggaggttgccacaaaaaggcaggagattaatgctatgtagaataccagggaagtatccgtcactgggatgctgcacactagcgtgtccctgtctgcctccttgtaggcagtgcactttcaggggctttaaatccatgaattgtgcctctttagtgttctatagaatgaaatgtggttacatgtaggaagcaatgtccactgcatacaatttgcttgtcatgatatcattgaaccacctgtatttaatacaaaaagagcatatagactgtagtctatatttttgaaccactctgttgcttcatgtccagttctgttacattttgtgctgcatatgggcttctcaggaggcaggtaaagtggtctgatattctcatctctttaagaatatttcacagtttgttgtgatccacacagtcaaaggctttattgtagtcaatgaagcagaagtagatgttattttgaaatttttctaaatccagcttgtacatctggaagttctcagttcatgtactgctgaagcctagcctgaaggattttgagcataatcttgctagcatgtgaaataagtgcaatcaattcccatttctgtataaatggctgggaatctaagtatgttctcaccagccttcctgctcatcagatggtgactttacatggtagatctgcctttctttcctgggtgacttttgtgttcagaatttaactgtttttgttctaactaggaaaatgtcatatacaccttctcaagtcacctatataaaaccagcttgttcctagtagaattgaatcacccacctccaccagataaatggaaagataagaagaaatttctattccagacaatttgtattgattgcacaaaaattggagtgcccttgtagatataaaagtggtactttaaatgtaagcaatcaacagggatttcctgggcagcctcttggcctagcccttagtgaaggctgcataggtgcaagacaagtgggcagcttgtgtaggcataggaatgggcctcaccaaagaagcccaaaactgtggggggtggctccagtatgggggctggagggaaggaaaggaaagcaggcacagatgccgggggccaaatggagtagtctttttggctgcttcctgggccatggaagattcctgccatgtaacatagtttacttcatttaggaagaacgtgttttcttaataacattgataattactcacctggtcgtttgcagagcagacatatgattttttttgagaaaaaagaacatcttcatgttcatggcttcccaggtggtgccagtggtaaagaatccacctgccaatacaggagacccaagtgacatgaattcaattcctgggtcaggaagattccctggcttaggaaatggcaaccaactccagtattcttgcctggaaaattccatggacagaggagcctggtggactacaatccatagagtctcaaagagtcagacacgactgagcgactgagcatgtacacacattcatgttaacatggcattcttcctatgtgtgtctgtgtccacatttccccatttgtgaggacaccagtcatcttggatttggggccatcctaatgacctcaccttaactaattatatctgcagtgagcctatttccaaaacaaatcacattctgaggtactagaggttaggacttcaacacgtgaattcagggggacacaattcaacccatagcaatcagcaagaggtattcaaaatgttttatcatcaacaagtatatgtaaagtgggataacttaatatgtagctttagttttctaatggaaagggtcatacccatggagagctagggaaactaatcaatcacaatggctaatctgtctttagaagcttgtgtgggcacagttgcacctctttcctccccaatatccctccaccttgctggtgatcagaattactcaggaataattgttatatatacagattatcaggcccacccctaggaaatctgtgctgcgaataaactcttctggaaagtcttatcttgagattaacttggacatactgatttggaaacatagaaaacaaatctgtgtattgattcctttactcatcatgaataaagagctgagggaagctttgagggaagtgggatagaaaggttgggatatggataatgctggaaccctatggtaaggacaacacaggttgtacgtcagcacacagtgaactgtgcagatccagagcaatcactctgagccactattgtgtatagggaaatctgattttgaattgcttggtataactatagattcctaagcttaaccccagagatttgggttcagcaggtctgtgatgagtccaaaacatgtcagaatagcttggctatgctacagtttgaatattctttggcatggcctttctttgggactggaatgaaaactgagcttttctagtcctgtggtcactgctgagttttccaaatttgttggcttattgagtgaagcactttaacatcattatcttttaggatctgaaatagctcaactggaattccatcacctccactagcttggttcatagtgatgcttcctaaggcccacttgacttcacattccaggatgtctggctctagttgagtgatcacaccattgtggttatctgggtcatgaagctcttttttgtatagttcttctgtgtattctctccacttcttaatatcttctgcctctgttagtttctgtcctttattgtgctcttctttgcatgaaatgttcccttggtatctctaattttcttgaagaggtctctagtctttcccattgtattgctttcctatatttctttgcactgatcactgaggaaggctttcttatctctccttgctattctttggaactctgcattcaaatgagtatatctttccttttctcctttgcctttcacttctcttctcttctcagctatttgtaaggcctcttcagacaaccattttgcctttttgtatattctttttcttggacatggtcttgataactgcctcctgtacaatgtcccaaaccttcatccatagttcttcagtcactctatcagatctaatcccttgaatctatttgtctcttctgctatataatcataagggatttgatttaggtcatacctgaatggtctagtggttttccctactttattcaatttaagtctggattttgcaacaaggagctcatgatctgaaccacagttagctcctggtcttgttttgctgactgtatagactagcaaagtaatgctcaaaactctcctgcatagactagcaaaataaggctcaaaattctccaagcaagacatcaacagtatgtgaaccacaaacttccagatatcaaggtggatttagaaaaggcagaggaaccagagatcaaattgtcagcgtctgttggaacattgaaaaagaaagagagttccagaaaaactacttttgctttagtgattaaaccaaagccttttgattgtgtggatcacaacaaacagtgtaaaattcttcaagagatgggaataccagaccaccttacctgcctcctgagaaatctgtatgcaggtcaagaagcaacagttagaactggacatggaacaatggactggctccaaattggaaaagaagtatgcaaaagctgtatattgtcattctgtttatttaatttatatgcagagtacatcatgtgaaatgttgggctggataaagcacaagctggaatcaaaattgccaggaaagatatcaatgacctcagatatacagatgacaccaaccttatggcagaaagtgaagaagaactaatgagcctcttgatgaaagtgaaagaggagagtgaaaaagttggcttaaaattcaacattcaaaaaattaagatcatggcattcattcccattgctttatgacaaatagatggggagagaactgaaacagtgagagactttattttcttgggctccaaaatcactgtggatggtgactgcaggcatgaaattaaaagacgtttgctccttggaagaaaagctatgaccaacctagacagcatattaaaaagcagagatactacttagccgacaaaggcccatctagtcaaatccatagtttttctggtagtcacgtatagatgtgagaattggattataaagaaagctgagcgccaaagaattggtgcttttgatctgtggtgttggagaagactcttgagggccccttggagtgcaaggagatccaaccagtccatcctaaaggaaatcagtcctgaatattcactggaagtactcatgctgaagcttgaagctccaagccatctgatggaaagaactgactcaatggaaaagatcctgatgctgggaaagactgaaggcaggaggagagggggatgacagaggatgaaatggctggatgccatcactgactcaatgggcatgagtttgagcaagctctgggagttggtgatggacagggaagcctggctgtgctgcagtccaagggtcacaaagagttggacacgtttgagctactgaactgaagtgaactaatagtactagaaaaagtatccctgaaatcttagtaacactacttcgtgttggcctaatgtccactgtgggatcacagtgccttgctgatcagtagttctcagaactgtgagctgctggtcatcatagggatcagagagaaccatatgttccactctgtcactgaatgactcctcctgactgtcctgactgtcactaggctccaccagttgcaggggctgggttgagtcagcctgccaagtgatcaacatgggagagaatttgacttatttattgaaaagcacaaataatcaccagagtatgcccctctggtaatcaaataccaactcatgatgcttattcctaatattttatatagacttttttatatctgtgtacattagggatatttgtgtgtaatatcctctcttaaaatatatactttttgctgtcctcaaaggatgaatatataagtataccctccttttcagcttttgggaagagatggtgtaaaattgctattacattttaccttaaacgttttccaggatattttagagttgaacttccttccctcccttcttacatcactatctcccttgatttcctcctccctctctctctctctccttcccttctagtttttaaatacaaatactgattctttaatagatataggctggctattaaagttatctgtttcttcatgagggctcactggtagtttctgcctttaaaggaatttgtccctgttcaaactcagttgttgaaagaattattctaaaattgtttataatagtttttcattatcctttaatagctatagaacttttaaaattgaagtatagctgatttgcgaaattgtgtatagtttcagtcaacaggaaagtgattcagttatatatgcaaatatatatatatacactcagattattttccattagtttattataagatatggagtgtagttccctgtattaaacagatacaattccttatctcttttatgcatagtagtttgtctctgttaatctcatactcctaatttatgtctccccctcctcttcccttttggttaccataagtttattttctatgtctgtgaatctgttttatttgcatatagatttatttgtattatttttagtttctacaaataacaattcagttcagttcagttcagtcactcagtcatgtccaactcttcgcgaccccatgaattgcagcatgccaggcctccctgtccatcaccaactcccagagttcacccaaactcatgtgcatcgagttggtgatgccatccagccatctcatcctctgtcgtccccttctcctcctgcccccaatccctcccagcatcagagtcttttccaatgagtcaactcttcgcatgaggtggccaaagtactggagtttcaaccttagcatcattccttccaaagaacacccaggactgatctccttcagaatggactggttggatctccttgcagtacaagggactctcaaaatttcacaaatatcctataatattttttcttcacttagtacaatattctctatgtccatgttgctgcaaatggcaatatttcattctgtcaattccaaagaaaggcaatgccaaagaatgctcaaactacggcacaattgcactcatctcacatgctagtaaagtaatgctcaaaattctccaagccaggcttcagcaatatgtgaaccgtgaacttcctgatgttaaagctggttttagaaaaggcagaggaaccagaaatcaaattgccaacatcccctagatcatggaaaaagcaagagagttccagaaaaacatctatttctgttttattgactatgccaaagcctttgactgtgtggatcacaataaactatggaaatttctgaaagagatgggaataccagaccacctgacctgcctcttgagaaatctgtatgcaggtcaggaagcagcagttagaactgcacatggaacaacagactggttccaaataggaaaaggagtacatcgaggctgtatattgtcaccctgcttatttaacttatatgcagagtacatcatgagaaatgctggactggaagaaacacaagctggaatcaagattgccgggagaaatatcaataagctcagatatgcagatgacaccacccttatggcagaaagtgaagaggaactaaaaagcctcttgatgaaagtgaaagaggagagtgaaaatgttgacttaaagctcaacattcagaaaatgaagatcatggcatccggtcccatcacttcatgggaaatagatggggaaacagtggaaacagtgtcagaatttattttggggggctccaaaatcactgcagatggtgactgcagccatgaaattaaaagacgcttactccttggaagaaaagttatggccaacctagatagtatattcaaaagcagagacattactttgctgactgatgtccatctagtcaaggctatggttttttctgtggtcatgtatggatgtgagagttggactgtgaagaaggctgagcaccaaagaattgatgcttttgcactgtggtgtttgagaagactcttgagagtcccttggactgcaaggagatccaaccagttcattctgaaggagatcagccctgggatttctttggaaggaatgatgctaaggttgaaactccagtacttcggccacctcatgcaaagagttgactcattggaaaagactctgatgctgggagggattgggggcaggaggagaaggggacgacagaggacgagatggctggatggcatcacggactcgatggacgtgagtctgagtgaactcctggagatggtgatggacagggaggcctgacgtgctgcgattcatggggttgcagagtcagacacgactgagcgagtgaactgagctgaattaacataccattataaatatatatacatcttcttacctatatatatatatacacacacacacacatatatatatatatatatatacatgtatatatatatacatcttcttaccaattgtctgttgatgcacacttggattgtttccaggtcttggctatgcatatatgtttttgaattagagttttcatctcttctatatatatgtccaagaatgggatttctggatcacattgttgtttagttgttcagtttgtctgactttttgtgaccccatagactgtagcatgcccggcttacaagtccttcaccatctcctggagcttggtcaaactcttgtccattgagtcggtgatgccttccaatcatctcatcctctgtcgtccccttttcctcctgccttcagacttttccagcataagggtctttcctaatgaatcagctcttcatatcaggtggccaaatattggagcttcagcttcagcatcaatccttccaatgaatattcaggtattatttcctttagaattgactaatttgatctccttgcagtccaagggactcttgagagtcttctccaacatcacagttcaaaagcatcagttcgttggtgctcagctttctttatggtccaactctcacatccatacatgactactggaaaaaccatagctttgactagatggacctttgttggcaaagtaatgtctctgctttttaattcgctgtctaggcttgttataggttttattctaaggagcaaatgtcttttaatttcatggctgctgtcaccatctgcaatgattttggagcccaagaaaatgaagtttgtcagtgtttccactgtttctccatctatttgccgtgaagtgataggaccagaaccatgatctttgaatgttgagttttaagcctactttttcactctcctctttcaccttcatcaagaggctctttagttcctctttgctttctgccataagggtagtgtcatctgcatatctgagtttattgatattttttccaacagtcttgattccagcttgtgcttcatccagcctgacattttgcattatgtactctgcatataagttaaataagcagggtgacaatatacagcctttacatacccctttcccaattttgatccagtccattttcccatgtacagatctaactcttgcttcttgacatgcatacagatttcttaggaggagggtaaggtgatctagtattcccatctcttgaataattttccacagtttgttgtgatccacagaatcaaagattttagcatagtcaatgaagcagaagtatatatttttctggaattctcttgctttttctatgattcaacagatgttggcaatttgatatctattagcttcttatatagtctggatattaactctttgtcagttgtttcatttgcaattattttctcctgttctgagggttgtctttcagtcttgctaattgttaccttcattgtgcagttcttatatttaattaagttccttttgtttatttctgtttttatttccattttctaggagtggatcaaagaggaacttgccgtgatgtatatcagagtgtactgcctatgttttttttttttaagagatttatagtgtccagccttatatttaagcctttagcccattttgagtttatctttgtgtgtggaattaggaggtgttctagtttcatcctttcacgtgcagctatccagttatcccataccacttattgaagaggctgtctctctccattgtatattcttgacttctttgtcaaaagtaaggtacctgggactaagtttatctccgggctttctatcttgttcaggtggtctatatttctgtttttgtggcagtaccatactgtcatgatgactgtagctttgtagtataatctggtgagaaaggtagattcctccatcttcattcttctttatcaagattgctttggctattcgagttttttgtgcttccatacaaattgtgaaattttttgttctagttctgtgaagaataccattagtaatttgatagggatcacactgtatctgtagatagcattttgtagtatatatagttattttcacaaccttgtatgttgattccaaccttgtatattgattcttccaacattgtatatctctccatttgtttatggtgtgttgatctctttcatcagtgtcttagagttttctgcatacagaacttttgtctctttaggtaggtttatttctgggtattttattcttttggttgcagaggtgcataggattgcttccttaatttcactttctgatttttcattgttagtatataggaatgcaagggatttctgtgtattaattttatatcctatgattttataatatttattaattctagtaattttctggtggcatcattatggttttcaatgtagaaaatcatgtcatttgcaatcaatgagagttatacttcatttccaatctggattccttttatttcttttcttctctgattgctgtggctaggacttccaaaactatgttgaataaaagtggtgagaataggcacccttgtcttgtttttgattatggaggacatgctttttgatcttttaccattgaagataattgttgctgtaggttcactgtatatgggttttatgatgttggggtatgttccttctatgcctactttctggaaagcttctttaagaaatgagtgttgaattttgtcaaaggctttctctgcatctattgagatgatcatattatttttatctttcaatgttaatatggtacatcagatagcatatactgaagaatccatgcatctctgggataaagccctcttgatcatcttgttaatgtgttgttggattctgtttactggaattttgttgaggatttttatatcaatgttcatcagtgctattggcctgtaattttctttttttgtggcatctttgtttagttttgatattagggttatggtggccttgtagaatgagtttgggagttttccttcttctgcaattttctggaacagtttgagcaggatagatgcctgtcaagccatctagccctgggattttgttgaaaggtttttgattttagttttgatttccgtgtttctgattggtctattcatattttctatttctttggttcagttttagaagcttctacttttctaagaatttgtccatttttccaggttgtccatattattggcatatcgttgctcatactagtctcttgtgagccttggtatttctgtgttttctgttgtaacttttccttttgaatttctgattttattgatttgagtcttctcccttttgatgggtctggttaacagtttgtcaattttatcttctcagaaagccagtttttagttttattgatctttgctattgtctccttcatttatttctgctctgattctttatgatttctttccttctactaactttggattattattattatttttgttctttttctagttgctttaggtgtaagattagcttgtttatttgatatttcttatttcttgaggtattcttgtattgctataaacttccctcttatcactgcttttactgtgtccagtacatttgagttgtcatgttttcactgtcttttgcttctatccatattttgatttcctttttgatttcttcagtgacctgttggttattcagagaagtattatttagcctccatgtgttttttttttttaatagatttttcttctgttgtttttatctaatcttatagtgttgtggtcagaaaagatgattagaattatttcaaattttaaaagtttaccatggcttgatttgtggcccaagatgtgatctatgctggagaatgttccacttgcaattgagaaaaagtgatatctattgattttggatgagatacctgtagatgtcaattggtcaaacttgtcaaatgtatcatttaaagaagaactaaagagcttcttgatgaaagtgaaagaggagagtgaaaaagttggcttaaagctcaacattcagaaaactgagatcatggcttctggtcccatcacttcatggcaaatagatgggcaaacagtggaaacagtggcagactttattttgggggactccaaaatcactacagatgatgatggacagagaggcctggtgtgctgcagtccatggggttgtaaagagttggacacaattgagcaactaaactgaactgaactctgtttaaaataagtaagcaacaatgatatattgtataatataaggaaatatagccattgtttttaataactttaactaaagagtaaaaaaaatatcgaatcactatgttgtatacctgaaactaatataatattgtaaatgagctatattcaattttaaaagttttaatattaaaagtatactggagcaaaaaaaaaaataaagcttgcatttctttattaattttctgtctggataatctgtcaattggtgtgaatggggtattagtgttaccccactattattgtgttactgttgatttaccattttaatagttgctaacattttccttatgtgctgggtgctcttattttgggtgcatgtacttaataatcattttatccttttcttgggttgatgccttgatcattatgtaatgtccttctttgtctcttgaaacaatcttttttgtaaagtctattttatctggcatgagtattgctatttccactttctgttgatttccatttgcatggaatacctttttttagatcctcactttcagtctgtatgcgtccttaggtctgggttgggtctcttgtacatagcacatatcttggttttgtatccatttatccaatctgaatcttttggtgggagtgtttagccagtttatttatatatatgattctgaatcttcccttgtggctcagactgtaaagaatctatctaaatgcaggagatctgggttgggaagatccactggagaaggcaaaggcaacccacttaagtattcttgcctgggaaatcccatggatacaggagcttggtggtctacatttcatgccattacaaacagtagcacacaactaaaaacaaattctttcaccaattactttattgttttgcatttgttttgtatgcctttcctttttgtgtttcctttctagagaagttcttttagtgtttgttgtagagctggtttggtggtgctgaattctcttaactttagcttatctggaaagcttttgatttctcctttaagtctgaatgagattcttgcttggttgtaggtttttcccttttatcactttaagtatatcctgccattcccgtccggcctgcagagtttctgttgaaagatcagttcttagctttatgggggtgttgtatgttgcttttcctttgctgctttcaatatttgttttttttgtgtgtttaatttttgttagtttgattaatacgtgttttggcatgtttctccttgggtttattctgtgtgggactctctgggcttcctggacttgggtagctatttcctttctcattgtagggaattcttttgactataatagcgtcaaatattttctcatgccctttccttttgtcttcttcttctgggacccctatgattctaatgttgttacacttaatgttgtcccagaggtctccgagactgttctcatttctttctttttttttgctccagttgttttcagcattttaccttccagttcacttattttttcttctgcttcagttactctacaattagctccctcccacccccagtgcatttctaatctcagttactgtgttgttcattgttgtttattctttaattcttttaggtctttgttaaacatttcttgtatcttcctgatctgtgcctgcagtctaagtatccatgcctccattttattttcaagattttggatcatctttactatcattactatttattatttttggtgtagactgccagtttgttttcatttgtttggtcctgtggatttttagcatgttctttcatctgctgcacctttctctgtcttttcattttgcttaatttaccatgtttggggtctcctttctgtaggctggaaggacataatttctcctaactgtggagtctgcccccatggttggggttgtaccagtgccttgtgaagatttcctggttgggagacatgcctgtgttctggtgaatggagctcaatcttgtctctgggggcagtgccatatccatagtgagttttgggggtatctatgggtttggtatggctctgggcagcctgtctattaatgtgcagagttatgttcctgttttgctgaagatttagtgtggcatctggcactgaagcttactggccttggccttagtgttgagatggaggcctttaggagagctcttgcctattaatgtttcctggggtcagaagttctctggaggatcaaaatcctggagttgagtctcccacctcaggggttcaggcctgaccccttactggaactccaagacctcacaagccacacagcatagaagaccaaaccccgagactcttgctgaaggcaacactcagcagcccagaatacccagtgagactcacaccgaagtcctccaatatttctaggaaggtctctgggcctgttgtgggcagtatgtggtcagctcagtctcagatgtggccttacttcagtttgtacttactcctaaagttcacagtttcccctaaagttcactgtctgttccctgcctatcctcaagggagcgaaggccaaggcttattgaggctcatttgttcactcaggctgagaagtggggaggacatggcagccacaatttggatgcaccagggagtgcctgtgacaatagagtcttgatggatattggtgcagtctgaggtgggttgtatgctttcccagaggaattggcttcagattatgggtccctagaaagagtcaaagtgattaagcttccagaaaggtgtggaaagtaacctgtgcctgcttataaccaggcagttttgactacctctggagtcaggactgcatcagtggtgttttgcctgctgtctcaggcactttccctaggtttggcagtggcaattgtgtttaattccacagatgacactctgactggttttgccagatttggcagacacccaaactgtctatgagtgtggtgttaagtgtcccagaaacaacaacttcttgctgctctaggatgcccagtattttctctggactctgtccgccgtgtcaaagtagccctctcagagtatcctcatggaagccaagcttgatcctttccctgagatctgacacctgagcctgtcccttggcaccctgcctccaccctctgctgcgggcggaggcgtgtgagcggcttctcagttgagaagtgctatttggcagtaatttctgtagtgaattttctctgttttgtctcctgagccccgtgccaccatcacactcccctctgaggttccaaagctccctccctgactgcctgtgaaggggtttcctagtgtccagaactttcccctccttcatgactccctcccttggggtgcaagtcccatcctgaaatcctttgtctcttttagtctttatcttttcccctatctctttctaaggagattggcttgtctttttgaaaatttggggtcttctactgttgttcagaagttgttctgtaggagctgttttatattcagatgaatttttttaatgtacttgtggggaagaaggtgatctcctcctcttattcttcctctatcttcttgcattcccgcttattgtttcttaatgttagagctgaggttattggttttcatggaaattgattcagttcaaattagtttctaatttccatttttatttctcctttgatctttggatattttattttatttttatttacatttatttattttaattggaggttaattactttacaacattgtatttgttttgccatacatcaacatgaatccgccatgggtgtacacgtgttcccaatcctgaacccccctcccacctctctccctgtaccatccctctgggtcatcccaatgcaccagccccaagcatcctgtatcctgcatcaaacctggactggcaattcacttcttatatgatattatacatgttttaatgccattctcccaaatcatcccaccctctccatctcccacagagtccaaaagtctgttctatacgtctgtgtctcttttgctgtctcgcatacagggttatcattaccatctttctaaattccatatatatgcgttagtatactgtattggtatttttctttctggcttacttcactctgtataataggttccagtttcatccacctcattagaactgattcaaatgtattctttttaatggctgagtaatactccattgtgtatatgtaccacagctttcttatccattcatctgctgatggacatctaggttgtttccatgtcctggctattataaacagtgctgcgatgaacattggggtacacatgtctttttcaattgtggtttccttggtgtgtatgcccagcagtgggattgctgggtcataaggcagttctatttgcaatttttaaaggaatctccacactgttctccatagtggctgtactagtttgcattcccaccaacagtgtaagagggttcccttctctccacaccctctccagcatttattgcttgcagatttttggatcgcagccattctgactggtgtgaagtggtacctcattgtggttttgatttgcatttctctaataatgagtgatgttgagcatcttttcatgtgtttgttagccatccgtatgtcttctttggagaaatgtctatttagttctttggcccattttttgattgggtcgtttatttttctggaattgagctgcaggagttgcttgtatatttttgagattagttgtttgtcagttgcttcatttgctattattttctcccattcggaaggctgtcttttcactttgcttatatttttctttgttgcagcaccacttgttaaagagattgtcttttctccattgtatattcttgcctcctttgtcaaagataaggtgtccatatgtgtgtggatttatctctgggctttttattttgttacattgatctatatttctgtctttgtaccagtaccatactgtcttgatgactgtggctttgtagtagagcctgaagtcaggcaggttgattcctttaattccattgatctttggatattttaaatgtctttacttgcactaaatttggcgacttctttacctaatttaatttcatgggcttcccaggtggtataatggtaaagaatctacctgccaagcaggagacatgggtttggtccctgggttgggaagatcctatggagaaggaaatggcaacccactctggtattcttgcctgagaaattccatagacagaggagcctggcaggctatagtccatggtgttgcaaagagttagacatgatttagagacaaaccaacaacaataatgtaatttcacaatggtcagagaatatattttgtaaaatttgattatttttgaatttattgaaacatgtttttattgtaaaatgtggcctattctcataaatattctactattctacttgtactagaaaagaatatgttttctgccattgttgtttggagttatgtcaatatgaccaattaggtcaagttggctgatactgttattttgatcatccatattcttgttgattttctgtccacttgttctatcagttattgagaggtatatatagaaatctttgattatgtgactgtgaatttgtctttttatctttataattctaagatttttgcgttacatatttcagaattttatttagttcagttcagtttctcagtcatgtttgactttttgtgaccctgtgaactgcagcatgccaggcatccttgtccatcatcaactcccagagtttacccaaactcaagtccattgagtcagtgatgccatccaaccatctcctcctctgtcgtccccttctcctcccaccctcaatctttcccagcatcagggtcttttcaaatgagtcagctcttcgcatcaggtggccaaagtattggagtttcagtttcaacatcagtccttccaatgaacacccaggagtgatcttctgtaggatggactggttggatctccttgcaatccaagggactctccaagagtcttcttcaacaccacagttcaaaagcatcagttcttcggtgctcagccttctttatagtccaactctcacagccatacatgactactggaaaaaccatagccttgactagacggacctttgttggcaaagtaatgtctctgctttttaatatactatctaggttggtcataactttccttccaaggagtgagcatcttttaatttcatggctgtagtcatcatctgcagtgattttggagccccaaataataaagtcagccactgtttccactgtttccccatctatttcccatgaagtgatgggaccggatgccatgatcttcgttttctgaatgttgaactttaagccaactttttcactctcctctttcactttcaccaaaaggctctttagttcttcttcactttcttccataacggtggtgtcatctgcatatctgaggttattgacatttctctcggcaatcttgattccagcttgtgcttcatatagcccaaagtttctcatgatataccgtgcatagaaggtaaataagcagggtgacaatatacagccttgacgtactccttttcctatttggaactagtctgttgtttcatgtcgttataactgttgcttcctgacctgcttacagcttgtctaactcaatgaaactaagccataccgttcggggcacccaagatggaggggtcatggtggagaggtctgacagaatgtggcccactggagaagggcatggcaaaccacttcagtattcttgccttgagaaccccatgaacagtatgaaagtgcagaaagataggacactgaatgatgaactgcccaagttgataggtccccaatatgctacttgagatcagtagagaattttattactagggtacataaacatttagggttactgggtcttcttgaagaattaacacttttgttattatgaagtgaccttccctatccatagtaatattcttgctctgaaatctaatttgatcttaatgtagcaattccagctttttattgactgttgttagtctgatgtattttttaaagtcatcctttcacttttaacatttttgtgtatatttaaagtgcatttcttgcaaataacttacagctgggtcttgctttttatctaatctgataatctgtcttttaattgatatgtttaggtcattgatatttaatttgattagtgacatggctggatttaattgtatcttcatgttgcatttttctaattgtgattttatttataattattgaactaacttcaagtgatactatactacttaacatgaagtgtaagaatcttacaatagcttaagttaatttatcaacttctggcctcagtgtcttaccctgagacctctgaattagagctacctcctgtgagagagcaaatcccacatggtaatgtctttgcctgaggttgatcgagaagctcctaggggctggtggtaatcagagaggcagagataaggcatctgatactgtgtcctggtcagggccagtcagccaaaagcaacagctaaaacttatacaatgggaacaaatctcacaatggcacacaccatttgaggatcttgagtcttccctaaagatctttgcgggtcatgaggaaccactggatatttgaaagaagaaacctatgtaactatctgtcatttatcttcttagattgatcagcctagatagtattatcctcttagaagacaggtaaataggaagatagagtccttgtttctatatatcaatctaactgaatttatctatcaatagattaatatatagaaagtttctgtagatgacagatagattgatagaacaagcagtgttttaagattaatcagtggtgggtctcttccctggtggctaagaggttaaagagtttgcttctaatgtgggagacctgggttagatccctgggtcaggaagatgccctggagaaggaaatgacaacccattccagtattcttgcctggagaatgccatggacggaggagcctggtgggctacagtccatggggtcgcaaagagtcagacatgactgagcgacttaactaactaagtggtgggttggtaagaagtggcttcagtcaaagtttactgagagcaatcagaattggcaaatgtgcggagatgaaacctggataacctggtgaactgaggcaggaacaagtggatcctgcaagatccatatcattatattcggaactgctcccatggctcagtactgttcatttgtaatgtatcttatttctctgtcctgttggaggcctgtccctataatgtcaaattcattctctcctttagcatctagcatcctgtctggcacttattgcatgttcaatgcagaaatgtagaggagaatgtcattgataggaccaaaatgacatttcaggttcatgtacctggaagattaatgatgtcatataaaaactaagaaagagggaagagagtttcatgggggcagatggaaggcttatctgtgaatcttatagcacaagggtcagaggacaacatcaagtagctgattgggatcatagtcttggagctcagcagagacgggatggggaaatggtggtggagatgcacagtaagcctgggaactaaggagtgaatacttggccaaactgagctctgggtgcaggcagtgagctcccttttccttggcaaaatgtttcttaaccaaattttcccatgatcagtgacatatttatttcattttccaactaggagaacaaaagtggactagctgagcataaacccattgggtgatctggggagagtaacccatcctgttcaatttgatgggttagaaggcatctggactctgggtgtgtgtgaggggttgaagctgccactggaaaagacaactgcagaaaggagccctggggacctggaaggccagattcagtttctacttctgcaaacacagagatggagagggtgccataggctggcctgggaaaaaaagttgttgggtactagctttgatatgcctattcaagaattttttcttaacacaaagagttgaaattatattacttcacatccactgtaatttttcaaagtcagctttgtcttctgtttccatcataataacatgaaagctaagaaaccactcttctggtttggtccctgaatatctgcatcacgaatgcatgtttcctcttcttagaggatacagaggggagtaggtgttgacatgtgaagttgcaggatactgaagcctcaacttttctttcctgcagaactgaagcatgagatccatgtctggcgtcttactgcacagcacatcagcccagccagcagggaggagacagcagttcgaggtatgctcctggggaaggtgctgacactggagcgcctgctggcccagaggctacacagcttccacaggtaccaagccagaccctgctaagaccacttttggtttacaactttggtcctcatctttaccaagtatgctcaatggttgaatcgtcgataacctttatatgaccaccctaagagtgttcaaatgtcaacagcaaaatgtgagctaaaatgattttgtagagtagtccatggttctgcaaaacagtaacactaactgcaggctactaggtaggttttgggcaccatacactgtgttaagcctgttatggtgcatgattttatttaaccctcacttagctctctggaatgtgtgctgatattagtcccagtttaaggatgaggaaactgagggtcagaaaatttgaacaacttgcccaggttatacatctagaaaagagtgatgcctgggattgagttcacatgcctgtcacatttcacacctaacacgttgcataacaagaacaaaaaaacaatttaacaaattaatctaatgaaatgttctcccagtagcttattttcagggggctcaaagaatacctaagtttaattcatttcttggagtttgttggtttgtttggccttgccaagtggcacgtggaatcttagttccccagccagggattgaacttttgcccctgaattggaagcatggagtcctaactactggaccacaagttaaatcccttgaatttatttttaatcagagctgagatctaatgggtaacaatgaggtgccgaatctttcctcctcacttggatgagatgctgagttccaaactgtctttattccggaagtactgccaggaagtgcaaaagcctgctcaaccttcagaaatgtagaagcagtcccgcagcaggatcaggtactgggtggagatgaggtctgtcacagcaaggggaactgtgagtccttgtgaagatagtgagaatgatcttacatgtggcaatttggtgagaccagccctgtgttcccagagagtaggcaagagtctgaggacaggagctggtacggtgccaggaccaaccttttaggcccatctagagtggttgcagctgattctcggttttggggtgagaattccacaggtgagtatgtggagattcactctgtccagaaatgaagcccagggagaagctctgtctcagcatccttagctctatctcagcccagaacctacctgtaccttgtggcactggagaaccagtacctggtatctccaggttacaggaaggccctgagttgctgactggggacagagtggccaacttcagcaacaggcctagatcttaaaaggtaaaactttgtgaattaaagatgcagcagtaagtttctctgaatgtattaaatttcctgaccttcaatttcttcatgctccttctgacatgggcattaagacatagtcagtgtatctcagggctaaaatgggaagagacatgtggactcagagattcaccaagcttgcatcaactcatcttattttgatctcagaaagggaaaccgagacgcagagactgcagtggcctttctaaggccacacagtcactgagaagcaaatagtagtgagggtgatctaagtcatgtacttgctctacaggtcttatttctacattttatttttaaaaatttccttagaaccattcagttgggtcagctgtgatttcctctagggtttatatgggctgcatggtcaacctccattaatacgatgacacatgagagctcatgaagactaaattctcccccacaaatctttttcctcattgatgagagaggaaataaagcagaaagatgagttgataggaaaggttagaaaagaaaggtaagtgggaacagatagaagtgactgaaatagaaatggagataaggtgggtaccatgactagaggggagtggaacagacacaagtgcttcagggtagatttccaattgatagaaatcaccactaaagcaagtggcacttcttttactgttttctcctttaattaaattataacacagcctcattttgaaaaaaaaatcagaaaattcagaagcaaaaagagatgacttactgtctcattccctgtcacttcagttgtgtccaactctgtgtgaccctatggactatatctgccacgctcctctgtccatggggattctccaagcaagaacactgaagtgtgttgccatgtccttctccaggggattgttcaaccagggatcgaacccaggtctcctgcattacaggtggattcttttccatctgagccattatggaaacctgcctatttacatttaggccattattctgatgtttcctgtgctgtactcatacatacctcattgaacagtctggtcattgcatgtgttactttccttgggaatcttttgagtgagcatctttcctagtccatgaacccagccttactgggtgccttatatgacaagagctgctccattctatggctgcacctggtatcatgcagtggacagcatccaggccaggggatcatgctgtgtgctactgctgactgccatcctgctggcctcactgctcaatgccagaaggaaaatgatgtctgcacttttctcttttagacagatctcacaggaagataaaaattgggagaccaatatccaggagctacaaagaaaggtattatggtttcttttcttagggatttcttgaagaacagagtaaattcctttccttttcttcatgtgaagttgcaacttaaagtcacctctcttttattcctgtaattgtacataagacatagctatttatttgagttaatgggaaagataattttccagacatggtaagcttattatattttatataataagctttttatatttcctttaagatagggcaacgctttctgtggttaatgtggatgtagggaaggatggctggctctcggctccacctgaccttgaaaggcaagtctgtgtttcccattgtgcaggttaagaggtggaagcctagacaagagaggcatggtgcttgagacagaacacttttgtgggtagaaatggagtgtatgtcttctgttgtacagctctgacttggggaggcaaatgttattttgagttcttttgtcatttttccttggtggaatttctcaacccacctgaggacacatagtgcccctcttccactaagagagctctgcccaagatctgctggaagtaatttgtaatatcttcatgaaatttcaaatccaggtggtttgtttcctagggagaggtaaaatatcctttccctagttatgataggaacatttgatcctttgctaaacaaaatttaaacgttgggacctgtagctaacatgttccttgagtctctcctcccatcatttgtcctactcagatggtcaggattagggaaggcaggtgtggctatgacacttttctggcctcaggtttaaacagaccctgtgtggttcttgccacaagttagggatgagactacttctgtgtgtacctggtgaacaaggactggagagctaccctcattatttctcaaacttttcattgtgatggccccaggtaatcaaatggtaaaatttgattgatatcccaaaataacaaagcacaaacttttgattatcttataccagctgaatgacactgacttccctgatcccttatttcctgtattgaagttggcatgggaatacccagtttctatggttagcttggcccagtgagatgccaggctcctgtcctcctgattctgcatcatagactcatttagcaaaattggcttccttggagggtgaatggaaagatgagttggggccagccaagctgcaattcttggcagtaggtggacaaggaagatagtggctcctaaggcaacccctaagcccatgaccagggggctagaatctgctgccaaagcacctgtgacagagggatatgcttatgattttttgtggtagcagctttaactgtgaccacagggaatcaagagaggaaatctatctctgtctctgtctatacccatacttacactcaagtctgtgtctgtccatgtccatgtctatacccttgtctatactcatttctgtgtctatatctatctctatatctttttctatggccatatcttatgcatagctctgtctgtatctacctataccaagatctgtatcaataaccttatttatatttacacctagacttggatatcctaggcatagaccaacaacagaggtgctgctgggaccacactgaagaaaatacacaatgcagttgttggttcacacggtgaagtgtgattcacattgggacctggttagatgtgccttgtgtacaagcgtctgtgtctgcttgttgggaccttactccctgccccagttccacacagccatggctctcagagcacagagccctttgggaaccttgccctgtcttgccctgtggctcaggctcactggaaggaggtcttcaattccaaagctaatgaaggtgctacagtgcacttccccttacccccggaatcctggaagcaggatccatatgtgtcatttggtgactaggcgactgctaagtgcattcaacagtagtccagttattgaaagaatattttaacctcagtgccaggtgaatggggctttgcataataaacagaaaggtgaactaaaagactatgaacacataaaacctgtggacatgcatgtgtcttgaagggacaagtctttggaggttatgtgttggctccccaatggctttatctcatctaatgctggcagtgggactgggaacagcttagcatctctgtgtcatattgaaaaatctatttagtcatgtgtcatataaaagggttttactatattttaaatttattgtgttaattgttcatagattttgatttcaagattctgtaatgtggcagtcttgaatctgttacccatgaatttatcatctttcaagttcaagatgttttatatttcatcataaggagaaatttgtagtgattcaaatcacataggattgtggacacactgcagaaattaggttgcattgagtacatgagttgtgttttcctctcttacagcacaggatatcagataagactctgctcgccaaatgcctgacagtgttggtatttgttatcttcatgttttttctcaattcatttgtccctggtgttcatcttgatcttggtgagtctaattttttgcttagcttttgttgatgggtttttcaagtgatatcacaatctggaaggtttcaaagcttgtttgcagacattggtgagggctgagagggatagttttctggaggagaggaagaggaggaggaaagtagagagagacatcttagtgccatgggtcctcagctcctctaggttgaacattagaagggatagagagcaaggtggatagcatcatctctatcataattaataattggatctgatcttcaaattgttacctcagaagcacctccagaaaagataagaggttatttcagcaaggccacagtcctgcagattgtacaacccaatctgatgattaaattagagactgttagtgaaagggctagagaattataagaagtctacattggtccctctccttactcgaaggtgcatccatttctcctgtgcatcagaactttgatctcccacctgctcctgtgagtttctcttctcttgctttcacaatcctatggctctcactttgtactttcttaaggtctaggttgcatggcccatctccacctgacacatggccatcttgcagaatgaactcaccagatatcttgtttaccctagcattcttccactgtccattaacgtttttcatgcttcttagatctttctaattgatttgatagttatctctattgcctattgtatctttatttaaaacaaaataaaaccatttccaaaactcccctcaaataaaatttttacctatgggtttccttcaaaaattagctcttctaaaatgtttttataaagtttaattactacaacatttgaagaatataacttctgtagaaagcaagaactcttaactgtgtaaaatagatgaatatcatgggaagactagttattcaaaccacagcattgctcctttggttcttggctaccactaagactctttatatctctaaagattaaacaaatactacaaaactggtagtttgtgggcaggattccattagctaattcttcaggtgttcacagattattttgtctcttttccttttttcttcatgttcgcaaaatttactaagcttgaaggaaagttattgtctcagctacagaagctgtcaaatttaaacaggttgtaaaactctatttaaactttactgtcataccttcaattgttttcttacaatttttaattaaagtatagttgaattacaatgtaatattactgctgtagagcaaagtgactcaattttacatatatatatatatatatatatatatatatatatatagttttttcattttattttccattatagtttttcacaggatattgaatatcattgcctgggcaatacagtaggatattgttttgtttctaattttgtttgagatcctattttaaaagaacacatcatgcattttaaagacattgcagcactgtttataatagccaggacatggaaacaacctagatgtccatcagcagatgaatggataagaaagctgtggtacatatacacaatggagtattacacagccattaaaaagaatacatttgaatcagttctaatgaaatggatgaaactggagccgattatacagagtgaagtaagccagaaagaaaaacactaatacagtatactgacacatatatatggaatttaggaagatggtaatgatgaccttgtatgcgagacagcaaaagagacacagatatatagaacggacttttggactctgagggagagggagagggtgggatgatttgggagaatggcattgaaacatgtatactatcatgtaagaaagaattgccaggctatgttcgatacaggatacaggatgcttggggctggtgcacggggatgatccagagagatgatatggggtgggaggtgggagggggattcaggattgggagctcatatacaatcgtggtggattcatgtcaatgtatggcaaagccaatacagtactgtaaagtaaaataaagtaaaaataaaattaaaaaaatattttaaacataaaaaaactgaaaaaaataaaaaataaagactgaaaaaatatattgaatttgcatgtatttttgttaaatttgacagtggtataaataacaatactttaaaaacttagtcacatcttttaccatatttatgagattgaagggtttgtttctgcttttaaatcttatgtttttggattgtggataaattattttatctggggattctagaatacataatctgtatatttgcaaaatacataatctgtatatttgcatgttcgctgaaacaggaaagaggttgacccggagaaaagtttgattagcaaatatttaaaatggaatacagttttcttagagttttagtaactctcttggtgggaacagagacaattaatacagaatcttcccagggcttcagtggacagatcatttgtccttggtgaagtgctgtattgaacatgacatgctgggtaagttgaagcataatacaaggtaatgccatgtaacatgaggtactatcacattacacaatgtatatcatataacatgtgacatcatataacacaatgtgatggcacatgacaaggtggtatcacataaggtgtacctttaacacagtgtgatatcacataatacaatgtggtgtcatataacactgtgtcatgtcatgtaataaagcatgacatcatataacacattcctttatttaaacatcataacctaaactcaacagtgattatcattctctttttctcgctaattctattttttaaattatcatagagaaaaattgatttttcttttcaaattcaaaattctatgaactttaacaaagatgtatatttatgtaactgccactataatcagaatacagaatagttctatcaccctccaaaatttctttgtattattcttttgtatcacccgttgccttaatcctggtgattcatcatatgttctccatcaccatatttttgtcttttgttgaatgtcatacacatggactcagacaacctttgggactgacttttctctttcatattcatccatgttattgtgggtatcaatagttcattctttttgtttgtgagtattcttccatggtatggagataccagtttgtttatctactggcccattgaaggacatttgggttgtttctagtttttggtaattgtgagtaaagctacttcaaacatacatgtacatggttttgtgtaaacttaagttttcatttctcttgggtaattacttaagagtgggacttctggatcatattgtgagtgtgtgtttagtcttaaaagcaactgctgcaccaatttccagagtgactgtagtactttgcactttcacagtagtgtatgggaattacagcagctctatatcttcattagcactcggaggaggtgatgtagactacatcttttttttttttttttggagcaaatatattttattggagaggtataatgagttttctgatcctttcaaattagaaataacaagttgtaggagatatttacaaaaaattattgtgttttatttatttatttatttttatagttttttttttaaattttatttttactttattttactttacaatactgtattggttttgccatacattgacatgaatccaccacgagtgtatacaagctcccaatcctgaatccccctcccacctcccacactgtggtagattcatgttgatgtatggcaaaaccaatacaatattgtaaagtaattagcatccaattaaaataaataaatttaaattaaaaaaatagactatatcttaaatctagaactcatgtgttattataatctttgtttacctccctgtcccctggtatcccctaccctagctagattcaagggtatggtccatgccatctaagcttttctctactcagtgccttgtgttaatgcctggcacaatagtagatataagttaatatgatgtatgtacaaacttcttattcttatagattccaatttcattattgtgagaatttcatgtgtggttgactcatccttggctatctagggagcaaaagcctcttgtggggattcttcattggggaaatgataccagggaagagaagtaaggggcagagaagaagagtagtgaaaggagtgagtcaaaacaaggctgaatcattatctgaccacattatgggtccataggattatctgagaagaaatatgagatgtgtctcaggactgtccatgggattgtagcattacccattggtgcccatcatccattagtccaagttctttcctatggaacaccaacttacatgtacatgtagctaataaattcatgaaggacatgcaacagaggagcccctgctgggaagcaggtgttggtacatggattcaggggcagacttggtcagggtacagctaagtatgagaggatatttactctctggccaccgccacagatttccagtgagtgacaggagaaccccaaaggtatgcaagaagtggacaataatgaagaaagaaaagctcatggtcacaattcatatgtacctggcaaacaaatagttccctaatatacaagtattttttatctgttaagacacactggaattaattccagattggtcaagcagttatgcagagatacattggcattaactccagattactcaagcagttatgcagagactccacatgaagttcttgggtgccagatatgtttcaaaattctgattttttgtttatattttacaaagccatgagcacacactgaattgtatatattaataacacccctgaggggttcagggctggcaccctgtccttcaagggttaataattctgtagtgaaacttgaatattttctacaaatgggataaattatgaccacaaatagcctcatttcagttcaaatcagattttgttgtatgttgacataaaatgtaaaaaatttgctttcccaaactttaggattctaaaatctaaattctaaaattgtggatcagttcagttcagttcagttgctcagtggtgtcagactctttgcgaccccatgaattgcagcacgccaggcctccctgtccataaccaactcctggagttcactcagactcacatgcttcaagtcagtcagtgatgccatccagccatctcatcctctgtcgtccccttctcctcttgcccccaatccctcccagcatcagagtctttttccaatgagtcaactcttctcatgaggtggccgaagtattggagtttcagctttagcatcattccttccaaagaacacccaggactgatctttagaatggactggttggatctccttgcagtccaagggactctcaagagtcttctccaataacacaattcagaagcatcaattcttcggcgctcagctttcttcacagtccagttctcacatccacacatgaccactggaaaaaccttgactggaaagccttgactagacggacctttgttggcaaagtaatgtctctgcttttcaatatgcctctgcttttcaattttcaacactttattctcttgactagacggacctttgttggcacagtaatgtctctgcttttcaatatgcctctgcttttcaattttcaacactttattctcttctaattttcttgtctttttttttttttttttgctcttggcagaatggagatgatctcattagtttcccaaattataggatctcaatttcaaccacgtagagcaaaaagtctattttgaatccaaaattccctggtgaagactttgtttgacccaggttggattaatttccttccctaatccagaaattatcaccaggataaccagggggcacatagaaattatggccaatcaatttaaaaggaaagtacaattgaatattaaaaaatttataaattaagtgaaagaaaatggataggaatcatcaatagactcttcaaaaaagagaatattaaaataactgagattaccaataagcatatgaaaaagtgcttaaccttattagtcatcagtaaaatgtgaatctaaaccacataaagatatggatatatctacatctaaatggctaaaatcaaagtctgacagtaccaaatattagataacgtagagccacaggaagtgtcataagctgttaataaaacagtaaatttgtacaaacttttgaaaacaatttgtcagcgtctataatactaaagtttagtaaagcccagaaaatttgttcttagttatatgcccaacaaaaatatgtatgtatgaacaacaaaagacatgtattaaaatgctcataacagcattatttatattaataatatacccaagctggaagtcattcacatatctatcaactctagacctgataaagaaattgtggaataatcatacaatggaatactccacagaataaaaacaaatgtattactgaaactgtaacaatgtgactgaatctcacaaacatgttgaacaaaagagaaatctgatagaaattcatatgtagcatgtgattccatgtatgaagactcagaaacaggcaaatgtacttcttggggtgttaggaatgatgcattgaagggagagtataaggaatggaaggagatctaattgggcttttggtatattgatagtgtcctctttcttgtcctgatgggaggaggttacattgttgagtttcctctgtaactgagctatgtggtttatttaaaattgatgcacctttatgtatgcatgctatagttcaactaaaatgtttataacataatttaatgaatatattcactgtatccttcagatggcatagtcaaacttggtggtggtggtttagtcactgagtgtgtctgactcttgaaaccccctggaccgtagcccaccaggctcctctgtccatggaatttcccaggcaagaatactggagtgggttactatttccttctgagtgaactcactattgggcaagatggaggaatctgtgaggggtacagtggtatccaggccagtgtttttgtgtatatgggtgtatgtgtgtgtgtgtgagagagagcatctttctaggaactagaaggatgcaatgacaaagccaccttgacaagagctgtgttgaccttcagtgagaggactctgtagggaatagtccaaaataatgaatgctgtgaatcctcatgcccagattccatctcctgctgtgcctctccttagcagaacatacctggaaacctgggtatgacaacctcttgatgtaatccctgcagaaagggagcaagagaggatggaggggaatgaagaggggcaggcaactcagcagggtcctgtccacttacattttcccatcagtattgattgaaagcttagttgcagcaaaatgattagaaatagaatcacttacttttaaattgcctttatttttttcaatctcaattatttaaaaactgctgacactacaatcatggtgtttcctaagcctgattgggagccacacagaagtttccaggtgttgtaatggagccacaagcttcacgctgagctttgacatcaaagctgctgctgaatgtttgtggccacatccctagatcgagtagggagagggcagaactaaggccaggttaccctggctcaaagcatagctctagtacttacggtttttcttttcattattattattttaaaattttatttgcgggtgtttgaggcccttgggcacctgcagggtgcctcagtgctctctgtaaggatgctgtgaggactgaatcacctcatgcaggcagaagtcttagaaacagtgcacctggtgctggattaagtgtgatgtgaatgaacagtttatgctgattgctaagtaactcaggaaaatacaagatgatgaaaaatggccttgcttttgctggattttaaagggaaactagacagaataggactgttctcatgagagggcacctttcagactatatgtacaggtaatgacatgcttcctccttttggtctcaggccctttgtgtgttagtagaccttaactccttggtgactctcctcattgtcaccttcgaatctaactcatcccatgctacctgtactacttgcctaaccaactatgtactgggagctccctaagagcaggcttaagcttataccctggaagtttaatgcttgagtgaatgacaggtttagtggtagatttaaaactaccccctggacactcatagtgtttcttttcaactgaaattccttaattatatgtgataaatcttatgttgtctattttaggtagtcaatggccaacacaatttagtgatacatcaccaaaggaggcagacagggtggtttgtactctatacagtatgtacagtccattcacgagtttctctggtttgaaggatgaacatgaggtatgtaactgttgagatattctctagagatgcatcctgagtggcttaagactataggttatctcatcataacttgaggtagtggattcatcagaacagtattgtttataaccaaaggcacttgaaaaatgttcagagccagactagctacagtatgttttttttttttttttaaataagactacaaggtttcagatagaacatagtcaaatagtatctctgagcacatgagacaagatcacctttggggaagaggtttcaccagtgattttaagtagtgaaaacatctaattttggttacaaaagcaaacctcaatatatgttatatgttagaaaggaaaaaaaaactgagtgcatgagaagagtgtaccttggtgcaagggaaagacattctcacagattggctgaattttgattttgcccccaacaagctatgtggcctgaagaaaacgtgttaattattgggagcttcagggtttcctcatgagcagggctgctacaaggtgaccagaatgtctgtgccaaggaggctgcttagtgaatggtagaagtcttgttctgctctactctgaatcgtattgcccaggtctttaggaacagggataaagtcacctacttagctccttgttttgcactgaagcttgactctataggaaatttgagtgagaaagtacagaaccacttagcatagattctgctttaaggaatggcagagctcttgatgaaagattaatgcccaaggagggggttgatagaaaagcaacaggataaagatagcccaggtaaatgttactttttatctttagccatttctacccaaccaaacttttaattttaggtgtctcaatggtacattgttagaatttgtagtagaatgtgaagctgaaaattgtattgttcttattagcagtcttatcttccaacatgctataaaagggataccactgactacctatcattgaggagctatctctgagtgagaacagaatgaaatgttactgacagtggcctggggggacacattagaaagtgctgcttggattcctcagtgaaggcactaattgccaatcagatgtacttatgcacaggcagtttgaaaggtaggtgctctagagaatttagagcaactttgttaggtagacaaagctgcatacatggaaaaatcgggcattccagctactttgcttagaaaacttcagtgatttctttctgtagaataaggtcctacctcctttggaaaataatagtgcccttcccaatcaggaaatctttcttttattatggtacaaaatacacatcacaaagtttgtcatttgatctatttgttttaaattttatttaaaaaattttttatttttacttaattttactttacaatactgtattggttttgccatacattgacatgaatccgccacgggtgtacatgagttcccaaacatgaacccccctcccacctcccaccccatatcatctctctggatcatccccgtgcaccagccccaagcatcctgtatcctgtatcgaacatagcctggctattcgtttcttacatgatagtatacatgtatcaatgccattctcccaaatcatctcaccctctccctctccctcagagtccaaaagtccgttctatatatctgtgtctcttttgctgtctcgcatacagggtcatcattaccatctttttaaattccatatatatgtgtcagtatactgtattagtgtttttctttctggcttacttcactctgtataatcggctctagtttcatccatttcattagaactgattcaaatgtattctttttaatggctgagtaatactccattgtgtatatgtaccatggctttcttatccattcatctgctgatggacatctaggttgtttccatgtcctggctattataaatagtgctgtgaaaaacattggggtacatgtgtctcttccagttctggtttccttagtgtgtatgcccagcagtggaattgctgggtcataaggcagttctatttgcaatttttaaaggaatctccacactgttctccatagaggctgtactagtttgcattcccaccaacagtgtaagagggttcccttttctccacaccctctccagcatttattgcttgtagacttttggattgcagccattctgactggtgtgaagtggtacctcactgtggtcttgatttgcatttctctaataatgagtgatgttgagcatcttttcatgtgtttgttagccatctctatgtcttctttggagaaatgtctatttagttttttgtcctattttttgattgggtcatttatttttctggaattgagctgcaggagttgcttgtacatttttgagattagttgtttgtcagttgcttcatttgctattattttctcccattcggaaggctgtcttttcaccttgcttatattttcctttgttgtgcagaagcttttaattttaattagatctcatttgtttatttttgcttttatttccaatattctgggaggtgggtcatagaggatcctgctgtgatttatgtcggagagtgttttgcctatgttttcctctagttggtcttacatttagatctttaatccattttgagtttatctttgtgtgtggtgttagaaagtgttctagtttcattcttttacaagtggttgaccagttttcccagcaccacttgttaaagagattgtctttactccattgtatattcttgcctcctttgtcaaagataaggtgtccataggtgtgtggattcatctctgggctttctgttttgttccattgatctatatttctgtctttgtgccagtaccatactgtcttgatgactgtggctttgtagtagagcctgaagtcaggcaagttgattcttccagttccattcttctttctcaagattgctttggctattcgaggtattttgtatttccatacaaatcttgaaattatttgttctagttctgtgaaaaataccgctggtagcttgatagggattgtattgaatctgtagattgctttgggtagtatactcattttaactatgttgattcttccaatccttgaacatggtatatttctccatctattagtgtcctctttgatttctttcatcagtgttttatagttttctatatataggtctttagtttctttaggtagatatattcctaagtattttattctttttgttgcaatggtgaatggaattgtttccttaatttctttttctactttctctttattagtgtataggaatgcaaggtatttctgtgtgttgattttatatcctgcaactttactatattcattaattacctctagtaattttctggtagagtctttagggttttctatgtagaggatcatgtcatctgcaaacagtgagcattttacttcttcttttccaatttggattccttttatttctttttctgctctgattgctgtggccaaaacttccagaactatgttgaatagtagcggtgaatgtgggcacccttgtcttgttcctgactttggggaaatgctttcgatttttcaccattgaggataatgtttgctgtgggtttgtcatatatagcttttattatgttgaggtatgttccttctattcctgctttctggagagtttttatcataaatggatgttgaattttgtcaaaggccttctctgcatctattgagataatcatatggcttttatttttcaatttgttaatgtggtgaattacattgattgatttgtggatattgaattatccttgcatccctgggataaagcccacttggtcatggtgtatgatctttttaatgtgttgttggattctgattgctagaattttgttgaggattttttcatctatgttcatcagtgatattgacctgtagttttctttttttgtggcacctttgtcaggttttggtattagggtgatggtggcctcatagaaacaaatgaaaatgaaaacacaacaactcaaaacctgtggcacactataaaagcagtgctaagaggaaagttcatagcaatacaggcatacctcaagaaacaagaaaaaagtcaaataaataacctaactctacacctaaagcaactagaaaaggaagaaatggagaaccccagagttagcagaaggaaagaaatcttaaaaaattagggcagaaataaatgcaaaagaaacaaaagagaccatagcaaaaataaacaaagccaaaagcttttctttgaaaggataaataaaattgacagaccattagccagactcatcaagaaccaaagaaagaaaaattgaatcaataaaattagaaatgaaaatggagagatcacaacagacaacacagaaatacaatggatcataagagactactatcagcaattatatgccaataaaatggacaacgtggaagaaatggacaaattcttcaaaaagtacaactttccaaaactgaaccaggaagaaatagaaaatcttaacagacccatcactagcacggaaattgaaactataatcagaaatcttcgagcaaacaaaagcccaagtccagatggcttcacagctgaattctaccaaatatttcaagaagagcaaacacctatcctactcaaactcttccatatgacctattttaagagtacagttcagaagtgctaattacattcacaatgttatttaaccattgctgttcagttcagtacagtcactcagtcgtgtccgactctttgtgaccccatgaattagagcacgccaggcgtccctgtccatcaccatctccctgagttcactcagagttgcgtccatcgagtcaatgatgccatccagccatctcatcctgggtcgtccccttctcctcctgcccccaatccctcccagcatcagagtcttttccaatgagtcaactctttgcatgagttggccaaagtactggagtttcagctttagcatcattccttccaaagaaatcccagggttgacctccttcagaatggactggttggatctccttgcagtgcaagggactctcaagagtcttctccaacaccacagttcaaaagcatcaattctttggtgctcatccttcttcacagtccaagtctcacatccatatatgactactggagaaaccatagccttgactagacagaccttagtcggcaaagtaatgtctctgcttttgaatatgctatctaggttggtcataacttttcttccaaagagtaagtgtctttgaatttcatggccgcagtcaccatctgcagtgattttggagccccccaaaataaattctgacactgtttccactgtttccccatctatttccaatggagtgatgggaccagatgccatgatctttgtttcttgaatgttgagctctaagccaactttttcactctcctctttcactttcatcaagaagctttttagttcctcttctctttctgccataaaggtggtgtcatctgcatatctgaggttactgatatttctcccggcaatcttgattccagcttgtgtttcttccagtccagtgtttctcatgatgtactctgcatataagttaaataagcagggtgacaatatacagccttgacgtactccttttcctatttggaaccagtctgttcttccatgtccagttctaactgttgcttcctggcctgcatacagatttctcaagaggcaggtcaggtgggctccaattttgccacctcctctctgatacttgctatttctacttttctgattatatctatcctagtaggtataaaatggtatctcactgtggcttagatttgcattttcctattcccatctctttcaggattttccacagtttaatgtgatccacacagtcaaaggctttggcatagtcaataaagcagaaaaagatgtttttctggaactctctttctttttccatgatccagtggatgttggcaatttgatctctggttcttctgcctttttgaaaaccagcttgaacatcaggaatttcatggttcacgtattgctgaagcctggcttggagaattttgaacattactttactagcgtgtgagatgagtgcaattgttcggtagtttgagcattctttggcatttcctttctttgggattggaatgaaaactgaccttttccagtcctgtggctaccacagtttatttaaaaattttttcatcacctcagatagaaactttgtaaccattaagcagtaattcctcattctcttcccctcagccctcagctcttggtaccctctaatctgcctcttgtctctatgaatttgtgcattctacatatttcatataagtggaatcataaaataattgttctttttgtctgatttatgtcagttagaatagtgttttcatggttcactgacactatcgcatgtatccaaacttcattctttttatggataaataatattctgttgtatgtatataccatattttgtttatatgtatatctgtcgatggacatttgggtttttccagattttgactgatgtgaagtccccaatttaatttccttttgagtatatgcctgagaatagaattgctgggtcatatgtttagctttttgacaatctggaactattttccacagcaatttcactgttttacattccaactagaaaaatataagggctccaatttttccacctcctctctgatacttgctatttctactttctctgattataactatcctagtaggtgtaaaatggtgtctcactgtggcttagatttgcattttcctaaagcctttgactgtgtggatcacaatatactgtggaaaattctgaaagagatgggaataccagaccacatgacctgcctcttgagaaacctttatgcaggccagaaagcaacagttagaactggacatggaacaaaagactggttccaaataggaaaaggagtacgtcaaggctgtatattgtcaccctgcttatttaacttctatgcagagtacatcatgagaaacgctgggctggaagaaacacaagctggaatcaagattgccaggagaaatatcaataacctcagatatgcagatgacaccacctttatggcagaaagtgaagaggaactcaaaagcctcttgatgaaagtgaaagaggagaatgaaaaagttggcttaaaactcaacattcagaaaatgaagatcatggcatctggtcccatcacttcatgggaaatagatggggaaacagtggaaacagtgtcagaatttatttttttgggctccaaaatcactgcagatggtgactgcagccatgaaattaaaagatgcttactccttggaaggaaagttatgaccaacctagataacatattcaaaagcagagacagagacattactttgccaacaaaggtccgtctagtcaatgctatggtttttccagtagtcatatatggatgtgagagttggactgtgaagaaagctgagctctgaagaattgatgcttttgaactgtggtgttggagaagactcttgagtgtcccttgggctgcaaggagatccaaccagtgcattctaaaggagatcagccctgggatttctttggaaggaatgatgctaaagctgaagctccagtactttggccacctcatgcgaagagttgactcattggaaaagactctgatgctgggagggattgggggcaggaggagaatgggacaacagaggatgagatgacatgatggcatcaccgactctatggatgtgagtttgagtgaaccccggaagttggtgatggactgggaggcctggcttactacaattcatggggtcacaaagagttggacacgactgagcttctgaactgaattgaactgattaactaatgatgatgagaattaaagtaatggctactcaagaccattgcccatttttattgataaattgtgttgtctttttgttattgagttttatgtatttttatattctccttattaaaccattatcagttatatgatttgcaaatattgtctactattctataggttgtcttttcactttatgaaagtcttgtttttcaatttatttttttattgaaggataattgctttacagaattttgttcttttctgtaaaagctcaacacgaatcagccataagtatacatatatcccctcccttttgaacctccttcccatccccctccccatcccgcccctccaggttgatacagaaccctgtttgagtttcctgagccataccacaaattcccattggctatctaattccatatattaatataagtttccatgttactctttccatacatcttactctctcctcccctctccccatgtccataattctgttctctatgtctgtttctccattgtttccctttaaatcaattcttcagtaacagttttctagattctgtgtatgtgttttagaatattatatttatttttctctttctgactcacttcactctgtataataggttctagtttccttttaatggctgagtaatattccattgtgtatatgtaccacaatttctttatccatcctctgttgatggacatctaggttgcttccatgttctagctattgttaatggtgcaatgagaagtgggatacatgtgtctttttcaattttggtttcctcaggttatatgcctaggagtgagattgctgggtcatatggtttttctagtcctagtttttaaaggaatcaccatacagttgtccttagtggctgtatcaatttacattcccatgaaaagtgcaagagtgttctcttttatccacaccctcttcagcattcattgtttgtagacttttgatgagggccattctgactggtgtgaggtgatatctcattgtggttttgatttgcattcctctaataatgagcaatgttgagcatcttttcatgtgttagccatctgtaagccttcttcagagaaatatctgtttaggtctttctcccactttttgattggattgtttgtttttctggtattgagctgtatgggctgcttgtatattttggaaattaatcctttgtcagttgtttcatttgctattaatctctcccattctgagggttgtcttttcaccttgcttgtagtttcctttgctgtgcaaaagtttttaaatttaatcaggtcccacttgtttgtttttgtttttatttccattactctaggaggtgggtcatagagggtcattgctttgatttatgtaatcaggtgttctgcctatgttttcctctaagagttttatagtttctggtcttacatataggtctttaatctattttgagtttatctttgtgtatggttctaatttcactcttgtatacatagctgtccagttttctcaggatcatttattgaagaggctgtctttgccccattatatattctttcctccttcgtcaaaagtaaagtacccataggtgcatgggtttatttctgggttttctatattgttccattggtctatatttctatttttgtgccagtaccatactttctagatggttgtagctttgtagtataatctgaagccatgaaggttgattcctccttctccattcttctttctcaagactgctttggctattcagggtcttttctgtttctgtatgaattgtgaaattttttgttctagttctgtgaaaaatgccttgggtaatttgatagggattgcattgagtctgtagattgcatttggtagtatagtcagtttctcaacattgattcttctactcaggaacatggaatatctctccatctgtttatgtcatctttgatttctttcatcagtgtcttataatcttctgtgtagaattattttgtctccttaggtaagtttattcctagatatttaattctttttgttgcaatggtgaatgggattgattccttaatttctctttctgatttttcattgttagtatatagaaatgtaagtgatttgtgtgtattgattttctatcctgtaactttgctaaattcactgattagctctagtaattttctgatactatctttaggattttctatgtacaatatcatatcaactgcaaacactgagacctttacttcttttctgatctggattccttttatttctttttcttttctaagtgctctagctaggactatgttgaataatagtgataaaagtggacaaccttgtcttgttcctgatcttagggggaatgctttcagtttttcaccattgagaataatgttttctgtaggcttatcatatgtggcatttactatgttaaggtaggttcgttccttctatgcccatgttttgaagagttttaatcataaatgggtgctgaaattgtcaaaggcctttactatatctgttgagatgatcatgttttttgtctttcaatttgttaatatggtgtaccacattgattgatttgtgtatattgaagaatacttgaattcttggaataaacacaacttgatcatggggtatgagattttttgatgtgttgcagagttctgtttggtaaaattttgttgaggatttttgcatctatgttcatcagtgatattggcctgtagttttcttttttgtgttgtctttgtctggtgttggtatcagggtgatggtcgccttatagaatgagtttggaagtattacttcctctgcaattttttgagttttagaaggacttctttaaatgtttgatagaattctcttgtgaagccatctggtcctgggtttttggtttttgtgagatttttgatcacagcttcaatttcagagcttgtaattgggttgttcataatttctatttctttctggttcagtcttggaaaattgaacttttctaagaatctgtccatttcttcctggttatccattttattgccacatagtttttcataatagtctcttataattctttgtatttctgcattgtctgtcataacctctcgtttttcatttttattttgttgatttgattcttctctctttttttcttgatgaatctggctaaaggtttctcagggtttttttttttaatcttctcaaagaaccagcttttagttttattaatctttaatattgtttctttcatttctttttcatttatttctgctcagatctttatgatttccttccttctacttattttgagttttttttttttgttgttgttcttttcccagttgttttaggtgtaaagttaggttgtctatttgatgtttttcttgtttcttgaggtaggattgtattgctataaacttcccccttggaactgcttttgctgcatcacataggtattgacttgttgtgttttcattgttgtttgtttctagcaattttttgatttccctttttcttcagtaaactgttggttatttagattgtttaatctccatgtatttgcatttcttacagttttttttttcttgtaattgacatctaatctcatagtgttgtggtcggagaagatgactgatatgatctcaattttcttaaatttactgaggtttgatttgtgacccaagatgtggtctatcctggagaatgttccatgtgcacttgagaaggtgtattcttctgtatttggatggaatgtcctgaagatatcaatgagatccatcttatctaatgtttcatttaagacttgtgtttccttattaattttctgttttgatgatctgtccattagtgtgagtggggtgttaaaatctcctactattattgtgttactgtcaatttttcctttaatgtcttttagtgtttgtcttatgtattgaggtgctcctatgttgggtgcatatatatttacaattgttatgtcttcctcttggattgatcccttgatcattatatagtgtccttccttatatcttgtaatattcttattttaaggtctattttctctgatatgaggattgctactccagttttcttttgcttcccatttgcatggaatatatttttccagcctctcacattcagtctatatgtgtctttagatctgcagtgggtttcttgtagacagcatatatatggatcttggttttgtatccattcagccagtctgtgtcctttggttggcacgtttaatacatttacatttaaagtaatcattaatatatatgttcctattgccattttcttaattgttttgggttgattttgtagatctttttcttctcttgtatttcttgactatataagtccttttatcatttgttttaaagctggtttggtggtactgaattctcttaacttttgcttatctgaaaagctttttatttctccaacaattttgaatgagatccttgctggatacagtaatcttagttgtagattttcccctttcagtactttaaatataccctgccattcccttctggcctgcagagtttctgctgaaaaatcagtcgttaagcatatggggtttcccttgtatggtacttgttgcttctcccttgctgcttttaatattctttctttgtgtttagtgtttgttagtttggctggtatgtgtcttggcctgtttctccttgggtttatcctgtatgggactctttgtgcctcttggacttgattttctatttcctttttcatgttggagaatttttcaactataatctcttcaaacattttcccataccctttattttctctctttcttcggggacccctataatttgaatgttggtgcatttgatattgtccctgaggtctctgagactatcctcagttcttctcattctctttacggtattctaatcttcagaagttatttccaccattttatcttccagctcactgattcattcagatattctgctattgattccttctgagtatttttaattccaataattgtgttgtttgtctctgtatgtttattctttaattcttctaggtctttgttaattgattcttacattttcaccgttttgttttcaatgtttttgatcatatttactatcattattctgaattctttttcagaaagtttgcctatttcctcttcatttatttgggcttctgtgtttctagtttgttccttcatttgtttagtatttctctgccttttgattattttttttaaacttattttgtttgagagctccttttctcaggcttcaagtttgaattctttcttccttttggattctgccctcctatggttggtctattggtttgtgtaaggttcctgtagggtgagacttgtgcgagtttttgcttgtttttcctctgatgagcagggctgagtgagggggtaatcctgcctgctgatgattaggtttgtatttttgtttgtttgttgtttagatgaggcatcctgcacagggtgctatggtggttgggtggtaccaggttgtcttttattcggtggtttcctttgtgtgagtactcactgtttgctactgcctagggctagttttccagtagtccagggtcttgcagtcagtattcccactccaaagtctcaggggttgatctctggtcaggaaggaagattcaagtggtttcttatggcattaagtgagattaaaacaaatatccaaaaatgagaatgcaaagaagaaccctagacaagtgtcagttacaaaatcaggcaaataataattaaaataatggaatatgcacatatacatatacacccatgagcaaattcaaaacagtccaaccaaaataaagtacaataggttacctggtgaagaaaggaaatcaaaaattgcattttcttgttaagaacaaaactaagtaaagcacaaggtagaaaacaaaactaaagcaaggtaccgagtggggaataaaacaatgaaaacaagactaacaaatatgttgagaagaaaagaaagaaagtaagggaagaaagaatagatacacaaagttaaatagaggtagatgaaaaagatttatatacattaaagattaactgcaagggggaataacattaggaaaggataacaaaggaataaatatagaaaaaacaataggtttaaaaaaaattaaaattataataaaagagcaaagaaaaaaatggaagaagaagaaaaaaaaaaccctccacagaactgcaaaagcctaacatagatgcagaggcttataacaacaataaaaagtatgactgaatatacacatatacatatacacccataagcaaaatcaaaacagcccaacaaaaataaagtaaaatagattgacctggtgaacagaggaaaccaaaaattatgtctaccagaacaaaattaactaaagcactaactggaaaacaaaatgaaagcaagatgccaatttgggaataaagcaatgaaaataaaactgacaaatatgttgagaggaaaggaaagaaggaaaagaatgaaagaataagtatgcaaagttaaatagaggtagataaaaaagatttatatacattaaagattaatcacaaggtgaaaagaacagtaggaaaaacaaacaaaggaatagatgtagaaaaataataataggtttaagaaattaaaaaaagagaaaaaagaaaaaaggaaaactctccagaatggcaaaagcttagtgtagaggcagaggtttataacaacaataaaaaatgtgactgacaaagataaaaaaaagctcaaaagcttaattagatttcatagtgccaataaaagcaacaactacaatggtgggggggggcagtgtggggggtgcagggagagaaagagatacaaaagaatctacagaacaagtcaaaaaataagaataataaatgtttttcttgagtcactgctgtcagagtactttcccttgctggaggtcacagtccaccacacctccctaggatactctccaacacagaagtgcatgcagaacaccagctgagatctctggacctgttgtgtgggtagctcagattctaatatggtcctactcctctgtaatcttgcttcaaatgtccatagctatcagaactagtgcattttcttttgtgggagctctcagtgaccttttatagacacagtctgcttagttgatcatgtggatttaatctgcagcttgtacagctggtgggaagttttgggtcttcttccttagtcacactgtccctgggtttcaattgtggttttatttccacctctacatgtaggtcatctactggggtttgctcctgaggctgccctggaggacttggtttgcccctgtgagggtcaggtgtggaggtggtgcagctgcttgggttgcagggattctggcacatcaggtactcaggggagttggtggcttgggcagcaggaaatatagtgctctagaagggtatggcaaccagtattggcaaatacaccccagtattcttgcttggagaacccccttccctgacagagaagcctggcaggccacagtctacagggttgcaaagagtcggacactactgaagcaattctgtgtgcaaaaaggcaagactttttttgcttgtggtagctctgccccagtgagagttgagcatgaaggtggcacagctgcttggcttgcagggactctggcggtgccaagtgtgcagggacatggactgcctccgatgcaagagttatggccctatcagagtcttttttcaagcctcctgtagctggcaatcagaaggcctctttagccagtttgtctccatagttcctcaggttcaggcacttagagggctcccttgcttgaggtccttctctgttgtttggtgtgtcaggcacatagaggggcccccctggcttgggtcctactctgtagatcggtggccttaggcacttaaaggggcacccttgttggggttctactctgtagttcagtgcatcagtcacttaaaggagcaccatgggtggggtcctactctgcagttcagtgcatcaggcatttgatggtccagcttctctattagtcagctgccaatgctggagtgtagggggagagaggctatagtgatggcttcacgctgtatgcatgactcagtagtattgctttgcttccatggctgcctggctttcctccacaggcatttcccacagcagtctcctccctcacatcccctggatctgtctcttgcagtcaacagcagccctcaccctgagattgttccacaaaccctacgctccagctccaagctgctgccccttccaggggacccgtgtccctgtctggggtatgtatgtctgtgacagggactgttttattctcattccatttaggctgccacagatcagctgtttccctctcagccttaaatgttcttcctctgactcagaaaattgccctgatgtggggatagaactcctgcttcagttcccccacccaccaagggcaggtccagtcctactaacactcctgttttctgccctagttccttcatcctaccgagttttgcatggttctatatattcttttccactggtcaggtactcctgtccactctcagctggtgttctgtatgcacttctgtgtctgaaggtgtattcctgatgtatccatggagagagatgtactccacattcagctactcctccaccatcttgttctctctgataatgtcttttgatgcacaaaaggttttaattttgatgaagtccaatttgttttttcctatgttgtttgttgccggggtccagccccggtggatccagggtaattcgaaggggagacggagtaggcatcctaggaaaaaacttatttaattacagatatatagagagattagaaatggatagtgtagtaggaaatattagtggagaaaaagattctgaataacttggtttacatggaataccaataaaactccaagacaaggagtttgccaagtatccgtgctccagatgggaattcagccagaaggggaaagaaagaacgacacgggggaatcagtctttccagaaactgatccaatttctttatttttcatgtttgcttatatactttttgttatacatagggatgaatacagagtcacgcgggggtcagcagacctgacccttgtcaaaatcaggtgcttcatataaatgtatataaaggtcttatgggttttaaatcatcttatggccatgaggcctgctgacattttatggccctttctgataacagtcagtcaaccagaaaacttattttttttcaggggtgattttttcttaaacaaagctccaccctccaaataaagttgcattcctacagggtgagggtgtagtgggttacaatcaagaaaggaatttacttagcctaaggtttaacataattaatcttaaaggttaatacttatttctcttatatgttagttatattcattattagggcagggaatatggagatttagcagcaaatattggctcaacaaatgaaaacccttcaccaacataatttctaatcaatctaccatactatactagtaattttttaacttcttaaaagagtctgtatttagaaggttttaaagcatctggtgcctctcacggttgggaggctggaaacaatcacatgtggccggacgaacctgctcaggcaggctagagaaccttcagaagagtttgtaagttgaaacactcttgtcatacccaggaatttttattaactagaactgcaagttaactccttctccgagagagctggtggggggacagccccccataaagtcagaggtataggtgagagcataaaacagactctggttttgggggtagatgcatgggaacagggggtttcctgaggcttgatcccacctttgtgtatgccgaagcctccttcctcatgacctttgcatgggcggagttcctcactgctcctggcagtttgtgttttactatcacgcaaaaacaaaaaatggctgtctggggaggccttacaaatagctgtggaaagaagaaaggcaaaaagcaaaggagaaaaggaaagatataagcatctgagtgcagagttccaaagaatagcaagaagagataagaaagccttcttcagcgatcaatacaaagaaatacaggaaaacaaaagaatgggaaagactagaggtctcttcaagaaaattagagatagcaagggaacatttcatgcaaagatgggctcgataaaggacagaaatggtctggacataacagaagcagaagatattaagaagaggtggcaagaatacatggaagaactgtacaaaaaagatcttcatgacccagataatcatgataatgtgaccactaatctagagccagacatcttggaatgtgaagtcaagtgggccttagaaagcatcactctgaacaaagctagtggaggtgatggaattccagttgagctttttcaaatcctgaaagatgatgctgtgaaaatgctgcactcaatatgccagcaaatttggaaaactcagcagtggccacaggagtggaaaaggtcagttttcattccaattccaaagaaaggcaatgccaaagaatgctccaactaccgcacaattgcactcctctcacacactagtaaagtaatgctcaaaattctccaagccaggcttcagcaatacgtgaaccgtgaacttcctgatgttcaagctggttttagaaaaggcagaggaaccagagatcaaattgccgacatccgctggatcatggaaaaagcaagagagttccagaaaaacatctatttctgctttattgactatgccaaagcctttgactgtgtggatcacaataaactgtggaaaattctgaaagagatgggaataccagaccacctaacctgcctcttgagaaatctgtatgcaggccaggaagcaccagttagaactggacatggaacaacagactggttccaaatagggacaggtgtatgtcaaggctgtatattgtcaccctgcttatttaacttatatgcagagtacatcatgagaaacgctggactggaagaagcagaagctggaatcaagattgccgggagaaatatcaataacctcagatatgcagatgataccaccctaacggcagaaagtgaagaggaactaaaaagcctgtttatgaaagtgaaagaggagagcgaaaaagttggtttaaagctcaacattcagaaaatgaagatcatggcatccggtcccatcacttcatgggaaatagatggggaaacagtggaaacagtgtcagactttattttggggggctccaaaatcactgcagatggtgattgcagccatgaaattaaaagacacttactccttggaagaaaaattattaccaagatagacagcatattcaaaagcagagacattactttgctgactaaggttcgtctagtcaaggctatggtttttcctgtggttatgtatggatgtgagagttggactgtgaaggctgagcactgaagaattgatgcttttgcactgtggtgttggagaagactcttgagagtcccttggactgcaaggagatccaaccagtccattctgaaggagatcagccctgggatttctttggaaggaatgatgatactaaagttgaagctctagtactttgcccacctcatgcaaagagttgactcattggaaacgactctgatgctgggagggattgggggcaggaggagaaggggacaacagaggatgagatggctggatggcatcacggactcgatggacgtgagtctgagtgaactcctggagatggtgatggacagggaggcctggcgtgctatgattcatggggtcgcaaaaagtcggacacgactgagcgactgaactgaactgatcacatctaagaatccattgccaaatccaaggtcagaaagatttacctttatgttttcttctaagacttttatggctttaactgttatatatttccttgatacattcagagttaaggggtcctactttattcttttgcatgtggaaattcagttgtcctagctccatttgttgaatagatgactctttttccattgaacggatgtgacagccttctcaaaaatcagttggtcatagatatatgggtttatttatggactctaaattttattccagtaccccactgtttttattactgtagctttttagcaacttttgaaattagaaaatacgagttatctgacttttctctttttcaaatggttttggctgtttgggaacccttgcaatcccatgattttgagagttggattttccatttatgcaaggaaagcattttgttagaaaatacacttaatctgcaggtctctttgggtcatatgaacatattagaaatattaaggttttctactcacaaagataggatttctctttgttaatttttttttcagcaatgtttctggttttcagtgtacaaatctttcacctttttcagtttatttattccctggtattctattcttggcctttgctgatggctcagacagtaaagaatctgcttgcaatgtaagagacctgaatttgatccctggattgggaagatcctctggagaaggaaatggaaaccccaccacagaatttgtgccaggaaaataacaagacaggagagcctagttggctacagtctatggggttgtaaagaattggacacgactgaggactaacactttcattttttttctattcttctagatgctcttgaagtgcagttgcttagttattttttccagataacttattgcaaatatatagatagaaacacaactgacatttgtgcattgatttcataccctgcatattgtttgttgcttttttctggattctttttctgcagttttctatgtataagacaatttcatctgttaatgttcagttttacttctccctttccaactcagagaccttttatatatttatttttttgttgataactttttctgcattgaagttccagttcaatgttgaatagaagtgataaaagtgcgcatacttattttgtccatgatcttaagctaaactctttcatcctttcactaatgagtatggcgttcagttcagtttagttcagtcgctcagtcgtgtccaactctttgcaaccccatgaatcgcagcacgccaggcctccctgtccatcaccaactgccagagtttacctaaattcatgtccaccgagtcggtgatgctatccagccatctcatcctctttcatccccttctcctcctgcccccaatccctcccagtaccagggtcttttccaatgagttaactcttcatgaggtggccaaagtattggagcttcagcttcagcatcagtccttccaatgaacactcaggactgagctcctttaggatggactggttggatctccttgcagtccaagggactctgaagagttttctccaacaccacagttcaaaagcatcaattcttcggtgctcagctttcttcacagtccaactctcacatccatacatgactactggaaaaaccatagccttgactagactggcctttgtgggcaaagtaatgtctctgctttcaatatgctatctaggttggtcataactttccttccaaggagtaagcctcttttaatttcacggctgcaatcaccatctacagtgattttggagccccccaaaataaagtctgacactgtttccactgattccccatctgtttcccttgaagtgatgatcttgatcatcacttgatcatcttgatcatcttcccatgatgccgtgatcttagttttctgaatgttgagctttaagtcaaccttttcactttcctctttcacttccatcaaggggctttttagttcctcttcactttctgccataagggtggtgtcatctgcatatctgaggttattgatatttctcccagcaatcttgattccagcttgtgcttcttcctgcccagcgtttctcatgatgtactctgcatataagttaaataagcagggtgacaatatacagctttgacgtaccccttttcctatttggaaccactctgttgtcccatggtgttagctgtgggttttttgtaaagttcctttatcttgttgatgaagaagcttcccttctattcttatttttctgggtatttttaattataaagatgattgattttgtcaaatatgttttctgtgtcaattgagataatcatataaaattttccctttcattcaattaatgtggtggtgttgttaggtcactcagtcgtgttcaactctttgtgaccccatggactgcagcatgccaggcttccctgtccttcactatctcctggactttgctcaaatttgtgtccattgagtcaatgatgccatccaaccatctcatcgtctgctgcacacttctcctcctgccttcaaccttttctagcatcaaggtcttttccaatgagttggctctttgcatcaggtggccaaggtattggagttccagcttcagcatcagtccttccagtgaatatttagggctgatttcctttaggattgactggtttgatgtccttggagtccaagggactctcaagagtcttctccagcaccacaattcaaaaccatcaattcttctgtattaagcttctttatggttcagctgtcacatctttacatgactactggaaaaccataggtttaactagatggacccatgttggtaaagtgacatctttgcttttcaatacactgtctaggtttgtcatagtttttcttccgagaaatgagagtcgtttaatttcctggctgtagtcaccactcaaagtgattttggagctgaggaaattaaaacctgtcactgattccattgtttccccatctatttgccatgaagtgatgggactggatgccatgatctttgatttttgaatgttgagttttaagccagctttttcctctttcctatttcactttcatcaagaggctttttagttcctcttccctttctgccattagggcagtgccatctgcttatctgaggttattgatatttctccaggcaatcttgattccagcttgaacttcatccagtctggcatttctcatgatgtactctgcataagataaataagcaaggtgacagtatacagccttgatgtactcctttcctaattttgagccagtccattgttctatgtccgattctaactgttgctctttgacctgcatacgggtttctcaagagacaggtaaggtggtctggtattctcatctcttttagggattttccacagtttgttgtgaatccacagtcaaaggctttagtgtcttcagtgaagaagaagtagatgtttttctggaattcctttgctttttctatgatccaacagatgttggcaatgtgatctctggttcctctgccttttcatttttgaaattaattaatttattttaattggaggctaattactttacaatattgtagtgtttttttttttcccctatattgacatgaatcagccataggtgtacatatgtcctccattctgaacctcctccccgccacctccctcccaatcctatcccccagggtcatcccagtgcatcctgtctcatgtattgaacctggactggtgatctatttcacatatgttatctatttcacataggtttcaatgctattatatcaaatcatcccaccctccccttatcccacagaatccaaaagtctgttctttatatctgtgtcttttttgctgtcttggatattgttatcatctttctaaattccatatatacacattaatatacttggtgtattaatataattggtgtttttcattctgacttactacactctgtataataggctccagtttcatccacctcattagaactgattcaaatgcattctttttaatatctgagtaatatttcattgtgtatatgcacaatgaaatattactttcttatccattcatctgccaatggacatctagattgcttccatgtcctaactattgtaaacagtgctgtgatgaacgttggggtacatgtgtctctttcagttctggtttcctcggtatgtatgcccagcagtggtattgctgggttgtatggcagttctatttccagttttttaaggaatctccacactgttctccatagtgactgtgctattttgcattccaacaacagtgtaagagggttctcttttctccacaccctcgtgagcatttattgtttgtagactttttgatagcagccatctgaacggcgtgagatgttatctaattttggttttgatatgcatttctctgataatgagtgatgttgagcatcttttcatgtgtttgttagccaccttagccatctgtatgtcttctttggaggaatgtctgtttagttctttggctcatttttctattggttaacttatttttctggaattgagctgcaggagctgcttgtttatttttgagattaattcttggtcagttgcttcttttgctattattttctcctattctgaagtctctcttttcaccttgcttatagttaccttcattgtgaaaaaacttttaattttaattaggtcccatttatttatttttgcttttatttccattactctgggaggtgggtcatagaggatcctgttgtgatctacgtcagagagtgttttgcctatgttttcctccaggagttttatagtttctggtcttacatttatatctttaatccactttgagtctatttttgtgtatggtgttagaaagtgttctagtttcattctattacaaatagtcaaccagttttcccagtcccacttgttaaagagattgtcttttctccagtgtatactcttgcctcctttgtcatggataaggtgtccatgctgctgctgctgctaagtcgcttcagtcatgtccaactctgcaaccccattgatggcagcccaccaggctcccctgtccctgggattctccaggcaagaacactggagtgggttgacatttccttctccaatgcatgaaagtgaaaagtgaaagtgaagttgctcagtcgtgtccgactcttagcaaccccatggactgtagcccaccaggctcctccatccatgggattttccaggcaagggtactggagtggggtgccatttctttctctcttaaggtgtccataagtgagtggatttatctctgggctttccattttgttccattgatctatatttctgtctttttgtgtaggtaccatactgtcttgatgactgtagctttgtagtagagcctgaaatcatgcaggttgattcccccagttccatttttcttgctcaagattgctttgcctattcaagatttttgtgtatgtttctgtacaaattgtgaaattatttgttctagttatgtgaaaaatgctgttggtagcttgatggggattgcattaaatctatagtttgctttgggtagtacactcattttcactgtattaattcttttgatccatgaacatggtatatttttccatttatttgtgtcctctttgatttctttcatcagtgttttatagttatctatatataggtcttgtttctttttatttatttattttttattttactttacaattctgtattggttttgccatacattgacattttgtttctttaagtagatttactacgaagtattttattcttttcattgcaatggtgaatggaatttttccttaatttctctttctgttttttcattgttactgtataggaatgcaagggaattctgtgtgttaattttataccctgaaactttactatatttattgattagctctagaaattttctggtggagtctttagggttttctatgtagagaatcatgtcatctgcaaacagtgagagttttacttcttcctttccaatctggactccttttatttctttttcttctctgattgctgtggctgaaacttccaaaactatgttgaataatagtggtgagagtgggcacccttgtcttcttccagactttaggggaaatgctttcaatctttcaacattgaggataatgtttgctgtgggtttatcatatatgacttattatgttgaggtatgttccttctatttctgctttatggaggatttttttttgtcataaatggatgttgaattttgtcaaagactttctctgcatctattgagatgatcatattattttcatctttcaatatgttaatatgctctaacaaatattatatattgaagaatccgtgcatccctggaataaagcccacttgattatcttgttaatatgttgttagattctgtttgttagaggtttgttgaggatttttgcatcttagctcatcagtgatattggcctgtagttttctttttttgtggcatctttgtcagtttttggtattagggtgatggtgggctcatagaatgagtttggaagtttaccttcctctgcaatttttcggaagagtttgaataagataggtgttagctttgctctaaatttttggtagaattcagctctgaagccttctgttcctgggcttttattgttggaagattttttattacagtttcaatttctgttgtttttgatgggtttgttaagattttctatttcttcctggttcagttttggaaatttacacttttctaagtatttgtccatttcttccaagttgtccattttattaacatatagttgtttacagtagtctcttgatcctttgtatttctgtgttgtctgttgtgatttctccattttcatttctaattttgttgatttgactctattttttttcccctgaagagtctgcctaatggtttgtctattttatttatctactcaaagaacctgcttttagctttgttaattttggctatgttcctctttgttttcatttatttctgctctaatttttatcatttctttccttttactaaccctaggtctcttcatttcttctttttctagttgccttagatgtagagttaggttatttatctgatttttctcctgtttcttgaggtaggcatgtattgctatgaaccttccccttagcactgctttaactgaatcccataggttttgggttgctatgttttcattttcattcatttctatgcatattttgatttcttttttgatttgttggttattcacaagtgtgttgttcatcctccatatgtctgtatttttaataatttgattttcctgtacttgacatctaatcttaccgcataataatcagaaaagacacttgagatgatttcaaattttttgagtttacaaaggctagatttatggcccaggatgtgatctgtcctggagaaggttccttgtgcacttgagaaaatggtgaaattcattgttttgttgtaaaatatcctatagataaaaattaggtctaacggttccgttgtatcatttaaagcttgtgtttccttgctaattttctgtttagttgatctatccataggtgtgagtggggtattaaagactatcactattattatgtttctattaatatcccctttcatacctgttagtatttgccttacatattgcggtgctcctatgttgggtgcatatatatttataattgttatatcctcttcttggattgatcctttgattcttatgtagtatccttctttgtctcttttcacagcctttatttcaaagtctattttgtctgatatgaatattgctactcctgctttcctttggtctccatttgtggaaaatatcattttctagcccttcactttcattctgtatgtgtcccttgttttgaggtaggtcttttgtaaacagcatatataggagtcttgtttttgtatccattcagccagtctttgtcttttggttgggctattcaacccatttatatttaaggcaattattgataagtatgatcccgttgccattcatttgttgttttgagttcgagtttatgaacattttctgtatttcctgtctagagaagatcctttagcatttgttcaagagctggtttggtggttctctcagcttttgtttgtctgtaaagcttttgatttctccttggtatttgaatgagattcttgctgggtacagtaatctgggttgtagatttttctctttcatcactttaagtgtgtcctgcctctcccttcttgcttgaaaatttctattgaaagatctgctgttatccttatgagaatccccttgtgtgttattttttttcccttgctacttttaatatttgttctttgtgtttgatgttcattaatttgattaatatgtgtcttggggtgtttttttctggaactctcttgcttttccaatgatccagcagatgttggcaatttgatccctggttcctctgccttttctaaaaccagcttgaacatcaggaagttcacggttcacgtatttctgaagtctggcttggagaattttgagcattactttactagcatgtgagatgagtgcaattgtgcggtagttggagcattctttggcattgcatttctttggaattggaatgaaaactgaccttttccagtcctgtggccactgctgagttttccaaatttgctgtcatattgagtgcagcactttcactgcatcatctttcaggatttgaaatagcacaactggaattccatcaccttcactagctttgttcatagtgatgttttctaaggcccacttgacttcacattccaggatgtctggctctagatgagtgatcataccatcgtgattatctgggtcatgaagatctttttttgtatagttctcctgtgtattcttgccacctcttcttaatatcttctgcttctgttaagtccataccatttctgtcctttatcgagcccatctttgcatgaaatgttcccttggtatctctaattttcttgaagagatctctagtctttcccattctgttcttttcctctatttctttgcattgatcactgaggaaggctttattatctcttctttggaactctgtattcagatgcttatatctttccttttctcctttgcttttcgcttctcttcttttcaaagctatttgtaaggcctcctcagacagccattttgcttttttgcatttcttttccatggggatggtcttgatctctgtctcctctacaatgtcatgaacgtcagtccatagttcatcagacattctatcagatctagtcccttaaatctatttctcacttctactatataatcataagggatttgatttaggtcatacttgaatggtctagtggttttccctactttcttcactttaaatctgaatttggcaataaggagttcatgatctgagccacaaccaactcctggtcttgtttttgttaactgtatagagcttctccatctgtgtggatcacaataaactgtggaaaattctgaaagagatggaaataccagactacctgacctgcctcttgagaaacctatatgcaggtcaggaaggaacagttagaaccggacatggaacaacagactggttccaaataggaaaaggagtacgtcaaggctgtatattgtcactctgcttatttaacttatatgcagagtacatcatgagaaatgctgggctggaagaagcaccagctggaatcaagattgctgggagatatatcaataacctcagatatgcagatgacaccacctttatggcagaaagtgaagaggaactaaaaagcctggttatgaatgtgaaagaggagagtgaaagagttggcttaaagcttaacagtcagaaaacaaagatcattgcatctggtcccagcacttcatgggaaatagatggggaaacagtggaaacagtgtcagactttatttttgggggctccaaaatcactgcagatggtgactgtggccatgaaattaaaagacgcttactccttggcagaaaagttatgatcaacctagatagcatattgaaaagcagagacattgctttgccaacaaaggtctgtctcgtcaaggctatggtttttccagtagtcatgtatggatgtgagagttggactgtgaataaagctggcgctgaagaattgatgcttttgaatggtgatgttggagaagactcttggaaagtcccttggactgcaaggagatccaaccagtccagtctaaaggagatcagccctgggatttctttggaggaaatgatgctgaagctgaaactccagtagtttggccacctcatgcgaagaattgactcattggaaaagactctgatgctgggagggatgcagcagaaggtgaaggggacgaccgaggatgagatggctggatggcatcactgactcgatggacatgagtctgagtgaactccgggagttggtgatggacagggaggcctggcgtgctgcaattcatggggttgcaatgagtcggaaacaactgagcaactgagctgaactgaaccgaactagggagtttagtcttgggtttatcctgaatgggactctctgtgtttcttggacttgggtggctatttccttccccattttagggaaggtttcagctattatctccttaagtgttttctcatgactttctttttgtcttcttcttctttcgaatgttggggtgtttaacattgtcccagaggtgtctgaggttgtcctcatttcttttaattgttttttttccctctctgcttcatttatttccaccattctatcttccacctcaccttcttatcttctgcctcagttattctattgttggttccctccagagtgcttttgatttgttattgcagtattcattattgattgactcttttttatttctcctaggtccttgttaaacttttcttgcatcttctcaatccgtgtctccagagcatttatctataactcaattttgttttcaagattttggatcatttttattatcattattctgaattctttttcaggtagactccttatctgctcctctcttgttcggtttggtgggcatttatcatgttcctttaccttctgaatatttttctgtcttttaattttgtttagattgctgtgtttgggttggcatttctgtatattggaattttgtggctcttcttttttgtggagattgctgcctgttggggggggggtggtgttggacgaatggcttgtcaaggtttcctggttagggaagcttgcggcagtgttttggtgggtggagctggattccttctctctgtagtgcaatgaagcttccagtagtgaattttagggtgtctatgggtttggtgtgatttagtgaagtgaagtcgctcagttgtgtccgactctttacgaccccatggactgcagcctaccaggctcctccgtccatgggattttccaggcaagagtattggagtggggtgatttaggcagcctctattttaatgctcagggctgtgttcctgcattgctagagcattagcatggtatgtcttgctctggaattgttggctcttgggtggagcttggtttcattgtagtaatggaggcttttggatgagttcttgtcgattaatgttccctggggtcaggagttttctgatgttctctagttttggatttaaacctcttgtctttggctttcagtcttattcttacagcagcctcaagacgtctccatccatccaccacagacgataacaatttaggttaatggtgaaacgattctccacaatgagagacacccagagaggttcacagagttacatggagaacagcagaaggaggagggagatagaggtgaccaggaggagaagagggggagtcaaaaggggagagagcaatttagccagtaatcaattccctatgtactctccacagtctgggacacccagagtggttcatggagctaaatagagaagagagggggagggagcagatagaggtgacctgggggacaaatttgagcattaaaaggggagaaaggaatcaagccagtaatcacacccctaactaaaaatgggtactgaagattagattcttaaaggtacaaaattgatcagttcagttcaattcaatcactcagtcatgtccgactctttgtgaccccatgaatcacagcacaccaggcctccctgtccatcacaaactcccggagttcactcagactcacgtctattgagtcagtgatgccatccagctatttcatcctctgtcatccccttctcctcctgcccccaatccctcccagcatcagagtcttttccagtgaggcaactcttcgcatgaggtggccaaagtactggagtttcagcttcagcatcatcccctctaaagaaatcccagggctgatctccttcagaatggactggttgggtctccttgcagtccaagggactctcaagtcttctccaacacgacaaaattgataacaaataccaaaaagcaaagattaaaaatccagagtagagatgagactcccagaaatacaatattagaaataaaaaacaaaatcacaaaaattataaaaaatgtaatatgaaatttgttttaaaaatagggtcttttatgcaagtaggttataaaaatgaatattaaaggagtaataaagaagtaaaaataaaataaattaaaaaattatagtagtaaaaatatatctaggaatttttctggagctgttgagggcaatgtggggtcagttcagtttcagatagttccttgttccagcttatcattcttctcaaggtctataggccccttccaatgcttagtcaatgttaactacaaggttttaatctgttgcacctgtcagtttcagagcagttccctcttctttattttggcttcatctgtttgcaattctcttcagtgtctaatttccaaactgactcaagggagtgaggtgattacttatttttgctcacttgttcagttgtgtcgtggggaggaaggaacacagcaaataaatatcactggcttgtgtggggagtgcacagtgtatggatcacactgggcttgccccagctcatggtggcatgtacttccctggtctacactgctcaggttcaggtttttgggtactccacaaaggcacagacttggttgtgcattttgtgcctttcccaggtcagagcagctcaggcagtcaggtgcttggtgagcgcactgtcctaggtgggctgtgcatcttaatcacctccctggtcctggctgctcagtgtcctgggtatgctgcaagagctccctctcaggtgtgccatgtgtctcctctggggagctgacctcaggctgtgactctcctggcagatgtcaaccatccaggatcccaggaagacttggttagcaactgtgagtctgctcacagtttggtggagaatgccggtctctggggcagagattgccccttacctacaggctctggctgtcccatgcctgcctctctgcctccagcagggcaaaggaccattccacagccagctagctctcctttggtatttgctcaatcctttcctctgtgagcaggccaggctgtgacttaggttagagccttagactagagtttttcatgggaaaattctctctctttttctctctctctctggctatcccacagtttgggttgttatctcaccttcagttcagttcagtccttcagtcgtgttcgactctttgcaaccccatgaatcgcagcatgccaggcctccctgtccatcaccatctcccggagttcactcagactcacgtccatcgagtccgtgatgccatccagccatctcatcctcttgtcatccccttctcctcctgcccccaatccctcccagcatcagagtcttttgcaatgagtcaactcttctcatgaggtggccaaagtactggagcttcagctttagcatcattccttccaaagaaatcccagggtcgatctccttcagaatggactggttggatctccttgcagtccaagggactctcaagagtcttctccaacaccacagttcaaaagcatcaattcttcggtgctcagccttcttcacagtccaactgtcacatccccatacatggccacaggaaagaccatagccttgactagacggaccttagtcggcaaagtaatgtctctgcttttgaatatactatctagcttggtaataacttttcttccaaggagtaagcgtcttttaatttcatggctgcaatcactatctgcagtgattttggagccccccaaaataaagcctgacactgcttccactgtttccccatctatttcccatgaagtgatgggaccagatgccatgatcttcgttttctgaatgttgagctttaagccaactgtttcactctcctctttcactttcatcaagaggctttttagttcctcttcactttctgccataagggtggtgtcatctgcatatctgcagttattgatatttctcctggcaatcttgattccagcttgtgtttcttccagtccagtgtttctcatgatgtactctgcatacaagttaaataaggaggacacatccccaccaacattttttcctgccttttcatagtagtcatcttaacaggtgaaagattatttctcattgcattttgatatgcatctctccaatgattagtcatgctgggaaatctcatctggttactggccatttgtataccatctttggagaaatatctgttaagttcctctgcccattttaaattaggttatttgatttttttttttgagtcgtaggagttctgcgaaagattgagggcaggaggagaaggggatgacaaaggatgagatggttggatggcatcaccgactcaatggacatgagtttgggtaggctccgggagttggtgatggacagagaggcctggcctgctgcatttcatggggtcacaaagaatcggacatgactgagcaactgacctgaactgaggagttctttatatattttggatattaactcattttcagatatgtgatttccagatatttttgcctattccatgggatgcctttttactctaaagattgtgtcctttgataaacaaaagttttaaagtttcatgtagtcttattagtctatttctgtggcctgagcttttggtgtcatagccaagaaaatattggcaagttcaacatcatattttcccttaagttttctttgggagatttatagttttgggtcttatatttaagtctatatttcatttaatttttgaatatggtataaagtgaagaagaactaaagagactcttgatgaaagtaaaagaagagagtgaaaaaattggcttaaaactcaacattcagatcatggcatctggtcccatcagttcatggcaaatagatggggaaacaatggaaacagtgacagacattattttggggggcttcatatcactgcagatggtgactgcagcaatgaaattaaaagatgctctctccttggaagaaaagttaagaccaacctagacagcatatttaaaagcagagttattagtttgccaacaaaggcccgtctagtcaaggctatggtttttccagtggtcatgtatggatgtgagagttggactaaaaggaaagctgagcaccgaagaattgatgtgtttgaactgtggtgtttaagaagacttttgaaagtccccaggctgcaaggagatcaaaccagtccatcctaaaggaaatcagtcctgaatattaattggaaggactgatgctaaagttgcaactccaatactttggccacctcatgcgaagagttgactcattggaaaagactctgatgttgggagggattgggggcaggaggagaaggggacgacagaggatgagatggctggatggcatcacagactcgatgcatgtgagtctgattgaactccgggagttggtgatggacagagaggcctggcgtgctgcgattcatggagtggcaaagagttggacacgactgagtgactgaactgaactgaactgaactgaagaaaatttaacccaagatcaaagaagcctttgcatatgtttattctagcagttttaaaattacagattttacatttagtcttattttctatgtgagtattcctggtggctcagatagcaaagaatttgcctgcaatgcaggagacacaggttctatccctgggtcaggaagatcttttggagaagggaatgactacctactccagcattcttgactgggaaatcccacagacataggagccttgtgggctacagttcatgggattgcaaatagtcagacacgactgagtgactaacactttcacttttcattgtccacatagctaacttttgtgtatgattcaataaatggatcaaagtaaaaaatttttttgcttgtgaatatccagttgtttcagcaccattcatgaaaataattacaatttcttcactgaactgttgtcgaacttttcttgcaaatcatctgatctttaaattgtgggtgcatttctggactctccattgatcagtttgactatattaatgtaacactatactgttttgattaggtaatgtatgttctctaattttgctcttctttctcaagtttgtgttggctattctaggtcctttgtatttccacataagttctggaatttctacaaaacgttcttagaaaaaataaggagatcttaataaatagagacatatcatgttcatagacttcttaaagacttaatattgttaaaatgctagttattcccaaattactctatatgtggctcctcaaaggtgtctacatcctaatatgtgatattaatacctgtgtttgttatgtcacatggcagaagggactttgcaggtaaaattaaggttacaaacattaaaacagggaaattttcctagattatccaggtgtgctcaatgtaataacattggcccttaaaatggaagtggaagagaagagagttaattggagagatgcagcaggaaaagcaggagagatttgaattgtgagagtgacttgacttgacgcaccattgttggctttgaagacagaggaagtgagtcatgagctagaaatgtgggtggcctcttaaaactaagaacaactcctgggtgatagcaagtaaggaagtagggactttagtttgcattgaatagtatctacagtaaaaataagcaggaactgaattatgtctataattgaaataagtagggaaacagtttttgtcctgaagcctctagaaagaaatgcagccctgcaaacaccttgattttgttttgaggccctacttagagactagccaagctcatcatacttctgatctatgaaaaccatgatataataaagaggtgctatttcaagccactacatttgtagtactttgtgatgacagctatagaaaactagtactttttatgtctgtataatctaaagccatattgctgatcttattcttgatattggcatttttatttccttttcacttttcattatatttagattgaccaagtctaccggtcttcttgctcttctcaaaggaccaagttttagtattattgcttttcgctaataattttctatcttcattttactgatttctgatccagcacatttttttctacttattttgagttttatttgcttagaaaaaaacgtgctcagcctatttgaacaaaaactccatgaaagagcatatatgagtggcaaataagtacatgaaaagatgctcaacatcattagtcatcagagggatacaatttgaaaccataatgcgatatcattttatgcccactggaaaataaaaaaaaggattcatgtcaatgtatggcaaaaccaatacagaattgtaaagtaaaataaaaataaataaattaatttaaaaaataaaaaaataaaaaaataaaaataaatcaaatctctaaaaaaaaaaaaaagaaaatatggaaaaatgggcatttccatatactactggtggaattgtaaaatgttacaaccattttgggaagcagtttcacagttttttaaaacacaaatatcccataaactagcctatcatataattcaggaattccattcctagatattgatccaagataactgaaagcataatgtatatatagataatttatatgaaagttcatagcacattcatttgtaatagccaaccactggcaacaatgcaagtgtccatcaaaggtgaatgagtatgtgcattgtggcatagccatacttaacaaaaaagaagaatgaaataccaacactgaagaattgaagaatgaacacaccaatgttgaagaatcttaaaataattgtattgaatggaagcagtctgttaaaaaaatacatgttatatgattgcatttatagaaaatataagaactatacagtgaaaggaaagcaacgaacagtctcctgggggtgggatggggtgacaggaggagggagagagagaaaagaatatggacatgagcaaactgctggcatggtggatatattcattatcctgatggctgttgtgttggtttctttgatatatatattagccaaaagatacatgttaagtgtgttcagtttgcagaatatcagttaccttcaattaaaaaagaaatctgaagatgaagaattagcattttaacaattaaactttaagtctgtttacttgtttttcagggtggattgctattctaggtgccatctggttgctaattttagctgacatccatgattttgagataattctacacagagtggaatgggcaacccttctgttctttgcagcactctttgttctgatggaggtaagtcttttgttgaacttttgcgatagttcaaagacctgatttttatatttcacattctatttactgaatgaaaaacgcccaaagtttgtaagtctttatgcatattcactaagtgtaaaattatgggggttgaaattagactattttaagttaaaccaacttttatctaaggcactgaaataatatttaataaacttgtttatttggttgctgttgtttttttcttgaataacctttgtggtttgtaaactttctctaatttgatttgctgtaaagtagaatttactctaaattgggcttagagcaaaatgacttgttacaaaaagtttatagggaaatatcttgatagtctattccttttgtgtaatatttaaataaataatctcataatgggaaagactgcatcaaagaaaagaatgaataatacgtattgttttagttataattgttgtcacaaaattaatcacaataacttttatcttgggaattgattcacaaacatgtacctcctcaactacaaatatttactatataaaaaaatactgttccccaaaggattacttcaaacacaccaaatgtttcacattgatcaccttaacttattgattacaaattcattcaatattcactattttcttgattaaaactagcagtttttttattaattatttttaaacaggtctcttgtatcattgaaacctgtctttaattcataatagattacataggtgtaataactcacatagctccttcaaatacatcaaggagttatgaatcctattctacttcatcaatctcctactcaaaaacttcaccttttctattctgggttttctttatgcacaaaacatatagactattgagggggggaattctagttactatttcatgattggcttttgaaagtcagtgcctcaattgcatatttattcaagatgtaaactgctatctcatctgggctttggcatattgttctcaatttcatacttctctttgtctgatagggtaaatgctggaatatttaaagcaacttgagatataatttatgtcataaaattaattccttttatatttacagttcaataacttttagttacttttgaatgtttcattcccatgaccctcatgatcccttacagtcagttttagctcacaactccagctctaggcaatcactgatcctttttctattgagttgtctttcctgtacatttcatctaaaaggaatcatatattgtgtactattttctgttggcttctttaaattagaataatgatgttgaagttcatccatgtaccttagactcatttatttttttggtgaataacattctgctatatggatatactatattttatttacctattttgataaacatttgtgtttatttgtatatgagtttttgtgtggacatatgttttattttattttaggtagataataggtcttagcactgctttaacttatttaaaatattttccacagtggttataccattttacaatcttatcagtagtatagtagattccagtttctttacatcgtcattgtcacatattgtcattcattttgattatagacattctagtaggtgtatcagtcagttcagttcagttgctcagtcgtgtctgactctttgtgacccgatggactgcggcatgccaggcctccctgtccgtcaccaatttctggagtttattcaaactcatgtccattgagttggtgatgccatccaaccatacatcctctttcatccccttctcctcctgccttcaatctttcccaggatcacggtctttcccaagagtgaattcttcagatcaggtggccaaagtgttggagtttcagcttcactatcagtccttccaatgaatatccaggactgatttcctttaggatggactgattggatctccttgcagtccaagggactctcaagagtcttcttcagaaccctagttcaaaagcatcaattcttcggtgctcagctttccttttagtccaactctcacatccatacatgactactggaaaaaccatagccttgactagacggaactttgttagcaaagtaatgtctctgctttttaatatgctgtctaggttggtcttaacttttcttcgaaggagcaagtgtcttttaatttcatggctgcagtcaccatttgcagtgattatggagccccccaaaataaagtctgtcactgtttccactgtttccccatctatttgccatgaagtgatgggaccaaatgccttgatcttagttttcttagtaggtgtataatggtttttagtttttaaaaaaggtgatatgggaaaacattctttgaaccatactgttctccatagtagctatacaagtttatatttccaccagtagtgtaggagggttccctttcttcacaccctctccagcatttttattagattaatctttactggagtatacttgatttgcaatgttgtgttagtatctgctgtgcagaaaagtgaatcagctatacatatatgtatatccactcatttttagattctttttccatataggccattaaaaaatattgagtagaatgtcctagtttatagagtaggtccatattagttatctgttttatatatagtggtatgtatatgtcaatatcaatctcccagtttacccctccaaccttttctcctgataaccataattttgttttctacatctgtgactctatttttttgcttttaattgatttgtatttaattgaaggataattgctttgcaatattgtgttgctttctgccatacatcaacatgactcaaccataggtataccaaagtccccttcctcttgaaccttcctccaacctcccaccacatcccacacttctaggttgtcatagagcaccatttgagctccctgagtcatacagtaaatacctactatctgttttccatcagatcagttcagttgagacactcagtcgtgtccgactctttgccactccatgaatcacagcacgaaaggccgccctgtccatcaccaactcccagagttcactcagactcacgtccatcgagtccgtgatgccatccagccatctcatcctctgtcgcccccttctcctgctgaccccaatccctcccagcatcagagtcttttccaatgagtcaactctttgcatgaggtggccaaagtactggagtttcagctttagcatccttccaaagaaatcccagggctgatctccttcagaatggattggttggatccccttgcagtccaagggactctcaagagtcttctccaacatcacagttcaaaagcatcaattcttcagtgctcagcctcttcacagtccaactctcacatcgatacatggccactggaaaaaccatagccttgactagacagatcttagtcagcaaagtaatgtctttgcttttcaatatgctatctaggttggtcataacttttcttccaaggagtaaacatcttttaatttcatggctgcaatcactatctgcagtgattttggagacccccaaaataaagtcagccactgtttccattgtttccccatctgtttcccatgaagtgatgggacccggatgccatgatcttcgttttctgaatgttgagctttaagccaacttttttactctctttcactttcatcaagaggctttttagttcctatttactttctgccataagggtggtgccatctgcatatctgaggttattgatattgcttctggcaatcttgattccagcttgcgtttcttccagtccagcgtttctcatgaggtactcggcatataagttaaataagcaaggtgacaatatacaggtttgacgtactccttttcctgtttggaaccagtctgttgttccatgtccagttctaactgttgcttcgtgacctgcatacaaatttctcaagaggcaggtcaggtagtctggtattcccatctctttcagaattttccacagtttattgtgatccacacagtcaaaggctttggcatagtcagtaaagcagaaatagatgttttccaggaactctcttgatttttaatgaaccagcggaggttggcaatttgatctctggttcctctgccttttctaaaaccagcttgaacatcaggaagttcacggttcacgtattgctgaagcctggcttggagaattttgagcatgactttactagcatgtgagatgagtgcaattgtgcggtagttggagcattctttggcattgcctttctttgggattggaatgaaaatggaccttttccagtcctgtggccactgctgagttttccaaatgtgctggcttattgagtgcaacactttcacagcatcatctttcaggatttgaaatagctcaactggaattccatcacctccattagctttgttcatagtgatgctttcttaagcccacttgacttcacattccaggatgtctggctctagatgagcgatcacaccatcatgattatccaggtcgtgaagatcttttttgtacagttcttctgtgtattcttgccaactcttcttaatatcttctgcttctgttaggtccagaccatttttgtcctttatcgagcccatctttgcatgaagtgttcccttggtatctctaattttcttgaagtaatctctagtctttccaattctgttgttttcctctatttcttggcattgatcgctgaagaaggctttcttatctcttcttgctattctttggaactctgcattcagatgcttatatctttccttttctcctttgcatttcgcctctctacttttcacagctctttgtaaggcctccccagacagccattttgcttttttgcatttcttttccatggggatggtcttgatccctgtctcctgtacaatgtcacgaacctcattccatagttcatcaggcactctatcaatcagatctaggcctttaaatctatttctcacttccactgtataatcataagagttttgatttatgtatacctgaatggtttaacggttttccctactttcttcaacttaagtctgaatttggtaataaggagtccatgatctaagccacagtctcttcttggtcttgtttttgttgactgtatagagcttctccatctttggctgcaaagaatataatcaatctgatttcggtgttgaccatctggtgatgtccatgtgtagagtcttctcttgtgttgttggaagagggtgtttgctatgaccaggcatcttcttggcaaaactctattagtctttgccctgcttcattctgcattccaaggccaaatttgcctgttactccaggtgtttcttgacttcctacttttgcatcccagtccctataatgaaaaggacgcctttttttgggtgttagttctaaaaggtcttgtaggtcttcaaagaaccgttcaacttcagcttcttcagcattactgcttggggcatagacttggattactgtgatattgaatggtttgccttggaaacgaacagagatcattctgtcgtttttgagattgcatccaaggactgcattttggactcttttgttgaccatgatggctactccatttattctgagggattcctgcccacagtagtagatataatggtcatctgagttaaattcacccattccagtccattttagtttgctgattcctagaatgtctacattcactcttgccatctcttgtttgaccacttccaatttgccttgattcatggacctgacattccaggtttctatgcagtattgtgttggagaagactcttgagagtcccttggactgcaaggagatctaaccaatccattctgaagatcagccctgggatttctttggaaggaatgatgctgaagctgaaactccagtactttggccaccctatgcaaagagttgactcattggaaagactctgatgctgggagggattgggggcaggaggagaaggggacgactgaggatgagatggctggatggcatcacgaactcgatggctgtgagtctgcgtgaagtctgggagttggtgatggacagggaggccgggcgtgttgcaattaatggggtcgcaaagagtcggacacgactaagcgactgaactgaacttaactgaaatgatgcaatattgctctttacagcatcggaccttgattctatcaccagtcacatccacaactgggtattgtttttactttggctccatcccttcattctttctggagttatttctccactgacctccagtagcatgttgggcacctactgatctggggagttcctctttcaatatcctatcattttgccttttcatactgttcatggggttctcaagcaagaatactgaagtggtttcccattcccttctccagcggaccacattctgtcagacctctccaccatgatcctcccatcttgggttgccccatggcatggcttagtttcactgagttagacaaggctgtggtcctagtgtgattaaattgactcattttctgtgagtatggtttcagtctgtctgccctctgatgccctcttgcaacacctaccatctttcttgggtttctcttaccttggaagtggggtatctcttcacggctgctccagcaaagtgcatctgctgctccttatggtggaggaaggatttctcctcaccgctacccttcgtgaccttcaacgtgggatagctcctctaggcaagcagccactgctccttggacatggggttgctcctcctggccgccaccccggccttgggcgtggggtggcttctcctggctgcccctggtcttggaagtggggaactcctctcggctgccacccctgaccttggacttcggtagctcctctcggccattgctgcgctgtcgcagcctggtactgtcagctgtgaccagcgcactaagcacgggtggctgcgatgggcgcactaagtgtggccgagaggagttaccccacgtccgaggtcaggggcagtggccaagagtgccagactattttccatataatagtataaatatttcgatgctgctctcttggtttgtcccaccctctccttccccttcctgtttcctcaagtctgttctctatttctgcatctgcattgctacgtgcaaataggtgatggcatcatcagcatttttgatgatggccactctgactggtgtgtgatgatatttcactgtagctttgatgtttatttctctagtaattagtgatgttgagcatcttttcatgtgcctcttgactatttgtgtgtcttctctagagaaaagtctatttaggtcttcttctcatttttgattagatttttttctttattgagcttcatgagctgtttgtaaactttggagattattcccttctttgttgtatcagttgcacgtattttctcccattctatggattatatatttgctttgtttctggttacctttgctgtgcaaaatttttgagtttaatatggtaccatttatttattttctttcatttccactattctaggacagagatcagagagatattgctgcaatttatgtcaaagagtgttctgcctatgttttcctctaagagttttatagtaatgtcttacatttagatctttaatccattttgattgaagtttgtttttttagtgtatggtgttaaaggatattctaatttcattcttttatatgtagctgtccagttttcctaacaccatttattgaagagattgtcctttctccactgtatatttttgcctcctttgtcatggattaattgaccagaggtgcatgggtttatttctgggcattctgtcctgtttcattgatcgatagttctgtttttatgcagtaccatactgttttgattactgtagctttgtagtatagtctgaagccagggaacttttttactccaggtttgtttttctttctcaagattgctttggatactcaaggtcttttgtgtcttcatacaaatgtaaaattttaaaattctagttctgtgaaaaatgccattgataatttgatagggattgcattgaatccatagattattttgtgtagtatagtcattttcacaatattgattcttccaacctaagaacatggtatatctttccatctgtgtcatctttgatttctttcttcaacatcttgtatatagtttttggagtataggtcttttgcctccttaggcaaaatttataacagtgtgttatattctttttgatgatattgtgagtataattgttttttaaattttattagattggtgcaaacttaattgtgatttcagaccctaaattttaattcattataattaggctcaaacatatatttattaattgaagtaggaacaattacaattaacacatttttgccaatgagaaataagtttgtttattcctgttacataaaaatctgtgcttcaggattcaatgaaccgttggaaagcaaaaagttgttgagatgcttgaagagtggcaaatgaggcaaaactttgcagcccaattcattcagcttttgaagtgttggttgtgtgacgtgtggtctggtgttgtcatgcagaagaatggggcccattctgttgaccaatgccagctgcaggtgttgcagatttcaatgcagctcattgatttgctgagcatagttttcagatgtaattgtttcacaggaattcagaaagctgtaaaggatcagatggccagcagaccaccaaacagtgactatgaccatttttttggtgcaagtttggctttggaaagtgctttggagattcttctcagtccaaccactgagctggtcattgccaactgtataaaatccattttttgtctctctcacaatctgatggagaaatggttcattgatgttgcatagaataagagaaggcaacacttcaaaacgacattctttttttcccccttaattttcagtcagctcatgaggcacccacttattgagcttttttgcctttccaatttgcttcaaatcccaaatgaccatagaatagttgacactgaattcttgggcattttctagtgtagttgtaagagggtcagcttcaatgatagctctcagttggtcattgtcacttccaaaggctggccactatgttcctcaccttcaagcttctcatctcctttgcgaaacttcttgaatcacaactgcactgcacatttgttagcatttactgggccaaatgcattgtagatgttgtgagttgtctctgctgctttatgaacattttgaactaaagaaaatcactcgaatttgctttttatttaacatcgtttccctaatctaaaataaatataaaataaacagcaagtaatgttattagcaaaaccacataaagtgagaaatgtgcattaaaatgatgtacaacataaccacatttatttaagaatgtattccaatatcaaatggcaaatttcaatgctgcaaaaccaccattacttttgcaacaacctaatatattctgattgcatattaacattacacagaaatacaaatttttaaataataacattgtgtcctgagatcttcatgaatccatttgttagtttagtagttgtttttagatccgttggagattcttttcatgtcatctgcaaagacattttaatttcttttctgatttgatgcctttaactagctcatattttctcccttcctttcctccaaatattctctttttcccttctcttaaatttttcctgtcttgttagctataatccctagtttgatgttgaagtgatgaatattaatgttcatatcttatatctgatcttagaggaaatggatttggtttttcaccattatgtatagtcttagttgtaagttttttatttttagttttttggctatatatagatatcctttattaagctgagaaatatattaggataattccttatttgttgtgaaatttaatattcaattttgtcaaattttatatgtatctattatgatgaccatatatatttttaactttgaatctattattatggtatactacatttactgattttcagatgttaaatctgctttgtattcctgaagtaaatctcacttgatcatgttgtaataagttgttgagttccttttactattattttttgagaatttttacatctatattcatgagggatattggtctatataattttcatgtatgtttttctctggatttgttttgagcatcatactgaatgagtgcaacagaatgctttgtcaataattctgtgcaggagtttgtgaaagattgtttttaaatattcaataaaagtttccagtgaagtcatctgggcatgaaattaaattgtggaaagttttatatatttgtttgtttttcctaattcattttctttggcctatttaggtattttatttcttcttgagtaaattttactagtttttgttttctatgaatttgtctatttcatccaaattttcttaatttttgccataagttgtttgtaatattgccttattttttaaattaatttatttatttaatatttactttacaattctgtattggttttggcatacattgacatgaatccaccacaggtgtacatgctttcccaaacatgaatccccctcccacccccctccccacaacatctctctgggtcatccctggtaccagccccaagcgtgccatatcctgtattggacatagactggcaattcgattcttacatgatattatacatgtttcaatgccattttcccaaatcatctcaccctctccctctcccactgagtccaaaagtccgctatacacatctgtgtcttttttgctgtcctgcatacagggtcatcattgccatctttctaaattccatatatatgtgttagtataccgtattggtgtttttctttctgggttacttcactctgtataatcggctctagtttcatccatctcatcagaactgattcaaatgtattctttttaatggctgagtaatactccattgtgtatatgtaccacagctttcttatgtaatattccttataatactttttatttcggtgaaatcagtgatatccccttttctatttctgattttgaagatttgtgtcttctctcttctttcttggttagcctaggtaaagtttgtctacttttttgatatttatttttaaaaggaaatattaattacgttgattttctttttttccatatttagtaattggataaactcttgagttggaaatatattttaaagttggaaaggcttaagatcttactttctaagctttagaatgtagtacatttcatctaaaactgtctattctctcaaagacatttcattttttcattaccatcctctttgcttcttcccttatagatgtgtatgtatttaaagttctcaggctttctggtacgtgttaatgtttgacagaaaccaacacagtactgtaaagcaattatccttcagttaaaaataaataaaaatttaaaaattcttgatctttaaaaattttctcaggttattccactagccagaaagaaaatccatttccaacaaacttcttttcactagactctgtttctcatttcctcttgctactctgccacccaagtcttcttattttaattatcctctccatagattcagatgctttcaggcagaccataaggtttccatggctgttgcttggaggtcagattactttcattaattttctttgtacatttttttggtttctatttcattggtttctgctctaatctttattatttcatttcttctgttggaatttgatttgatattctctctttgtctcctgcgttcttaaagtggaaccttaggtaagcattttagctacaaattttccccaagcatcatttctctgcatcctttattacctatactcttctttcatttttgtctgttcaaaatatttgctattttttcttataatttattttttaaaagatttgttagcaatttatttgtaatatttccatttgagagatgattccaggtttatttaatttttcttttcattctacataaatcagaacatgattcattagagtcacatattttgcttttatcactgtttgcaaatcttcacttagatgatcttgacaagtctataaaacaatcaaagtagattgttcttcaaaataggcaagagaagcaaagttgatgttagtgctttttgggaggtatttaaatatggtattcttgtttgacatatgggttattgagaagtatatttttaaagttataaatatttgagggttgtgtatatttctttctttttttaatttttaatttagtccaattgtcatagaacatattttgtgtatatcagtccttgtaattttattgagtcttgttttatagtcttgcattttgtcttttctggagaatactgtacttgggcctgaaaagtatgtgtattctgcttttgtttggtggagaattctacaaatatcagatacatcatgcttgtcaatagttttgtttaagttttatacatttcctatattctatgtaatttatatcaattgttgatagtggggtattgaagtcctcacctatcactgttgaattgtatattttcttttcacatgtattagtttttgtttcatatgtcttgaagatctgttgttaggcacatgtattttgtaattattataacattcatgtgaatagaactttcatcattattatatctccctcttttttttttttagtatatttttttgttagaatcttttttgactggtattgatatggccacttcagctctcatttattgttgtttgcaggggctaccattaaaaaaaattcagtctgacaatttctttttgattgaaaagtttgtttatatgtaataaaattactcatatggttgaatttatctgtcattttgttatttgattttgctatgttttgtttcttttgtacctctctcttctcctttactgctttctttgtgctaaacaaatatgtaactgtaaaccatttaaattctctttcattttgttttttacaccatattttaaaattattatattattatgagttaaactatgcatcaatttaaatttagtttttattttatattgaagtatatttgtttacaatgttgtgttaatcttggatgtatagcaaagtggttcagttatacatgtacatttatccattcttttccagattatttcctatgtaggttgttgcagaataatgagtagacttccctatgctatacagtaggtccttttcatttcattgatcttttttttattgttttctttatctctatttcatttgtttctgctttgattgttatgatttctttcctaccagtacctgagttttgtttgttcttctttctctagttgctttaggtgtaaggttgtgctgtgctgtgcttagtcactcagtcttgtctgactctttgcaactgcatgaactatagcttgccaagttcctcatcctggggatttttcatgcaagaatactgaaatgggttgccatttcctccttcaggggatcttcctgacccaggaatccaacctgtgtctcctgtgtcttctgtattgcaggaagattctttacccactgagccatcgaggaggcccctccatgtatgatgtaaggtgtaaagttaggttgtttatttgagatatttcttgttgtgttaggtaagattgtattgctataaaattctctcttggaactgcttttgttgtgtaccataagtttcggattttgtgttttcatttgcatttttttctaggtatattttgatttcctcagtgatccattagttgttatactaaagtagcatattgttcagcctccacatacttgtgttttttgtagttttttaaatgtgtgtgtatgtaaataatttttaatctcgtagcattgtggttggaaaagatgcttgatatgatttcaattttcttaaatttaccacagcctcctttgtggcctagcatgtgatctatcctgaaaaatgttccatgtgctcttgagaagaatgtgtattctgctgcctcatatgttctacaaatatcaattaagtccatgtggtctaattatttttcagtttgtgaattgctcacccagtgggtatgggattttattacatcatgaggtgccccctcctacaatcccgatgtggtttcctgtttgtctttggatgttgaatatattttttggcaggttcaagtcttttccatcaatggttgttcagcagtaagttgtgatttcagtattttcatgagaagaggtgaactcaagtccttctgctccactgtattgactccctatgcatcttaatttattacagtttacttcaggttaacagtgacttgcttccaataaaatatagacatctttttgaagtacagctccagtttttccttcctccattgtgcttctattgtcacatatattatatctttaggttatatgcctaacatatagttttaccatccttattgttttgtgatatgcattttaaataaaaaaagaaaagaaaatatattcttatagtcttttaaaaatatatatattattaaagtatagttgacttaaaatgtttcaaggtgattcagttatacaaatacacatatactattttagaaattattttccatcataagttattataagatattggccatggctccctatgctgtacaataaatctttgtttcttgttgcatgtctatttttaattagaaatctcacattctatgcctactaagtcaaacaagtggaatcaaaatgtcataatttttttagttaggcaaaaattcataaatgtttaaagtatatgtatatataatacatatatatatgtatacaaaaactttttgctacacttgataaaggcttgagaaaaaacataaagaaagagatgaagaaattggagaacataaactaaatgaaataggagcactgaatatgaaatagaaaaagtgaaacaaactagataaaagtaaaaggtcttcatattacccagttgtttttaaacatgagcactcattagaaacatatctggagctctggagaaaaaaagcaatacctgagcattgatatttttcaaaaaattccaagataattctgatacgcatctagatttttaaaagtgattacaggttttcccattaaatcctagttttggtgatacagagttctattctttttctgttgaccaatcatgatacaatggtattaagtgagtaattgttacataatcacaagaggaaaagatgtttatcagttttcacaatcagttaccagacaaaaaataaaaaaaataattataattttgagccataatgggaatgtgattaacttaacaatataaaataattacatacaactctgggggatgtcaagcagaatgatgtggtaagtggaagtgcatacatgcgcatagtttcatccacccagccagtgtatgtcttttggttggtgcatttaatccatttacattcaaggtaattatcagtatatatgatcctattactgttttcttaattgtttggggttgattttctgtaggccttttccttctcttgtgtttcttgcctagaggagttcctttagcatttgttgtaaggctggtttggtggtgctgaattctcttaacttttgcttatctggagagcttttgatttctctataaagtccgaaggagagtcttgctgggtaaagtattcgtggttgtaggttctttccattcagcactttaaatatatcatgccattcccttctggcttgtagagtttctgttaaaaaatcagctgatatcttgatgggaattcccttgtatgttatttgtcatttttcccttgttgcttttaatattttacctgtctttaatttttgttaatttgattactatgtgttttgctgtattccttcttgggtttatcctgcctgggactctgtgcttgctgtacttggttgactatttcatttcccatgttctggaattttcaactattatctcttcaaatattttctcaggtcctttatctctctcttctacttctgggacctctataatgcaaacgctggtgtgtttaatgtaatcccagaggtctctagggctgtcttcatttcttttcattcttttttctgtattgtgttttgtggcagtgatttccaccattctttcctccaggtcatttattcattattctgcctcagttattctgttattcattccttctagtgtgttattcttctctgtttgtttgttctttagttcttgtaggtctttggtaaacatttcttgcctcttctcaatctttacctccattcttttcccaagatcctggatcatcactatcaatattatgaattatttttctggaaggttgcctatctccactttgtttagttgtttttctgggattttatcttatcctttcatttgggacataactttctgcttttacataatggttaactttctgtaatattgtttttgttttagccagtgtgagactgtgcttcttcttgcttcttctgtctgtcctttgatggatgaaactaagaagattgtgtaagcttcttgatagaagggactgatgtgggaaaaactgagtcttgctctggtgggcagggccttgctcattaaagctttaatccaattatctgctgataagtggtgttgcactccctccctggcagttgtttggtctgaggcgacccagtcctggtgtctatgggctctatgataaggttaatggccaattccaagagggtttacactaagggggaccttctagttccctcgtccctgtggtgagcgcctgccaacccatgtctccacaggcagccttccaacactagcaggtagttttggttcaatcttctgtgtggtcactgctcctctcctctgggtcttggtgcacacaaaattttgtttgtgctttccaagattcgtgtctctgttttcctcagtcttctggaaggcctgtaatcataccctgctgaccctcaaggccagactccctggggattcagtccctttgtcaaatcccccaggctgggaagcctgagatggggttcagaaccttcacaatagagtgagaacttctttggtattattgttctccactctgtgggtcacccacctggtgggtataggatttgatttgatcatgattgtacccctctttgggcttctcttgtggctcagctggtaaagaatctgtctgcaattgggagacctgggtttgattcctgggttgggaagatcccctggagaagggaaaggctacctactccagtattctggcctggataattccatggactgtatagtccatgggatcacaaagagttggacatgactgagacacctttcactttaccttctcattgaggtttcctctttgtctttaggtgtgagatatctttttttgatgggttccagcatcctcctgtcaatagttgttcaacagctagttgcaagtttgattcttttgcaggaggagatgaccacagatccttctactctgccaccttgaaccaaaagactcattcagtatttttatatatctatatatttaccttttccatggttctttattgtttaggatggatttaaattgccatctggtgttggcttgaaggagcagtaaatttagtttttatttgtatgtgaatgcctttcccaccccctgcattattttccaaaaatagttttgatgaatcaatgtggaattcttgggtcttttaacttttgtcttttaacattccaaatctattgtcttgctgccttctggtctccattacttctcatgatgtcagctattcatcatattgttttacccctatacatttagagtcatttttgttgctgtttttgagatctttttgtatttgtctctcaatacagtgactatagtgcatttttaggcttggatctctatgtttattttagttttgttcctttgagttttctttatttcttttaaattagaggataatttcttttcaatattgtgtcagtttctgctgtacaacagtgtgaatcagctataagcatatgtatatctccaccttcttaagcttccttcccatctcctaggtcatcacagagcactaagctgtgtttatggtgttataaaatatcttctcactgtgtagaaatgtctgtttatgtcttccacccatttttaaattgggttgttagtgtttctgatattgtataaactgtatgaactgcctgtatattttggagattaacactttgtcagtttctttatttccaattatttcctatcattcagagggctgtctttttgtcttgcttatgttttccttttctgtgcaaatttttttgtttaattatgtcctgctagtttattttgtttttatttcccttactctaggagatgggtcaaagatgatcttgcttcaatttatggcaaagattggtctggctatgttttcctctaagggctttatagtgtctggtattacatttaggtctttaatatattttgagtttaattttgtgtatggtgttagaaagtgttctaattgcatttttttacatgtagctatccagttttgccagcaccacttattgaagagggccttttttctccattgtgtactctttctttgtcaaagataaggtgaccataagtgatggatttatctcttggctttctgtcttgttccattgacctacattactgtctttgtgacagtaccatactatcttgatgactgttgctttgtagtatagtctgaactcagggaggttgattcctctagttccatttttctttctcagggttgctttgtctatttgggttcttttgtattcccaagaaaactggaattttttttttgtcgtggttttgtgaaaaatgccattggtagtttgatagagattgcattgaatctgtagattgctttgagtagcatagtaatctttacaatatttacatttccaataaaagaacatagtatatatttccatatatttgtgtcatctttgatttctttcttgagtgtcttgtagttttctgcatacaagtcttttatctccttgggtaggtttattcctaggtatttattctttttgctgcaatggtgaatggggttttaaaaagtttcttcctgatttttcattgttagtgtataggaatgaaagggatttctgtgtattaattttgaatactgtgactttaccaggctcactgattagttctagtagtttcctggtggcatctttttcattttctatatattgtatttttatgtcagttctaaacagtgagagttttttttttttccccaatttagggtcctgctatttattttactcctctgattgctgtggttaggacttctagaactatgttgaataatagtggtgagagtggacacctgtgtctagtttctatcttggaggaaatgccatcaaattttcactatttagaataatatttactgttggtttgttacatatggcctttattttgttggggtaggtttcatttatgcccagtttctacagttttattttaaaattattatcaaaattttgaattttgttaaaagcctttcctacatatattgagtggaaaattctgaaagagatgggagtaccagaccacctgacctgcctcttgagaaacctgtatgcaggtcaggaagcaacagttagaactggacatggaacaacagactggttccaaataggaaaaggagtacatcaaggctatatattgtcaccctgcttatttaacttctatgcagagtacatcatgagaaaccctgggctggaggaagcacaagctggaatcaagattgcctggagaaatatcaataacctcagatatgcagatgacaccacctttatggcagaaaaaaaagaaaaactaaagagcttcttgatgaaagtgaaagaggagagtgaaaaagttggcttaaagctcaacattcagaaaatgaagatcatggcatccggtcccatcacttcatgggaaatagatggggaaacagtggctgactttatttttgggggctccaatataacttcagatggtgattgcagccatgaaattaaaagatgcttgctccttggaaggaaagttatgaccaacttagatagcatattaaaaagcagaggcattactttgtcaacaaaggtctgtctagtcaaggctatagtttttccagtgggtatgtatgaatgtgagagttggactgtaaagaaagctgagcaccaaagaattgatgcctttgaactgtactgttggagaagagtcttgagagtgcaaggagatccaaccagtccatcctaaaggagatcagtcttggctgttcattggtaggactgattttgaagctgaaactccaatacttgtccacctaatgcgaagagctgactcatttgagaagaccctgatgctgggaaagattgggggcagaggagaaggggacgacagaggatgagatgattgggtggcatcactgtttcagtggacatgggtttgggtggactccaggagttggtgatggacagggaggcctggtgtgctgcagttcttggggtcacaaagagtgggacatgactgagtgactgagctgaactgattgagattatcatatttccccccacagtttgttaatagtgtatcatattgatctgtatgtattgatgaactcttgaatcactgggataaacctcaattgatcatgatgtatgattcttttaatattttgttggattttgtttgatattattttttgaggatattttcatatatgttcaacactgattttgtgttgtacttttctctttttttggttcgtatctttgtctggttttgatatcagggtgatggtggccttgtggaactaattttgaagtattcctcccttggacatcttttggaagagttggagaaggaaaggtgttagctcttctctaaatgtttgattgaattcgcctattaagcaatcaagtcgtaggatattgtttgctacgaaatttttcctctgtttcaatttcactgtttttgattggaccattaatattttgtatttgttcctggttcagtcctggaaggctgtatttttcttagaatttgtgcatttcttctaggctgtccattttattggcatatatttgcttatagtagtctcttatgatcctttgtatttctgcagtgtcagttgtacgttctttttcatttataattttatcaatttgaattctttcccttttttgtttgatgaatctgggtaatggttttatcaatgttgtttatcttctcaaggaacaagctggttttttttttcagattttattttatttatttatttactttaaaatattgtattggtttttgccatacatcaacatgaatctgccatgagtgtacacgtgttcccaatcctgaacccccttcccacctccctccccataccatccctctgggtcatcccagtgcaccagccccaagcattctgtatcctccatcaaatctagactggtgattcgtttcttatatgatattatacatgtttcaatgccattctcccaaatcatcccactctctccctcttccacagagtccaaaatactgttttagtcatctttactgttgttttcttcacttctttctaaaaaatttatttctgttctgatctttgcaattcttttccttccactaactttttgttgttgttgttattcttttctaattgctttaggtgtagggttaagttgtttatttgagatttttcttgtttcttgaagtaggattatattactataaactttcctgttagaattgcttttgttgccttaccattggcttctagtcattacattttccactctcatttgtttctcagttcagttcagtcgctcagtcgtgtccgactttttgtgaccccatgaattgcagcattccaggcctccctgtccatcaccatctctcggagttcactcagactcacgtccatcgagtccgtgatgccatccagccatctcatcctcggtcgtccccttctcctcctgcccccaatccctcccagcatcagagtcttttcctatgagtcaactcttctcatgaggtggccaaagtactggagcttcaactttagtatcatcattccttccaaagaaatcccagggttgatctccttcagaatggactggttggatctccttgcagtccaagggactctcaagagtcttctccaacaccacagtgcaaaagcatcaattcttcagtgctcagccttcttcacagtccaactctcacatccatacatgactacaggaaaaaccatagccttgactagacggaccttagtcagcaatgtaatgtctctgcttttgaatatactatctaggttggttataacttttcttctaaggagtaagcgtcttttaatttcacagctgcagtcaccatctgcagtgattttggagcccagaaaaataaagtctgacactgtttctactgtttccccatctatttcccatgaagtgatgggactggatgccatgatcttcgttttctgaatgttgagctttaagccaactttttcactctcctctttcactttcatcaagagactttttagttcctcttcactttctgccataagggtggtgtcatctgcatatctgaggttattcatatttctcctggcagcatagcggttaggcaggcaggcaggctagggtctggaggtcgagttcaaatcacatttgtttctaggtacttttaaaaatttcctgtttgatttcttcagtgatatttttattacctagtagcgtattgtagagcctccatgtgtctgtattttaacgttttttccctttgtaattcatatgtaatttcatagtgtcatgatcagagaagatgcttaatatatttaattttcttaatttagttagtcttgatttgtgacccaagatatgatttaccctaccacatgttcagtgtgcacctgagaagaaagtgtattctgttggtttgatggaatgtcctataagtatcaattaagtctgtctgcactgttatttcatttaggacttgtatttcctttttagttttctgtctggatcatctatccattggtgtaagtgggttgttaaagttccccattattgtgttattgtccatttctccttttatggctgttagaatttgccttatgtattgaggtgttcctatgttgtatgcataaatatttgtaactgatatatatttttggattgatcttgttatggttatatatttttcttccttattttttatgtctttattttaaagtttatattgtctgatatggttattgctactccagctttgttttcatttccatttgcatggaaatatcttttttcatcccctcactttcagtctgtatgtgtccgtaggtctgaagtgggtctcttgtagggatcatatatacaagtcttctttttgtatccattcagccaatatctgtcttttggttgcagtattaaggtaattattgatatggatattcctattaccattttcttaaatgtttttggtttgtttttgtaaggtctttttcttctcttgtgttcccggcctggagaagtttctttagcatttgttgtaaagctcttttggtggtgctggattctcatgtttttcttgtctgtaaaacttttgatttcttcatcaaatatgaatgagagcctttctcattagtataatcttggttgaaggttttttcctttcatcactttaagtacattctgcaactcccttctgacctacagattttctgctgagagatcaactttcaatgttatgggattcccattgttgcttttcccttgtagcttttaacattttttgtttgtgtttaacttttgttagtttgactaatatgtatctgggtgaatttctctttggatttatcctgtatgaaactctctgtgggtcctggagttgattgactgtttcctcttccatgttagggaagttttcaactatataatctcttcatatattctttcagactctttctatttttcttctgctgggagccctataatttgaatgttgggtgtttaatgttgcccaagaggtcgtgatagtttgctcaattcttttaattttttattctgagcatttatttccaacattctatcttccagctcacttatccaattactgcctcagttattctgctactgattacttctcatgtatttttaatgtcagttattgtggtgttcatcactgtttgttctttagttcttctaggtccatgttaaattttttctaatattttctccatactatattcaatattttagatcattttttactattattattctgaatttttaaggtatattgctgattttctcttcatttatttggtcttttgggattttgcattgctcctttatctgcaatgtatttctgcatcttctcattttgtttaacttactgcatttattgtctttgttccacagcctgcaagtttgtagttgttcttgtttctggtgtcttctccttgtaaatgaggttggtcccattgcttgtgtagtcttcctggttgggggattggtgcatggattggcaggggcacatcaggtggtgtgtttcaaggtatctgtgaccttagtatgactttaggcatcctgtttgctaattagtggtgctgtgttcctgtctttgtggttgcttggtatgaggtttccagcactggagccttctgaccattgagtgtagctgtgtcttagtgttgacatggaaacctctggaagagctgttgccaattaatattccctgtggcttggactgtttttggtgtttcttggccctggacttggcggtcacacctcagaatctcagggttgattcatggctaaagaaactagatcttaccagccgcatgacatggaggaaaaagaagacaataattacaaaaaaagaaaagaaaatgaacaaatactccaacaagcggtaaaagcaaaaccagacaaaaataggcaaagcaacacacacacagggaaggaaaaaaagaagtgagaacaaaaagaggagggcaaccaaataaaaaaacctcaaacccaaaccaaacaatataaaccaaactaagaaaatgaacacaaagcataaaaaattcttactaaaaagtaaaagaaaagaaaaacagatgaaaagaaagaaggaaacaaaaggaaaaagcacaagacaactcccccccaaaaggaaaaatataaaaaatatagactgtagtttaaaatggagataaaaacagaacatggataaagcaaaaataagaaaaaactacaatataacaaaaaagttaagtaaaaaatattagaaatataagcataaaaaagaaaagataaaaattagaagaataatagaacaacttgaaacaagaatagcagtaaaaataatgataatattgacctcatctgtccatttacttgcccccacagtgaacaataggcaatctctacttcttcaggaagtcttccaatacctacctctaggtaaggctctggacctgttgtgtgtactgttggaccaactcaaactctgacctggtagcatacccatgtgtacttgcccttgaagcccacagttcttaatgttagactgcctcaaattgtgggtacactcattttctattcagatattctacatatgcagtgtttaccaagccaattgtgggatttaatctgttgcttctgtggctgcatggagagaattccattttttttttcctttggttgtaccgcccctggagctcaaaagcatgatttcagtatatttagtcactgtggccagggggaaggatgaatatgacagccataattgggatgtgcagggagtgcttgtagctgtagagactggcaggaagttgtaacagcctgtggcatgctgtatgctcttccagggaagttgttcccagaccaatggaccctcaacagtggcagactgagcaggctgctgggaaggtatgggcactgtactgtgcttgctcacatgactcttggaggcagcagtggccacagtaggtctgcacctgcctaggggatccaagataggagcagcagcttgcacccacccctggagctcatgtagtgctctgatgcctgtgagtgcatggtgaaagaatctccttatggcggcccatgcctctcctcatatacaccatgcacaccacaacaatggtccctggcctctctggtgggtccagacttcatcccttggctgtggcacattatgccctagccttctcaggctgtcttcatgaagccaaccctagtcctctccatggtgtctgacctctgaaggctgagcctccattctcagcccccaattaccccaccagccaaccataagcaggcaaacatttcaggctgggcagtgctgatgcactgtccttctgtgtgggactctctctgcttagccttccacatttctgttgcacccttttctgagacactgatgttcttttcccaatctctgccgtgatgtcttctgccattctttagtagatgtactgttggagtcattccacatttaaaggaattttttatatctctgtgtggagaaggtgagcttcacatcttagtcctctgacatcttgaacatctcccaaggttttcttatctgtagattaatttttttttaaatcaagcgaatatttggataattttttattaacatcgcttcaattacatttttgttccttcttttttttttcctttcaagtatagtattcatttctctttctgatattcccatgttagttcgattgtagacgtaccacagttctttgacatattcatatttttttcactttttttatttctgtcttcagactggataatttctattgatacatttattttcagtgagtttttatatcatctcaaatacatcattgacttcctttggtaaagttttcatttcactcatatttttcagttctggaatttctattttattctcttcaatataatttttatctctttatgatagggctttctgatagctcagttggtaaagaatctacctccaatggaggagaccccagttcgattcctgggttgggaagatcccctggagaagagataggctacccactccagtattcttgcatggaaaatcccatggatgaaggagccttgtgggctacagtccacagggtcgcaaaaagtcagacacgactgagcgacttcatttcacttcacccactccagtattcttgggcatcccttgtggctcagctggtaaagaatccgcctgcagtgggggagacctgggtttgatccctgggatgggaagatgccctggagaagggaaaggctacccactccagtattctggcctagagaattccacggactgtatagcccatggggtcacaaagagttggacatgactgagtgactttcactttcatgatattttctagatatgtatcattgccatgatttaaaaattctttaaatatgatttactttagttctctgaactcacttaaaattctactttgaagtctttctaagtccaacatctatgcccacttcacaggcagtttctatttactgttttttcccccctaggatgtgaatcatacttcttgtttatgttactgaaaactggaaattttaggtaatatattttagcaactctggttactgatttatccccctcagaagttgttgattttatttacatgaaaccattataaatgtcttttgtctctagaaacaattttcatcttaatttttctaaaattagcctagccatgccagctctttagtttatgttttgtataatatatgtttttccatctttttcatgcaacatatttgagtatttaaatctaaaatgaattgcttgtagatagcatatagttggatcacattaaaaattctaccactatctgtttcttatttggtgtgtttattccacttatatttaatataaatattgaaaaggtagtgtttattataccatgtttctatttttatatatatttttgactatctattttcttgctctctttgttaaggtgtttgcctttattaccaaacatagctgttagacttcactaattcctaaattattgctctattttttttttttttacaatactctggaaagtgaaagaggagagttaaaacattggcttaaaactcaacattcagaaaactaagatcataacatctggtcccataattttatggtaaaatgatggggaaacaatggaaacagtgagagactttatcttttgggactgcaaaatcactgcagatggtgattgcagccgtgaaattagaagatgcttgctccttggaagaaaagttatgaccaacctagatagcatattaaaaagcagagacattgctttgccaacaaaggtccgtctagtcaaagctatgtttttttttcagtagtcatatatgggtgtgaggttggactataaagaaagctgagcaccgaagaattgatgcttttgaactgtggtgttgaagaagactcttgagagtcccttggactgcaaagagatccaacccgtcaatcctaaaggaaatcagtcctgaatattcattggaaggactgatgctgaagctgaaactacaatactttggccacctgatgagaagaactgactcattggaaaaggccctgatgatggggaagattgaagacaggaggagaaggggctgacagaggatgagatggtttgatggcatcatcagctcggtggacatgagtttgagcaagcttcaggagttggtgatggacagggaagccttgcatgctgcagtccatgggatcacaaagagttggacacagctgagcaactgaactgaactgaactgaactggatcataaatttctatagagtttggttcagttaaatttgtttccttcttcaggggtagtttctgagtctggtctttgaggtttgttctgaccacagaaggattctctaggctgattctttccttgtttccctctggtaaactaactggcctacagctgatcttactgcttttctggagctatcagcctcctcttacatgcttaacattacatctacattgtttctacattgttttgaacttcccaaaactaaagacagttcatttggagacagtttcagagctctcttttcttgtgtcctgcctttctcttgagaaaacctctgaggcactgctaaatagctaggggtcctctttctcttgaagtgaaaactcgctttataatctggggactagtggagacagtaatcttttaggtttgcctctcttggtgtggaacttcttacaccttctcttggtgtggagcagaggtgagggcagagtcccagtgtttttattctgatgcacctcaaaacttctaccccataaatgggggctgtgtggagaatgagaacccctgatttcttggcaaaactatcctagaaattaggctctgcaatacagtactgcggagacaaagaatggtggtaaggtagccttctcttcccagggagctatagttcttgactgtgatttgagagaaaagaagccctctgttcttgaacatacacagacaatttgttacatcgagtacaacatggaagtgggttatagttcaagtgtcattgattcttgttcttaccaaattatcttgaacaaatgtctctttactggctacatatcataaagaaaatttcagagactttcacaaatgcttttttctctacttatgccccctccccacccctcgccccagagagtctgcctgcagagttcctcatctggccattccaaggttaagctcccccaacattccttcctaattcatttatttaggtgcatcaggtcttggatgcaaaatgtgaagtttgctgtggcatatgggcttttcactgaagtacataggcttctctagttggagtctatggtcttctttctagttgtggcatgcaggcttctctctagttgtggtgcatgagctatacagtgtgtgggctcagtagttacagcatgtgacttagtgcccagtggcgtgtgtgatcttagttccatgaccagggagcaaacctgcatcttctgcattagaaggtggattctttttttttttttctcaaaattaatcagctttaataatcagggtggcaataaatgaacagtagaacatatttgattaacatgttctgatttcttgcatttccaacagccctagattaacaagtactaaaggcacaaatcctagcattcgttttgtatctttttttttaaaatttatttatttatttatttttaacttttactttacaattctgtattggttttggcatagattgacatgaatccaccacaggtgtacatgcattcccaaacatgaacccccctcccacccccctccccacaacatctctctgggtcatccccgcgcgtcagccccaagcgtgtcatatcctgcatcagacatagactggcatttcgattcttacatgatattatacatgtttcaatgccattctcccaaatcatcacaccctctccctctccctctgagtccaaaagtccgctatacacatctgtgtctcttttgctgtcctgtatatagggtcatcattgccatcttcctaaattccatatatatgtgttagtaaactgtattggtgtttttctttctggctcacttcactctgtataatcggctccagtttcatccatctcatcagaactgattcaaatgtattctttttaatggctgagtaatactccattgtgtatatgtaccacagctttcttatccattcatctactgatggacatctaggttgtttccatgtcctggctattataaacagtgctgcaatgaacatttgggtacatgtgtctctttcaattctggtttcctctgtgtgtacgcccaacagtgggattgctgggtcataaggcatttctatttgcaattttttaaggaatctccacactgttctccatagtggctgtactagtttgcattcccaccaacagtgtaggagggttcccttctctccacaccctctccagcatttattgcttgcagatttttggatcgcagccattctgactggtgtgaagtggtacctcattgtggttttgatttgcatttctctaataatgagtgatgttgagcatcttttcatgtgtttgttagccatccgtatgtcttctttggagaaatgtctatttagttctttggcccattttttgattgggtcgtttatttttctggaattgagctgcaggagttgcttgtatatttttgagattagttgtttgtcagttgcttcatttgctgttattttctcccattcggaaggctgtcttttcactttgcttatgttttcctttgttgtgcagaagcttttaattttaattagatcccatttgtttatttttgcttttatttccagaattctgggaggtggatcatagaggatcctgctgtggtttatgtcggagagtgttttgcctatgttctcctctaagagttttatagtttctggtcttacatttagatctttaatccattttgagtttatctttgtgtgcggtgttagaaagtgatctagtttcattcttttacaagtggttgaccagttttcccagcaccacttgttaaagagattgtctttactccattgtatattcttgcctcctttgtcaaagataaggtgtccatatgtatgcggatttatctctgggctttctattttgttccattgatctatatgtctgtctttgtgccaataccatactgtcttgatgactgtggctttgtagtagagcctgaagtcaggcaaattgattcctccagttccattcttctttctcaagattgctttggctattcgtggttttttgtatttccatacaaatcttgaaattatttgttctagttctgtgaaaaatatcgctggaagcttgatagggattgcattgaatttgtaaattgctttgggtaatatactcattttcactatattgattcttccgatccatgagcatggtaaatttctccatctattagtgtcctctttgatttctttcatcagtgttttatagttttctgtatataggtctttagtttctttaggtagatatattcctaagtattttattctttttgttgcaatggtgaatggaattgtttccttaatttcttcttctactttctcattattagtgtataggaatgcaagggatttctgtctgttgattttatatcctgcaactttactatattcattaattagctctagtaattttctggtagagtctttagtgttttctatgtagaggatcatgtcatctgcaaacagtgagagttttacttcttcttttccaatttggattccttttatttctttttctgctctgattgctgtggccaaaacttccagaactatgttgaatagtagtggtgaaagtgggcacccttgtcttgttcctgacttaaggggaaatgctttcaatttttcaccattgaggataatgtttgctgtgggtttgtcatatatagcttttattatgttgaggtatgttccttctattcctgctttctggagagtttttatcataaatggatgttgaattttgtcaaaggccttctctgcatctattgagataatcatatggtttttatttttcaatttgttaatgtggtgaattacattgattgatttgcggatgttgaagaatccttgcatccctgggataaagcccacttggtcatggtgtatgatctttttaatgtgttgttggattctgattgctagaattttgttgaggatttttgcatctatgttcatcagtgatattggcctgtagttttctttttttgtagtatctttgtcaggttttggtattagggtgatggtggcctcatagaatgagtttggaagtttcccttcctctgcaattttctggaagagtttgagtaggataggtgttaactcttctcgaaatttttggtagaattcagctgtgaagccgtctggacctgggcttttgtttgctggaagatttctgattacagtttcaatttctgtgcttgtgatgggtctgttaagattgtctatttcttcctggtttagttttggaaaattgtatttttctaagaatttgtccatttcttccaggttgtccattttattggcatataattgctgatagtagtctcttatgatcctttgtatttctgtgttgtctgttgtgatctctccattttcatttctaattttattgatttgatttttctctctttgcttcttgatgagtctggctaatggtctgtcaattttatttatcctttcaaagaaccagcttttggctttgttgatttttgctatggtctcttttgtttcttttgcatttatttctgccctaatttttaagatttctttccttctgctaactctggggttctctaattcttccttttctagttgctttaggtgtagagttaggttatttatttgacttttttcttgtttcttgaggtatgcctgtattgctatgaactttcctcttagcactgcttttatagtgtcccacaggttttgggttgttgtgttttcattttcattagtttctatgcatattttgatttcttttttgatttcttctgtgatttgttggttattcagaagcgtgttgttcagcctccatatgttggaatttttaataggtttcctcctgtaattgagatctaaccttagtgcattatggtcagaaaagatgcttggaatgatttcgatttttttgaatttatcaaggttattagaaggtggattcttaactactggaccaccaagaaagtaccaccacattccttttttgttgcttctttatctcaagtcaatgattgatgatatccaaagctagtaatagctccaaaacactatgaattatattaggaactgagtttttcttgaggattaattcattgtttatttatctcactctgacaaaacaaagtggtctttagcaaaataaagccaattaacacggtctttaaaactgacctgaaatgttccacaagtatggtgatgtttgtaacatttgtttcctgtatgtttggatacattagctgggcaacattgcctggtattccttatattttcctactacttccttgaggccagagtaataattataatacatagggaactcccaatttggtaaaatactcagcatgtattctaggaactgatggaaactgcagaaccacacccactgatagcctacacccatgctgattctattaggaccatgcgtgcgttaccttacttccctatactttggacctcttcacataattgtgggtatgagagtaataatgattccttgaaaagagctatacagtatttgtcaccttggatatttatttttttgtagagcatttggacttttaaatcatttaattttatcttgtatatttttaacatttttaattgggggctaattactttacaatactgtggtggtttttgccatacattcacatgaatcagccatgggtgtacatgtgttccccatcttgaacccctcataccacttccctccccattccatccctcagggtcatcccagtgcaccaccctgagcaccctgtatcatacattgaaactggacgggtgatctttttcacatatgataatatacatgtttcaatgctattctctcaaatcatcccacccttgccttctcccacagagtccaacagtctgttctttatatctgtgtctcttttgctttcttgcatatagggtcatcattaccatctttctaaattcgatatatatacattaatatactctattgatgtttttatttctggcttacttcactctatataataggctccaatttcatccacctcattagaactgattcaaatgcaagtttttaatagctgagtaatattctattgagtatatgtaccacagctttcttaaccattcacctgcggatgaacattgaggttgcttccatgtcctggctattgtaaacacgtgtctctttcaattctggtttcctcactgtgtatgcccagcagtgagattgttgggtggtacagcagttctatttccagtttttataggaatctccacactgttttccattgtgactatacttgtttgcattcccaacaacagtgtaagagggttcctttttctctgcaccctctccagcatttattttattattattattattttaaatagttaaattttttgtagactttttgatagcagccattctggctggtgtgagatggtacctcattgtggttttgaattgcatttctctgctaatgagtgatgttgagcatcttttcatgtgtttgttagctatctgtatgtcttctttggagaaatgtctgtttaggtctttggcccatttttcgattaggtcacttatttttctggaattgagctgcaggagttgcttgtatatttttgagattaattcttggtcagttgcttcatttgctatcattttctcccattctgaaggctgtctttacaccttgcttatggtttcctttgttttgcaaaagcttctaattttaattaggtcccatttgtttatttttgcttttatttccattactgtgggaggtgggtcatagaggatcctgctatgatttacgtcagagagagttttgcctatgttttcctctaggagttttatagtttctggtcttatgcttagatctttaattcattttgagtttatttttgtgtatggtgttagaaagtgttctagtttcattcttttacaagtggttgaccagttttcccagaaccacttgttaaagagatagtcttttctccattgtatattcttgcctcctttgtcaaagataaggtgtccataggggcatgaatttatccctgggctttctattttgttccactgatctgtatttctgtctttgtgccagtaccacactgtcttgatgactgtagctttgtagtatagtctgaagtcaggcaggttgattcctcctgttccattcttctttctcaagattgcttcggctattccaggttttttgtatttccatacaaattgtgaaattgtttgttctagttctgtgaagaatactgttggtagcttgatagggattgcatagaatctatagattgctttgattcatatactcatgttcactatattgactcttccaatccataaacatggtatatttctccatctatttgtgtcctctttgatttctttcaacagtgttttatagttttctatatataggtcttttgtgtctttaggtagctttactcctaagtattttattcttttcatggcaatggtgaacggaattgtttccttaatttctctttctgttttctcattgttagtgtataggaatgcaagggatttctgtgtattaattttatatcctgaaactttactatatccattgattcgctctagtaattttctggtggagtctttaggattttctatgtagagaatcatgtcatgtgcaaagagtgagagttttacttcttcttttccaatctggattccttttatttctttttcttctctgactgctgtggctgaaacttccaaaactatgttgaatagtagtggtgagagtgggcacccttgtcttctttcagactttaggggaaatgctttcaacttttcaacattgaggataatgtttgctgtgggtttatcatatatgacttttattatgttgaggtatgttccttctatgcctcgtttctggagggtttttttttttaaatcataaatggatgttgaattttgtcaaaggctttctctgcgtctattgagatgatcataatatttttatctttcaatatgttaatatgttgtatcagatattatatattgaagaatccatgcatccctgggataaagcccacttgatcatcttgttaatgtgttgttagattatgtttgctagaggtttgttgaggatttttgcatcttagctcatcagtgatattggcctgtagttttctgttttttgtggtatatttgtcaggttttggtattagggtcatggtgggctcatagagtgagtttggaagtttaacttcctctgcaattttctggaagagtttgagtaagatagatgttagctctgctctaaatttttgatagaattcagctctgaagccatctggtcctgggcttttgattgttggaagattttttattacagtttcaatttctgtgtttttgataggtttgttaagattttctatttcttcctggttcagttttggaaatttacacttttctaagtatttgtccatttcttccaagttgtccactttatttacatatagttgtttacagtagtctcttttgatcttttgtatttctgtgttgtctgttgtgatttgtccattttcatttctaattttgttgatttgactcttctctattttttcttcctgaagagtctggctaatggttgtctatgttatttgtctactcaaagaacctgcttttagctttgttaattttggctatggtcttcttggtttcttttcatttatttctgctctaatttttattatttctttcctctactaaccctgggtctcttcatttcttctttttctagtagccttagatgtagagttaggttatttatctgatttttctcctgtttcttgaggtaggcgtgtagtgctatgaaccttccccttagcactgctttaactgaatcccataggttttgggttgctgtgttttcattttcattcatttctatgcatattttgatttcatttttgatttcttctgtgatttgttggttattcagaagtgtgtttttcagcctccatatgtttgtatttttaatagtttgtttttcctgtagttgacatctaaaggtgcatgatactggatgcttggggctgatgcactgagacgacccagagggatggtacggggagggaggagggaggagggaggggggttcaggatggggaacacgtgtatacctgtggcagattcatgttgatgtatgggaaaaccaatacaatattgtaaagtaattaacctccaattaaaataaatatatttacgtatataataaaaaaagaaaaggcacttgagatgatttaaatcttttgagtttacaaaggccagatttatgccccaggatgtgatctatcctggagaagggtccatgtgcacttgagaaaatggtgaaattcattgttttgttgtaaaatatcctatagatatcaattagatctaacgggtctgttgtatcatttaaagtttgtgtttccttgctaattttctgtttagttgatctatccataggtgtgagtgggttattaaagactaccactattattatgttgctgttaatttcccctttcatatctgttagtattttccttacatattgcagtgctcctatgttgggtgcatatatatttataattgttatatcttcttcttggattgatcctttgattgttatgtagtatccttctttgtctcttttcatggtctttatttcaaagtctattttgtctgatatgagtattgctactcctgctttcttttggtctccatttgcagaaaatatcattttctagcccttcactttcattctgtatgtgtcccttgttttgaggtaggtcttttgtaaacagcatatatgggaatcttgtttttgtatccattcagccagtctttgtcttttggttaggctattcaacctctttatattaaggcaattgttgataagtatgatcccattgctattcatttgttgttttgagttcgagtttataaacattttctgtatttcctgtctagagaagattctttagcatttgttcaagagctggtttggtggttctctctgcttttgtttgtctgtaaagcttttgatttctccttgatatctgaatgagattcttgctgggtacagtaatctgggttgtagatttttctctttcatcacttaaagtgtgtcctgccttctcttcttgcttgaagagtttctattgaaagatctgctgttatccttatgagaatccccttgtgtgttatttttttccccttgctacttttaatatttgttctttgtgtttgatattcattaatttggttaatatgtgtcttggggtgttttgccttgggtttatcatgaatgggactctctgggtttcttggacttgggtggctatctccttccccattttagggaagttttcagctattatctcctcaagtgttttctcatggcttttttttttttttggtcttcttcttctgggattcctatcatttgaatgttggggtgtttaacatcgtcccagaggtgtctgaggttgtcctcatttcttttaattctgttttcgtttttcctctctgcttcatttatttccaccattctaccttccacctcacctatcttatcttctgcttcagttattctactgttggttccctccagagtgcttttgatctcagttattgcagtattcattattgattgactcttttttatttcttctaggtccttgttaaactttttttgcatcctctcaatccttgtctccagactgtatctgtaactccattttgttttcaagattttatatcacttttactatcattattctgaattatttttcaggtagattccctatctcctcctcttttgtttggcttggcaggcttttatcacgttcctttacctgctgatatttatctgccttttcatattgtttagattgctgtgtttagggtggcctttctgtatactggaagtttgtggttcctctttattgtggcgtttcctccctgttgagggggtgttgaaggagtggcttctcaaggtttcctggttaaggaagcttatgtaagtgttctggtggttgaagctggatctcttctctctggaatgcaatgaagtgtccattagtgagttttgagatgtctgtgggtttgttgtgacttttggccgcctatattttaatgctttgggttatgttcctgcattgttggaaaattagcttggtatatcttgctcttaaatttgttggctcttgggtggagcttggtttcagggtaggtatggaggcttttggatgccctcttgtcaatttaatgttccctggggtcaagagttttctggtattctcaagttttgaatttaagcctcctgtctctgggtttctgtcttattcttacagtaacctcaagacttctcagtccatacagtaccaatgataaaacatctaggttaatggtgtaaagcttctccacagtgagggacactcaaagaggttcagagagttacatggagaaaagaagagggaggagggagatagaggtgaccaggagaagagggggaattaaaaggggagagaggaatctcgccattaagcaattccttatttgctctccacagtttggagccctcagagaggttcactgagttccatagagaagagaagagggaggaaagagataaagtcaaccaggagaagaggaggggactcaaaaggagagagaccaatctagctagttatcagttccctaagtgttctccacagcctggaacacccaaagagattcagagttaagtagagaagggaagggcgagggaggagatagcagtgacccggtggagaaaaaggagagacaaaaggggagagagcaatcaaccaagtaatcacagtcttaagtaaaaatgggtactgaagattggatttttaaaggtacaaaattgataacaaatatcaaaagcaaagatgaaaaactagactagaggttagactctcaaaaatacaatattaaaaaaataaaacaaaatctcaaaaattataaaaaaatatatattaaatttactttacaaatagggtcttttttttggcaaggtaatagcaggttttaaaaatgaaaatttaaggagtaataaagaacttaaaaagtaaaaaaaattaaaaattaaaaaatgataatagtaaagtatatctaggaatatctctggagttgttgagggcagtgtggggtcagttcagtttcagatagttccttgttccagcttatacttcttcttaggtctattgcccccttccagtgtagtcaatgctaactacagggttataatctgttgcacctgtcacttccaaagcggttccctattctttgtttattttggcttcctctgtttgaaggtctcttcagtgtctaatttccacccagacacaagggggcaaaggtggtcatttatttaggctcacttgttcaattgtgctgcggggagggaggaacactgcaaacaaatatcattggtgtgtgtggggagtgcttgcagtgtctgggccacacttttttgcccccactcacagtgtgtgtactttcctggtctacactgctcgggctccaggttgctctgcaggggaactgtctaaagcaggccctgggttgtgtgcacgtcccaggtctaagccactcaggttcaggttcttgggtacttgccaaaggcacagacttggttgggcctgcgctttgtgcccttcccagatccaagcagctcaggagaccaggtgcttggtgagtgcacactccctaggtggggcggtgcatcttatcactgcccccgtcccagcctctcagtttcctgggtgcacagggggagcaccgtctcaggtgtgctgtgtgtctcctctggggagctgatctctggctgtgaccctcctggtggatgtcaaccgtccaggaccccaggaagacttggttagcaactgggagcctgctcaaagtttggtggaggatgccctctctgggaccaagtttgccccctgccttctggctctggctgttgactgcctgcctccctgcctctggtgggggatgggccagtccgctaagggctagctctcctctggtatttgctcagtcttttgttctgtgagcgggcctggcagtgcctaggttagagcttttcatgggaaggttttctctctcccacggtttgggttgctatctcacattagctccctcagattgccctcagggcattcaggcctggtcctttccctaagcaatgcagcctgcacctccctgtttagcccctgcttggtggtggcggacctgagcatctgggctacttctttgctgggaggtgtggtttggtgtgtaatctgtttgttttatttatttatcttttcctccttgttatgttgccctctgagattccaaaactcctcacagatccaccagtgagagagtttcctggtgtttggaaacttcttttttacgactccctcccaaggatgggtctctgtccctaactcttttgtctctctttttatcttttatattttgtcctacctcctttcaaagacaatgggctgcctttctgggtgcctagtgtcctctgtcagctttcagaagttgttttgtggtatttgctcagcattcagaccatcttttgatgaatttatgggggagaaagtggtctcccggttctattcctttgccatcttaggaccactctcttcttatatcttctttatagaacattttattctctttgactggttcttgtttcttggatattcaggggagccacactgtgcttcttaaatcagtttccttgagaccaggaaaagctattatgtctgttttttatcattatgttcattgttctgcaggagcatcctagtggtaaaaatcaggtaatttctgaatctgagcactacactgagattctagctgtttatttcataattgttgacttaaaaaacagtcacagcctaaaagttgagtgttttgttttagttggtgagaatttttaggacttcaagcctggaagatagcaattcttggagaaaattgctctgaggatgtgaggagagaagccagcttatatagaagctctacaacaataggcaggcagtctgaatatcaaaaggttattgctcattaaagaaaaccagatatcccacttaaggaattaagcactttttggtatatatgaagaagcaagagtctagggtcaccaaaataatttctttaatatggatctcaactatcctggggccagtgttctgtgtttttcacatcatgagctcccttgtgtgcaacatagggagtggcttcaatatgatgtctgttagatcacaggtattctccttcctgagtgcccttaggactcaggaactcacattggaggactaaaattactgatgactatgacatccttgtttactgtttgttttttcagttcctaaatcatgtccaattctttgtgatcccctgaactgcagcacgccaggctttcctatccttcactatctcccagagtttgcttagattcatatccaatgagacggtgatgctatctaaccatctcatcccctgctgcctcctttttctgccttaaatctttcccagcatcagggtcttttccagtgagtcagctcttctcatcaggtggccaaagtattggaacttcatcttcagcatcagcccttccaatgagtattcagggtttatttcctttaggattgactggtttgatctccttgcagtctaaggggctctcaagagtcttgtccagcaccataatttgaagacgtcaattacttggcactcagccttctttatggtccaactctgagatccatacaggattgacagaattatagcattgactatatggagctttgctgacaaagtgatgtctctgctttttaatttgatgtctagcatattatcataatttttcctccaaggagcacatgtcttttaatttctggctgcagtcaccatctgcagtgattttggagccaagaaattaatatctgtcactgtttccactttttctccatctatttgccatgaagagatgggaccagatgccctgatattagttttctgaatgttgagttttaagccagccttttcactctcctctttcacccttcttaagaggctctttggttcctcttcactttctgtcagtagagtggtatcatctgcatatctgaggttgttgatatttctcctggctatcttgattccagattgtgattcatccagtccagtcagtattttgcatgatgtactctgtatgtaagttaaataaacagagtgacaatatacagccttgttgtacttcttacccaattttgaaccagtaagttcttccatgtaagttctaactgttgctatttaacctgcatgcaggtttttcacaagacagtaatgtggtttgatattcctatttctttaaggaagaaattgttagaaataatgggggatatttaatcaagataaataggatagcctatcaggaacatataacagagatattcataataaaacattaaaatagttgattcattaaattataaaataatttcacaatcatagaaggttttatgacacttctttgaaaattggtaaaagatctaaacaaataagtcatgaaaaccataggagatatggaaagcattatcagccattttactttaattgccattggtagaactctacatcttactgcatatacacatgataaattactaagattacaaatttcagtctaagaactacatactctgacagcaacaaatttaaatgaataacaaccagagatctggaaaaaccaatattttggaattcacaaagatacttctattcaaatcatgagtcaaagtcaaatctaagggggaaatattttaaaatgaatgtcaatgaaaatgtaacttatcaaaaaattttggatgatgctaaagctctctgagtgggaaacttattgattaaatactcataataggaaaatgaaagatctaattccagctatctaacattccacttttaagaaaatggaggagaaaaaaagagcaaaggaaaaccaaagtaaatgtaaggaaattaaagataaggtcagaatcaacaaattaggaaacaagcagacaatatatagaaaataagttaagccaaacttcgttctaagaatttttacaaattgacaaacttctacctagatagatcaagaaataaaacagcagaaagcaccaatatcgtcagtaataaggagctatcaacataaacactacaaacaataaaagaataataatattactgttaacaactttatgccaataaattccacaacctatgtcaaaggaacatattcttgaagaatatatggtcagaatagatgcttcatgtgatttctattctcttaaattttttgagacttgttttggggtctagcatgtgatctatcctggataatgtctcatgtgcatttgaaaaaatatgtatttgggctactttcaaatggagtgttatatatatatagtatttggtaatatgtcacttaaggccagtgtttcctgattgattttctgtctattgatataagtgggctattaatattccctgttaataatttgtgtctgttaacatttgccttttatatttaggtgtttctatgttgggtgtatctatatttacaattgttatgtcttgttcttggattgagcccatgatctttatgtaatgttcatcttagtcttttattacaatatttgtttaaagtctcttttgtctgatataagtattgctacgtttatacttctattttcaatggagtacttttttctatcctttcactttcagtctgtgtgtgtctttagatctgaagtgaatctcctgtaggcggcatatgtttattggctcttgtttttttttttttaattcattcagccactgtttgtctttttttaaaaatataaatttatttattttaattggaggttaattactttacaatattgtattggttttgccatacatcaacctgaatctgccacaggtatacacgtgttccccatcctgaacccctctccctcctccctccccataccattcctctgagtcatctcagtgcaccagccccaagcatccagtatcatgcattgaacctggaatggcgattcatttcatatatgatattatacatgtttcaatgccattctcccaaatcatcccaccctcaccctctcccacagagtccaaaagactgttctatactaacgcatatatatggaatttagaaagatggtaatggtaaccctgtatgtgagacagcaagagagacacagatgtatagaacagtcttttggacactgtcttcattggagatttagtctatttacatttaaagtactgataggtttgtacttattaccatcgccttaattgttcttgcagtcctttttagttcttttctttcttttttgttcattcctttgtgacttgatgatttagtttcatgcttgaatgcccttctctcttttttgtatgtagccattgtaggtttttgctttgtacttagcatgaggttcataaatatctaactatcaatctgtctaattatctatctgtctatatatgattattttaatttgatgatcttttcaatttgaacattaacattaacatattctcgcctcactcatgctttttacatttgacctcatattttatgcctttcttattttgtgaatcctgtatctacttattgtagacatgaatgatcttattacatcttttaacctttctagtaaatttataagtagtttatgtactacctttgctgtatgtttaccatcaccaatgagagtttttttcctttcataattttcacagttctagttgtgtttttttccacttagagtagtccctttaacatttcctgtgaagccactttggtggtgctaaactcagcttctgcttgtgtataaagctatgtctccttcacatatgagtgatatccttgatgggtaaaatattcttggttattggttttttccttttatcactttgtatatgttgtgccacttccttcttgcctgccgtttctgctaaaaaagtcaacagacagtcttataagaattcctttttatgtaactggttgtttttcccctgctgcttttaagattattttacttttgccattttagttacaatgagtcttcgtgtgaatctcttttgattgatcttgtttgaaactctctgtgattcctggacctggatatctattcttttccctggttagggaagttttcagctcttatgtctttaaatatgtcctctgcccctttctctcttctccttccaggatccttgtaatgcaaatattagtatagttaaactgtcctcattcttttaatattcttttttctgttcaactttgatgatttatactttatcttccagttcactgatccattcctctgtataatctcaactatggttgattccctataatgggattttaaaaaaaattttaatttttttgtattcttcagttttgtttgttctttatattttctaatatttttgttaaacttcccactgtgctcattcattcttctcatttatttatcatctttgtgatcattaccttgaactctttattttctatgttttccatttcactgtagtataattgacatgtaacaatagtttccagtgtacaatatattgatttgatatttgtatgtattgtgagagttggactataaagaaagctgagtgttgaagaattgatgcttttgaactgtggtgttttttttttttttttttaaatttatttatttatttatttttaatttttactttacaattctgtattggttttggcatagattgacatgaatccaccacaggtgtacatgcattcccaaacatgaacccccctcccacccccctccccacaaatctctctgggtcatccccgcgcgtcagccccaagcgtgtcatatcctgcatcagacatagactggcatttcgattcttacatgatatgaagaagactcttggagagttccttgaactgcaaggagatccaaccagtcaatactaaaggaaatcagtcctgaatattcattggaaggactgatgttgaagctgaaactttagtactttgggcacgtgatgtgaagaactgactcactggaaaataccgtgatgatgggaaagattgaaggcagggggagaaggggacaacagaggatgagatggttggatggcatcaccgactcaatggacatgagtttgagtaaactccaggagttggtgatggacagggagacctggcatgctgcagtccatggcatcgcaaagagttgggaatgactgagtgactaaactgaactgtgaaatcatcacccactgttcttttaactgttctaccacttccaggataatataatttgaatcataccatatatagcttttcagtttggcttctttcacttagtaatatgcatttaaaatttcttccagagcataaagaatccacctgccaatgtaagagttgcaggtttgattcctgggttgagaatatcccctggaagaggaaatggcaacccactccagtattcttgcctgaaaaatcccatgacagaggagcctgccaggctatagtccatggggtcacaaagagtcagacatgatttgagtaactattcacacatgcacgcatgcatgcttgccatggctcttcatgcttgatttcttttcaacactgaataatattctattgcctgaatgtactgcagttgatttatctatttattgaaggataaatatcttggttgtttccaagtttgggtagttatgaacaaaatgctatatgcatccatgtgctgagttttgttgatggacattatttttcagatcctctgaataagtactaaggagtgtgattactgaatcatatggtaagaatatgtttagttatgtaaggatttgccaaactgtctttcaaagtgtggcatgttgaattctcatcagtaatgtataagaattacaattactccacaatgctagcagcacttggtattggtgttttagattttggccattctaataggcatgtagtggtgtttctgttattttaattttaatttcactgttgtcatatgatgtggcatatatttttatgtttgtttaccatctgtatatcttctttgatgaggtatctgttaataactttggcctattttccaatcaggttgtttgtattcttcaaaaaaaaaaatcggagtagggttgatttacaattttgagttagtttcttctatatagcaaaatgaatcagttatatgtatacatatatacacttgtttttagatactgtttcaatataggtcattacagattatttagtagagttgcctgtgctatccagtaggttcttattagttatctatttaatatattgagctctctattgagtagattgctgctgctactgctgctgctaagtcgcatcagtcatgtccgactctgtgagactccggagacagcagcccaccaggctcccccgtccccaggattctccaggcaagagtactggagggggttgccatttccttctccagtgcatgaaagtgaaaagtgaaagtgaagtcactcagttgtgttcgactcttagcaaccccagggactgcagcctaccaggctcttctgtccatgggattttccaggcaagggtactggagtgggtcgccaggatgtccatttaattcttctgaggttttctcttgttcctttattttgtttagatgagaatgtatttttctgtcttttcattttgcctaattctttctgtttatttctatatattaagtaggtcaaatacatttcctgatcttggtggaatgccttgtgtaggagacatgctacagggcccagcagcagggccctgagctatacgctctagggtccctcaatatagggtgtgttggcccttctgttttgatgagaccaacttctgtgggaatgctggtaggtgggcctggcccctggcctggctgggtaccaggtcttgccttatgtggtggttgctgacctactgatgggtcaatctgggtctgaggatcccctgaactagttctggtgcattggtgagtgagtagggccatgtcctggtacagctaacttcagggatggtggggcctgtatttggtgtctgcctgctagtaggtgggtaagcccccagcactaataggctagaaagatgattcaaaaatggtagttgtgagcaccagtatcctcatggtacaataaacttccaagaatgactcctaccagcatctgtgtcccgagggagagtctaagttatctcctacaatggaaaagctctctaaggtcagcaaatgggtctgactcaggctcttttcaaatgactccttctttactgggactcagagtatgtgagatttcgtatgcactttttacgattggaatctctctttcctatagccctttggctctgctgcatgcaagccccactggacttcaatgccagatgtttggggagatagtcttcctggagcagtatcctgaataggggagccgaatgtgaggcttggactcctcacttcttggggattacttggaggataattacttctggactcatgattatcctcccatttgtgagttgccatactggggtgtgtgttttactgtgacagtactactgtgctgtgctgtgactgtaccactcttacccatcttgcagttcctttatatctttagttgctgaaaatattttctgttagttgtcaggttgttctcatagatagtttctctgtgaatagttgtaattatggtgtgcccatgggaagaggtgatctcagagtcttcctactccaccatcttagtcatatcccatttatgaacaactaattttaaaaaaaagtgccaaagagttcaatacggaaaggaacatcttttcaacaaatgttgctgaatcaattggatatatgtatgaaaaatgaaaagagtgctacaattaattttatcattttgtagtttcattcctatatctgcttagcagtctctttagagatgctgttttcattgctaaattggtaacttgtgacttctattctttctgtcctcctctttcttcttttctatttattagtctccattagcaggcacactttgttagccatttctctcaattgaatatttttttctattttatcattttcttcttcctttgggttaatttgttgttattttttaccttctgaaaatgaatgcttagctttcttttcatgctttatattttcaaatatgatatttaatgtcataaatttcatttgcatagatttaactacattcttccaagttattatatgtattttgattgtgttttattcattcaaagcttatttttaatttttattttgatttcttaaatcatgctcttttttcttaattagccaatttccctagttaattgtggatatgtcttattgtccttgcagttctatggatgatttatatattttgaggctgtgttactaagtatatagaaatttagaattattaactgttcatgaggggtagaaagttagaaactttcatttttttccctatcctttaatttcaaattttcttaccttatattttaaatatatctttggaagacagcatgtatttgggtataaaacatatttttagtacagtctgacaatatttagctttttaataatatatttattccattactcttaatgactatattaatacatttgagtttaaatctgctatctttttattagtctgaccttgtatacttttattttcaatctttttttcttctttatctgagttgattaaggattatatagaatttgatttcccattttttggcagttaatattctcttttagtggtttgctaaagaaatgacaacttacattcttatctcatcaaaagacaaatattagctgttacttttacactcttcaactctagtttctttaaacaaaattactctactatatctggtatctatagattctccttcttgcatgtttgtgttatatttaaatctgttttggttatttatcctctcattcatgttacttgactacttgtactcttgactacttgatcttaatctgtggaactcctgagaggctacatttggggtgttctcttgcaggaactgcttgtgtttgcctctactggatgccaggggataattttcagcttgtttcaaggctctcagttcagggtgagaatcattggtttcaacctacaacattgctgctgcccacacttcagtacagtggttttagtgactggttggcctctgtgctaagtcgcttcagttgtatccgactcttggtgaccctatgagctgtagcccaccagggtcctctgtccaaagaattgtcaaccaagaatactagagtgggttgtcatgccttcctcgaggggatcttcttgacccagggatcaaacttgcagctctttacatctactgcatgggcagatgggttctttaccactagtgccacctggaaaaccctgattggcatctagctcaaggcaatttcatccctccttgccattcaaatctgcagctcccagccagctgcactaaacattttattgggaaaggagattctttggaaaacattacattgtcttgctaatccaataaagcctttaaagtgtactttatccaatatctatttatttgactgcagaagggagcttaagacctcttagtcccccatttggaaggaattagtggcactgatttgttgtctaatttcagtggggcagtgatatcagatcattactgaaccagtttttttgcaacctgtcactgaaacggaaggataataatgtttcatattgtgacggatttgcatcatattacacaatcatcttttcactatataaattgatggaggagacaagtgatgtatatagtcttcaactatacataaactttagtttgctgaagtgtaaaatatatattatatatttgtaactttagacttgatagaattaattattacagttatttcattcattattttataaaggaattacttattgactttttgtattctcgtattttgactttattttctcaattagatcagttagtcataaatgaattattagatgacatgttcaggtattctgaagattttcctttattttgtctgacactgttgccacagaccattgtggtaattatatgacaataaatctataaatagatagttgtctttaggcatacattaaggtgtacaccaaatacagtatgtatgtatgtgtatgtatatatagcatgtctatttcatatctagcaaaagttttaatttggcttagacctttaaattttctttcaatcaatagcatataaaaataatttttccattacattcagttttttttccaaattaaaaattttgtttattttagtaaaagttatattactataaatcaatgattattaacaagggacatttttttcctttcttttttttcctttctttaaaattttattttactttattttactttacaatactgtattggtcttgccatacatcaacatgaatccgtcacgggtgtacatgagttcccaatcctggaccccccctcccacgtccctccccatatcatctctctgggtcatcccagcgcaccagccaacaaggggcaattttgtagtgacatttttggcgctgtctggagatgtttaagttgccacactgggtcagagaaggtacaacaggcatcaactggctagagaccaggaatgctgttaaacattcatcaatgaacaggacagatcctgaaacaaagaatgatcttgttcctaacatctctttaggctgatatcaaaaaccatgctctaaataagcttatatttatgatttagttgatatagcaatcttgattgatcactgtgattgaagacccaatattttggctccacagtttttgtatgaagcctaacgaagagctgtacatatggatgggaaagttataaacttatagtcaagctgataatttcagtattttaaattatgcagcatgatgacatcacagtgaaaagcccacaatttgagaggtgctaggtagatatgtcacccctgtgtctggtttcctattggtgtttcctgtccaggatctgtcatggacagcagaagatctcatctttggttgagacaaagctggtggactgagcagaatggctcctgcacttatatctctttcatccaattctttttcctaactttttctgtaaacaattttccgaatctgtctagtattatgaaaagagtcacatgcttcacttaaatagacttttctttaagttataaaaaccatgaattttcttttttgttttctaacactgtgaggtttaaactttaaaaagaaatttgaagtgcaacttactagaaagacattctatatggagagatatttcattaaatacaggtgaacagtactcccagagagcaatcttttttaaaatgttttttatttttttaaagattgtgttgtttttaggaattaatatatgttgagctgaatatatcaatacatttatctgacctacattgttttttaatttttttacatctctgttttttaaaattggaggataatagctttacattattgtgttggattctgccatcaacaattcaaatcaaccattatatatatatatatatatatatatatatatatatatatatatatatattatcccctcactctttagcttccttcccaacatgcccccatccaacttatctagtctgtcacagagagcctggctgagctctgtgttacatagcaacttcccattagctatctatttttacacatggtagtgtatgtatatcaatgctaatttctcaattctttccaccctctctttctcctgctatgtctgcaagtttgttctccatgtctgtctctattcctaccctaaaatagattcatcaataacatttttctagattccatatatatttaatatacaatatttgtgtttctctttctgacttactttattctctataactggttctacattcatccacctcagttcagctgattagcattccttccttttcatggttgagtaatattccattttattctaacacaactgctttatccacttatttgtcaatggacatctaggttgctcacatgtccttggatactgtaaatagtgctgcaacgaacactggggtacatatgtctttttgaattctgattttctcagggtatatgcccattagtgtaattgctgcattatatgtgattccttggtggctcataccctcctggctcagatggtaaagagtctgcctacaatgtgggagacccgagttaaatctctggattgagaggatcccatggaaaaggaaatggcaacccactccaatgttcttgcctggaaaataccatgaatagaggaggctggtgggctacagtccataaggttgcaaagagttggacacgacttcactttcatggtagttttttttttctttatttcctggttctttaagtaatatctattctcttctccattgtggcaacatcacttcccaccaacagtgcatagagttccctccacaacccctccagtatttgtttgtagattttttaatgatggtcattctgaccggtataaggtgatacctcattgtagttttgatttgcatatctctaataatgaacaacacatcttttcaggtatttgttggccatcggtatgtcttcattggagaaaagttttgccccccccccttttttttaggtttgtatgttctgcccatttttcattgagttgtttgtttatctgcataagccacttgtgtattttggagattaatactttatgagttgttttatttgaaaatattttctcaaacgctcagtgttgtcttttcagttttttatattttttttgctgtgaaaaatctttgggcctcatttgtttatttttgcttttatttccattactccaggaggtaggtcaaataggataatgctgcaattaatatcaaagagtgttctgcctatgttttccagtaagagttttagttttatagtttctggccttacatttaagtctttaatacattttgagtttattttttaatatggtcttaggaagtattctaatttcattcttttaccagtagctgttcagttttttttttttttaatttttatttttactttattttactttacaatactgtattggttttgccatacattgacatgaatccaccacgggtgtacatgagttcccaatcctgaaccccccctcccacctcccaccccatatcatctctctggatcatccccatgcaccagccccaagcatcctgtatcctgtatcgaacatagcctggcgatttgtttcttacatgatagtatacatgtttcaatgccattctcccaaatcattccaccctctccctctccctcagagataaatgtataaaaagttcgttttatacatttgtgtctctttttctgtcttgcatacagggttatccttaccatctttctaaattccatatatatgtgttagtatactgtattggtgtttttctttttggcttacttcactctgtataattggctccagtttcatccatctcattagaactgattcaaatgtattctttttgaaggctgagtaatactccattgtgtatatgtaccacagctttcttatccattcatctggtgatggacatctaggttgtttccatgtcctggctatttaaacagtgctgcaatgaacattggggtacatgtgtctctttcaattctggtttcctcagtgtgtatgcccagcagtgggattgctgggtcattaccagcaccatttattgaagaggatgtcttttctccatcatatatatttgcttgtagtagtctcttacgatccttttcatttctgaattatctgttgtaacctctccctttttactgctaattttattgatttgtgttgtcctttttttcttgatgattctgactaatggtttgtcaattttatcttctcaaagaactaggctttagctttattgatctttgttattttttcttcatttatttttcatttatttcacatacatttcatatatttcatttatttttgctctgatctttggtttctttccttccactaactttggattttgttgttgttctttttgtagttgctttaagtgtaaggttgtttatttgattttttcttgttccttgagttaggtttgtatcgctgtgaacttccctcttagcactgcttttgcttcatcccataagttatagattgtcatgttttccttgtcatttgtttatagattattgttttagtttcctgtttgatttcttcagtgacctcttggttagttaggagtgtattgggcagccttcatatgtttatgttcctgttaattgatatttaatctcatagtgttgtggtcataaaaatacttgatatttcatatatttcatttatttctgctctgatctttgatttctttccttccactaacttttagttttgtttttgttgttgctcttcttcttttttagttgctttaggtgtgatgttatttatttgatcttttcttgttccttgagttaggtttgtattgctatgaacttacctcttagcactgcttttgtttcatcccataagttatagattgtcacgttttacttgtcatttgtttctagatattgttttattttctgtttgatttcttcagtgacctcttggttagttaggagtgtattgagtagccttcatgtgtttgtcttcctgttaattgatacttaatgttacagttttgtggtcagaaaaaatgcttgatatgacttcaattttcttaaatttatgaagagttgatttgtaacccaagatgtgatctatcctggagaatctcccatgtgcacttgagaaaaaaagtgtattcttcttcttttgatggaatgtcctgaaaatatcaataggttgatctggtctaatgggtcatttaaggcttacatttccttattaattattcctctggatgatctgaccattaatgtgagtggagtgttgaattctgctactattactgtggtactgttgatttcccttttcataactgttagcatttgccttatgtattgagatgcttctatgttgggtgcacatatatttataataactatatcttcttcctggattgaatccttgatcattatgtagcattctttgtttcttgtaataatctttaatgtttattttatctgatatgagttatagtactccaattgtcttttgactcccatttgcatgggatatctttttctaggctccctttcagtctgtatgtgtccctagactgaagttaatttcttgtagacagcatatagctagatcttgctttttgtatccattcagccagtctatatctttttgttggagcatttaatccattaacctttaaaggtaactattaatatgtccaatcttattaccatttactttattgttttgggtttgctttcgtaggtctttttcttctcttgtgttctctgcctaaagaagttcctttagcaattgtaaagctggtttggtggtgctgaattttcttaacttttgctaatgtgtacagcttttgatttctccattgaatctgaacaagatccttgctttgtagtgtaatcttagttgtagtttttttttttcctttcatcactttaagtatatcctgtcacttccttctggccaacaaattttcactgaaagatcaggtgttaaccttatgggaattcctttgtatgttgttgcttttcccttgctgcttttgatatttttgtgtgtttgtgctatatgtgccttggtgtgtttctctttgagtttgcctctatgggactctttttggattactagacttgggtggctatttcctttcccatgttagagaagttcttgactatcgtctcctcaagtattttcttatgccatttatttttctcttctttctctgggactcctgtaattcaaatattggtgcacttaaagttgtttcagtgctttctgagactgttgtcatttcttctcatcctttctttttcttttttattctactctgcttcagttatttctaccattctatcttccagctcacttgtctattcttctgcttcagttattctgctattagttttccctagcgtattttttatgtcatttattgtgttgttcattgctgattgttcattatttctaggtccttgttaaacatttcctgtatcttttaaatccgtgcatcaattctatttatctgtgcctccattctgagattttggatcatttttactatcattactccgaattgtttttcaggtagactgcctatttcctcatttgcttggtcttgtggatttttaatttgccccttcatctgctgcaagttctctatcttctcattttgtttaacttatcctgtttggggtctcctttccacaggatgtaggattgtagtttctcttacttgtggagtcttccctcagtgggtggggttgggtcagtgccttgaagagattcctggtgggtgaaactggtgcctatgttctgattggtgaagctggatctggtacctctgatgggcagtgatgcatccagtggttttttttttccttctgtaggggaaggggtgtctgtgagcttagtatagttcaggctatactgtttgctagtgggtggggttgtgttcattttttctagttgtttggcctgaggtgtccagcactggaactttctggctgttgggtgtagccaggtcttattgttgggatgaggcctttggaagaactttctctagttaatattccatggggtcaggagtactcttgtggtccaacatcctggattcgggtctctcacctcaaaagttcaggtccaatccattgctggagcaccaaggctccacgaactacttggcacagaagataaagaaaaagaaaaaaaatcaatcaaacaagaaaataacaggtagacagaaccccaagaaatagagcaaaagcaaaactaaacaaaaacacacaaagaaatgcacactcaaactcacaaaaagaagaacaaagaagataaaggaaacaaaaatgaagagagctattgaaccaataaagaaacccataaatgtaaaaaactagaagacaaattagcaaaaacacagcaccaagatgaaatcaatgtggaaagtaaacttaaaaaaaggcaaagaaagcataaaacatatacaccaatcaagcaaaagcaaaaaaaaaaaaaaaaaaaaacagagaagaaaacaaaagaaaaatacaacaagcaaataaagtaaaaatagtgaaagtgaagttgctcagtcgtgtctgactctttgtgaccccgtggactgtagcccaccaggctcctccttccatgggattctccaggcaagaatattggagtgggttgccatttccttctctaggggatcttcctcctgcattgcaggcagacgctttaacctctgagccaccagggaagcccaaagtaaaaatagagaaatataaaatatagttaaaaataagattaaaaacaaagtaaaacaaaggaaaaaataacaacaaaaaggtgtgataaatgaaaaagtacagtagaaataggggaaaaataaaattaatttatttaaaaataatgtgcaagaaaagaaaaaataaataaaaagtaagaattaaaaaatattaattaaaaatcaacaatacaaaaacaaaaatgaaaaacattacatatatacatagagagagaaagagtggtagtaagaagacaattttcctgtggcttcagctgtccatttccttgtccccacaatgagctccagccaatctaccttctcaggacgtcctccaatgtttctaagaacgtctctagacctgctgtgggcactgtggggccagctcagattctgatttggccttattctaccttgtacttgcttccaaagtccacagttgcccctgaattctacagcttcaaatatgggaacactcattgtctattgagatattccacaggtgcagagtttaccaagacagttgcaaggatttactccactactcttgtcactgcatgagcaaattcccttcatcttgtttggtcacacagctcctggtgctcagctttgcttttgtcccagttttgtttgtcctactgtttataggccgccctccattgtctgtttcctgtccagacaaaagggggcaaaagcagcagctaaggccgattagggctcacttgctcactcaggccaggaaaagggagggaaactgcagacacaactgggaagtgttggtagtgcctgtggtggcagaggtctgtaggaagttgctacagcctgaggcaaactgcattctcccagaggagctggctccaggtcacgggtcccttggcagtgccaagctgcacaggctccctggaaagtgtgggcagtgacctgtgcttgctcacagctcagtggcaatggcagtggctgaaacactcacctctagggtcagagataacagttgtggattgtactgcctctggcacttgcggaggtgtggtcctgtcatctgtgaccttgtgaagtttgagggtccctgagataatgatctcttgcttttgtggcaggcccaggctttttccttgacttcctcagctgtgtagtactagccccctcagactgtcttcgtggcaggcaaccccagttctctccctgggttctgacctctgaaacctgagccccggcaccaagcctcaacctgccctgtgtgcatgcagacaacatctcaaactagtgggaactgaccagcactgacctctgtgcagagttctctcccttttcctctgcacgcctgttgctgtgctcatctctgaggctccaaagctctcctatgtgcctgcccatgaaggtttccaagtgtgcagaaacttttcctccttcatagctccctcccagaggcacaggtcccatctggattcctttgtctcttttcttatttcttttgccctacctgttttgtggagataagctgtccttgttgaaagtccgaggtcttctggccagctatcagttggtgttctgtaagaggtgttccacatgcagatgtatttttgatgtatttgtagggagcaaggtgatattcatgtcttactactctgtcatcttgaaggtctcccccacagtgatcttgcaaagaaatggccttctatccaaatttaaatttaacatggacactaatacaaattaatgtttgtattaatgcgaactggcagaagttcctgccagtgctactctgctcttatcttgaagaatcttcagtatccatatgagagtaacttatttagactgcgtttgatcttttataagcaatgagcgcccatgttcacttactttcactttaaagatatatttttaaacctttgcatatcttctcatttttaaactgattctcatcatacatttatttcttctaggcattggcacatctacacttaatagaatatgtcggagaacagactgctttgctaataaaggtacattaaatactgcaatataatgtgctccagcctcaattcctttgatttttgtagaaaaagaaaaaatatcagttagactagatctcattcattatgtaaaaagtataacggggaacctgttttagcctatgtaggctagagatggaaagagacttttttcaaggaatatataattacagatgctcgcaatttttctattagcctttagttgaaacctttgtaggaaggagaacaattgagacagtagtctcagtaagtgatgcacagaggtcttaacccaaggtttttgccaggaagtgaggtcaatgtggctagtgtgtcatctcgtgtcccatcaggtcatcaggaacagggacactctgctttctgcacccccctcaccccacactgacacaagggttagttggtttgagcatggtttggagttactactctgaattacttgtagactctgtcccaggctcctgataggagttggaaaagtccagatagtgctgtttgtacaccagagtctccgttggtctcttgtgtggaagaggaaggaccaggagcccttttgtcccttcggagtcccccatgtcctattatcagatctgccgtgtgtgtgtgtgtgtgatctgtgcagctatggtaaacagccctactcttatcttctgctttcagatggtcccagaagatcagcgccttacagctgccatcatcctggtggtctgggtctcaggcatcacatcctccctgattgataacatcccattcactgctactatggtgagtcacagtatcttccatgtgatgagggcccagatttcacttgcacataacctgggctcacccttcctttcagaggaagcagagagtgagccctgtccctatgttgtgctcacaggtttaggggacagatgtgatgaatcccaaacaacagctgggagctaaggccttatagctgctgtgggtagtgaattccaggatggctgattgttttagggtcagtctgactgggagttgccacctctcatggaaagacagtctttgttttttgtttctgtaaagaaaattaatttcagtcattcagtcgtgtttgaatctttgcaaccccctgaactgcagcacgctaggtgtcccagtccatcaccaactcttggagcttgctcaaaatcctgtccacgaagtcggtgatgctatccaaccatctcatcctctgtcatctccttctcctcctgcccttaatctttcccaacataagggtcttttccagtgagtcagttctt

SEQ ID NO: 187 - DNA, 91656 bp, Hippotragus leucophaeus
  source 1..91656: mol_type = genomic DNA
tctttggtggttaatagaaaggaacccctccccaaacatcaactaagatcttgactctgcttcttacaattgttttcatcaggcagccacagatttactccagtggccgagaatctgtgcccaggctttggagagtcctggaaatgcccaacctgtctaatctccggggcacaggtggtcctgccctccctcacttgccttccaacatcccaggagggcagccaagttcggcctctccgcatccgccacactctccccggccgctccccctgccgctcccctctgggtggcccaggccctgacccagagccctgcagcgtcaggacaacgcccatcgcggggcgttcctggcggcgggtacgcggcaggagacttcttggaggcgctcctccctaaagccaggttaaaaacctcagcaccacgtgttgtttgcgctgtttgcaaatctccctgcggctgacggcccattactgtagagaaggcccgcgatacgagccagcatgtcggctctggtcctagagagcggagccttgggcaggaaattcagcgactttggacaggtgagcctggcggggcgggggtcgggtcttagctgcgcagggaggggagtttgccccccctcccgccgtggaaagaggtcagagcagtgttggtgttttcaactcccatcaactcaccaggacactgagagttcatttgagggggacggaaacgtttaggaagttgacagataacacatgcgctcaacacgtttcccaaggagagagcatctcttgggtgactttcagggcataagctgcaggagctggggatcggctttcagagctgccacagatggactcgctgtgtgtctttacacaagtctctgtcgccttctttttcttctgtacattggtccttaacaatctggaacgggagtaggggtccatccggatttactcttctgtgatgttttacaagtgttctcagccaggaatcaaaatggcaaaattgtaagaaattgtatcctttttttcacctttgggagaaaatgccttatgaagagattccagacttactcccacctggggaaggagacaattaaacacagaggaaaatactcgagagtcagccttgaacttggaatgtaagagaaccttaaatgtggcaagaataataaccagggtgcattctattctctagaaagtgttccctgtcccttgaggtgaacaactgcaaagtgcgttctgtaattgactggccacattcctagaatttagggttcagacttaaagcccacccctgggagaggaaggtttagagagtgtaaagtgtaaagaggaaggtttagagagtgctgtgtaacatctgtgtgttgaaagcaagctatttaactttgcagagcctcaggtctattcatttgaaaggttggaataaaaaaacccatatcctagagttaatatgagagtcaagtgaaataatatctttaaagctcttagcacactttctggaatataggagaagtgccaggggtgtctagccggaaatgatttgtttgttcaacaaaatgtgtcagaatactggcaagaggaacacacactgagtcaagcccagcggctggtggagcttctcagtggaaatgtgatggacccgggatcaggcgatgtggactctgtgtttagtttgctgatgctgtgtatcatcaagaagttccctaactggggaagaggctcagtttgggatctgtaaaacggggggctgggaggtgggggaggtggatagaaaatagtctctaggagagcttccctggtgactcagatggtaaagaatctgcctgccatgtgggagaaccaggtttgatcccagggttgggaagatcccctggagaagggaatggctacaccactccagtattcttgcctggagaattctgtgggcagaggagcctggtggattgcagtccatggggtcgcaaaaagtcgaacaggactgagctactaacacccttgagtctctaggactccagctctgacaatctacaaaaagacacatttataccttccagaagctctaacccagataagcagaacgccctaggtgtagtccagatagaaggttgatttacacatgcaagcacagcagtcctgcaagagacgtctggctggttcgttcactcaactcaacaaagacttattgagcacctactctgagccaggtacagctagctggtataaagtctgccctggtgaaacttaaattcctgtggaggagacaagactataacatttaaccaaatgaacatataatttcatgtggaggataagtgctatgaagaaaaatagaagggggtgacagattaaaagatgaaggaaactcagaaatcatagctctaaatggcacagagtcagtgttcaaacccaggtctgtctccaacaccctgtgcactcctccaaccacactgcttgctcctgtagataagttctgcaatagacaggcttttagtgtgtccacagcaggatgtctgctcttgtttccgggtgtcttacactgtagatgtgtgtttgtataatcacacatgtgaaaacacacctctgcccatgacccccaaaagcactaaggtcagcaatgagtacccatggaatatctttgctgtagattaattgcttgcagttatgaaaactgctctttttacaaatatattaacaatagaatgtatttgttagacaaaagcaaagagaacttatttctgttaagtgtatttatcagttcagtcactcagtcatgtccaactctttgacacgtgctaccatggactgtagcacaccaggcttccctgtccatcaccaactcaaactcatgtccatcgagttggtgatgccatccaaccatctcatcctctgttgtccccttctcctcttgccttcaatctttcccatcatcagggtcagttcttcgcatcaggtggccaaagtattggagtttcagcttcagcatcagtccttccaatgaatattcaggactgatttcctttagaatggactggttggatctccttgcagttcaaaggactctcaagagtcttctccaataccatagttcaaaagcatcaattattcagcattcagcagaatatagtctatattccaactctcatatccatacatgactactggaaaaaccatagctttgactagatggacttttgttggcaaagtaatgtctctgctttttaatatactgtctaggttggtcatagcttttcttccaaggaacaagcgtcttttaatttcatggcttcagtcaccatctgtagcgattttggagcccaaaacaataaagtctgtcactgtttccattgcttccccatctgttttccatgaagtgatgggactgcatgccatgatcttaattttctaaatgttgagtttttaagccaactttttcactctcctctttcactttcatcaagaggctcttttgttcttcttcgctttctgctgtaagggtggtgtcatctgcctatctgaggttattgatatttctcccagcagtcttgattccactttgtgcttcatccagcctagcgtttctcatgatgtactctgcatagaagttaaataagcagggtgacaatatacagccttgacgtactcctttcctatttgcaaccagtttgttgttccatgtccagttctaacttgcttcctgacctgcaaacagatttctcaggaggcaggtcaggtggtctggtattcccatctcttgaagaattttccacagtttgttgtgatccacacagtcaaaggctttggcatagtcaataaagcagaagtttttttctggaactatcttgcttttttgatgatccaacagatactgacaatttgatctctggttcctctgccttttgtaaatccagcttgaacacctgaagttcatggttcacgtagtgttgaagcttgacttggagaattttgagtactactttgctggcatgtgagatgggggcagttgtgcaattctcagtgatcaaaattcttttcttcttggttgctagtaaagatttttttctccctgctttctttctccttttctagtttttaaactaattttctgtacctttatgcatcctgagtgtacatttgtttttaagtcaactcacatatctatttgaagcacataattacagattatgagccagtttaaacacattctggaaaaggtttgcccaagatcccatgctggtccacagaacagtattggaatcagaatccacccaagatcacatcatttcacaaaattccatgagcttcctttcagttcagttccctcaagctttgaaaaggggagctgtttttccagttgagtcactgggatttaggttaaggattttggagttattggacctaggttcacttacaggctctgccactcattagctgagtgtccttggacaagccacttaatcttgctgagtctgtttcctcatttcaaaataataagggtggtatcatctgcatttttgaggttattgatatttctcccagtaatatatatatatatatatatatatatatatatatatatatatatgctggtatacatatgtactacagctttatccattcatctgtcagatggacatattggttgtttccaggtcttaggtattgtgaatagtggtgctatgaatattgaggtgcatgtatttttttgaaatatggttttgtccagatatatgtctaggagtgggattgctggatcatatggcaattctatttttagttttatgaggcgcctccatactgttctccatagtaggagcctgagttctcaagctgccatgcactgcctgtgtgctctcaggcgagtcactttctttggcccatagtttccctaaaatgagattgtggacaagcctatctctgtgagtcggttattctcaagtcccatgtgggcatcaggagacaaacagaatacctagattgaggagggattattcaccttggctgaggagtacagaagttttctgagagaagtactacccatggggcttttgaggaagggtaatggatttgaaaagggacaagggtgggatgcagtggatttcctgtaatgaggtgttgaaaggtcaaggacgaagtcagttttctggagaggagtttcctgagggtgaatcttaggagatgaggcaccaataagacttttgacaattcgaaagaggtattgtatattgttggctatgttgttgttcagttgccaagtcatgtctgactccttgtgatcccatggactgtagcccaccaggctcctctgtctatggggattctccaggcaagaacactggagtgggttgccactaggggatcttcccaacatagccatcaaacctaggtctcccacattgcaggcagattctttactgtctgagccatcagggaagccctaaattctgctaggagcatccaatcactgccaaccactaagggctgaattgttgtcagtgggaaccaaagaaaggcctgaccctgagggctgtttctggagaaggtcagactggcctgggtggaagtgggaaggtggtagctggcagagttccatacattcacatctgaatcgccctagtcgtaggtgacttctgtttcctggaggccaacaggagaggataatgttgccaagtgaactagaaataggaattttttgtcatttcaaggaagctgggaagaactgagggctcagtgttctttcctaggaagaagactgacatcagagactgatttgtgtgtctctggcaggattagagacagaaagtagagtccacaggaagttgtgactcatggacagagtgctggcatccagtgacatgggctccagctctggaggtgttattcaaattctctaagccttcctcttgtcatcaataaaaatggcacttggagaaaacctactttctagactgttattaaatgagataatccaaatcaagtgcttattataatgcttcagacagtatactaaccaggtggtactagtggtaaagaacctgcctgccagtgcaggagacatgagacacaggttgaatctctgggttgggaagatcgcctggaggagggcatggaaacccactccagtattcttgcctggagaatcccctggacggaggagcctgttgtgctacagtccatgggtcacaaagagtcagatatgactttataggagcttttaatatatggtagatcaaaaaattttttttagaaagatagtactgtggtcaatacaaagatatttaacagtttagtcttgctattcatctaaggctccctctaatcacactgactgataattctggttcttcccccatactgtttcaggtgagtttctgggaaaatctgaattctctgaattaaaagaatttcatcctaagggtcatcagtggccacacagggcttaagatggcaagtcactgagagcctgcccagcacagccttctcactgagataatgcaacatccattccactaatttcattaacttccttacaagagagtaattgttctgctggagtttttgttcccagttttaggtacatgatgttcatttgaaagcacacatggaactttgtgtattattgtaaaacctaatttaatccttaacttttacattttaagattttggccaaccctttctggagtggcacccctagtcccaccttaatttgctgtcacatggctggagaaaatgttagatcctagacattctttgctgtttgaagacgtccatcttccagtgggttaattgtgtgctcttatgtattctgtggctccttttcaacaattggtatctcagatcccagcatctgggaacaaattaatgctcctgtgagatctttactgaaggccaacaaatcttttgtgggtatttttagtatttccattattttgtatgcttttaataatattatatttaaaatattttctctctgtctttctttcatcatctgaatgctgttttgatagggcttggcaggattatacattagcctgatttcacacatgaagaaattaagaaggttaagctattggtcccaaagtgttctggtaggtcaatggaagagagaggattccaaaccaatgtctttggagctaaaagcctgtgtgtgttctaattttagtattttctaccctctgtttctcagtgttttcctgggacagttattgaaccatcataccacctttaagatctttttctacttaccttgcttgttttgtatgtgtctattaagtaaaaatttgagctgctgatgaatggggcatcctcttattcatttgtttctttcagagccctgattgtacctcgtacttggtaagtgtcactgaaaggcaatctttagagtgactggtgacatcagtgaataattgtgtgtgtgttaattactcagtcgtgtctgactctgtgaacccatggactgtataactggccaggcttctctgcccatggaattctccaggcaagaatactggagtgggtagtcgttcccttctccaggagactcttctcaacccaggggttgaacctggatctcctgcattgcaggcagattgtttaccatctcagccaccagggaagccccagtgaataattagagttttctaaaattgagatttgatctatgcgcatcatttaatgttttactttccttgatttacttattttctcttgcacatatacttctatatagaatgtatgtagctcattgtattccaaggcttaactagaagagaaagttcatgctcgcttcttccttggaggtttcacaggactgaattgctgagctgtgaaaaaaaattttttacccattttacccaagtgcatttactcctataggaaacaaactatattgaaggcaactctgatcaaaatgcggtatcgctgatcttctcactcaaagaagaagttggtgcactggccaaagttttacgtttatttgaggtaagtgctctgttcatttctgctttaaataacgacatagcagacttctgtgttatcttctggttggatgcagtgaaaagaacatacggtctagaactggaagacttgattttcagcttaggctcttacattacacaactgtgtgatcttagataagtttttcattgtctgtgagctaaagtttctccatttcataattaggatcattcagaatcatggtttcacacccaggaagccaacattggactccctcttcctgtatcaaactttgcttgaattacttgagttgcccttcatatttacaagtcatacctccttcagattcaaccaaaatttctatctgggattggttgaatccacagatgtgcagctcactggtagagaggactgattgtattcattatactagtactgccattttatataagggtcttgagcatccagggattttggtacccatggggtcctggaatcagtcctccacggatacagaaggatgactgtactattctctcagtgttcccaaagcactttttaactgtggactacagactaacacttccatagcacttatttaccttgtgaaatgcatacattgaccccaaggattgtttattcaggcagggagccttgtgtgaatcatctttatatcctctatagactcagttttatgtatataaagtgttcagttaagaatgaaataatatatagaacctagaaaaatggtacagatgaccctatttgcagggtaggaataaagccaccgatgtagagaacaagcatgggacacactgtgggaaggagagagtgggatgaattgagggaatagcactcacatatatacaataccatgtgtgaaatagatagctagtgggaagctgctgcagagcacagggagctcagctcagcactctgcgatgacctaggggggtggaatgcggtggggcatggttggtgggaaggaggcttaagaggaaggggatatatgtatagttatagctgatccactttgttgtacagcagaaactaacacaacattgtaaagcaattgtactccaatataaagtcataaatgaaaaagaatgaaattatatttaaatatgagcaaaggaaaatagactttcaaaaatgcttttgccctggattgtaagaagaaatattttagaaccaaatgattttttacgcctagtactttagttatactctacctggtgactgaatacataaataggtaaagagacagatctcccaggcagaagaatgccaaataatttaaacagatactctggagtcaaagaaggaaaataacataactctccactccttaggtgtgggccatagagagtgacttgatgaaatggcccttcacctctgtgatctttccctgaacccataaccccagtctaaccatgaggaaaacatcagacaaattccagttaaggaacagtctacagaatacttgactagtactcttcaaaactgtcaaggtcatcaacaactagaagtgtctgggaagttgttctagtccagaggagcctcaggggatatgacaactaaatataatgtagtgccctgagtgggattgtagagtagaaagaagacatgagacacaaactaaagaaattcaaataaagtatggtctttagtttgtggaagtgtatcagcatcagttcattaattataacacatgttctgtacttatacatgacactaatattcgtggaaattggctgcagaatatatgggaattccctctactagcttcttacttttttgtaaatctaaagtttatctaaaaaataaagtctattttaaagaaattaaacctggctatccaaagtgaggaagaaaaatatctgcctgagtgagagcaagaaatgagtgtagaaaaagagagagagaggtttctgaatggcaagctgatcctgagaaagaatatatctgtaaaatacgggaatgtcacatttttgcctttgtattatatggttcataagcattttccttgtgagagtcagaccttaaggttaataaattaaataatagtaaattcacaagatgttttcaacctaataaataagtaacaagtaaccatttaccaggatgaaatgcacccaagaaacatggactgcacgggatggttgaatgccgaagtgcactgaccgtgacgggttgcttaatgtgtgcctttgtttactcatctgtaaattggaactaatgatccatacctccctaggtcctggagattttatgtgctacgtaaaatgcatggtatgactctgagtccacagaagattctcacatgatgtctgttcctttactgcttccacctgttatctatgaaacccatgagaaatctttgagactgtgtgaagaggagaaagatatgagaagcctagagatatttaggagccttgatttaatttttttcccaaaaaagtaaaaaaaaaaaaaaagaatgaatggcttagtatgtattgtgagtatttacagcaaattgcaatgaccaagagtcaaggaaggaccatttaaaaaaaaggtagaatagcatagggtggcaaagagccagacatgaccgagctagtaatcacagcacagtaagcacagcttagtagaaccaaggggttatggtggccacagtgtatttgtgtacttcacatctctcatgataccctcaatgagatggagaagtaagtgttagatacaaaacctttaaattgtctgcttagtcactcagtcatttctgactctttgtgaccttatggactgtagtgcaccagactcctctgtccgtgggattctccaggcaagcatactggaatgggttgccatgccctcctccaagggatcttccccacccagggatcaaacctgtgtctcctgcatctcctgaattgcagacagattctttattgctgagcccagggggaagccatttatattgcatagatgatgctaaacttctggatcatataaaatgaaatcattttcttccagaaaaaagaaagaaaagaaaaagaataaggatgaatctaaactacactttagggcagtatttcctaaacaatagtctatcaagtgccgcatattattaggtgttttattagatgagagttccaagagtaaatagggttggaaaattctgcatctagattttggagacccatcatgtttgtgaaaatattaaagactttggaaaaccttgaagagtggaaacttattcagcgttaccttactcagcatttcccaaatgtttttgaccatggaaccttgttcaagaaagacatatgatcattttgcaggcactagtatcccattgaacttatgctattatagagttaggagctccagactctcagttatgagtgagatttgggaccctgaggagtagaacagcattgggattaagactatgttgcctggaaccaaactgtttgggttgaaaagccagttgtaccacctgtgaactgggtgaccttaggaaagttatttatcctcttggtgacttagtttcctcatgtttaaactgaaggtaataagatttttttgtagggccgttgtgaaaattaaatgaattaacacaggcaaagtacttaatgatagtatctgtcacatagtaagagctcaataaatgtttgctctcattatttctatgcagtatcattttggagagtcatggagcatcagagacattcttagctctgtgacagatagctaaaggattaagattaaggttaattgacttgaaaagggattatggggtaaggaaacaatagtttcattcaaatatttgaagtgccatcatggaaaaagaatggggcttccctggtgattcagacggtaaagagtctgcttgtaatgtgggacacctgggtttgatccctgggtggggaagatcccctggagaagggaatggctacccacgccagtattcttgcctggggaatttcatggacagtggagcctgcgggctacattccatgaggtcaaaaagagtcagacagaagaatagtgcttattttttgttacttcacaggcaaaaggacaaagcatgaaatgacagggagcatatttcaaatcacttaaaggcatcatctctactgtagaagagaactggaaggcactgatttcaagcattattactgtcaaaacagctagtaaaaggcagggcagaatcaatgcaaaaattatggtataaataatcttacctttccttaataaagacaaaggaaacatccattctagttcctccaaaattggcaatggaggagaaatgttatatggcggaatcacctgcacctgtgagtaccttgctacgtcctcttgcagtcacctccatccttaatgagcatgactgtcttttccgtagctgattaacaccaaagtcttcatcccactaagtggtgatacggcctgccagtgggctcatggtctattagacctcagctagtaacaacatcagaatgcaatgcaaacctggagaggtgggatgggtggcggtgggagggaggctccagagggaggggatatatctatgtatctacatccatatatattggacttccctggtggttcagatggtaaagcgtgtctacaatgtgagagacctgggtttgatccatatactcacagctgattcgtattatatagcaaaagccaatacaaccttataaagcaattatcctccaatttaaaaaataataataatacaaaataaataaagattcgttaacttaaaaaaagaatgcgataggcttgatatttgcattggaaatacagaggtatggtgtttacatgccttggttgtgtggtgatgggggcagtgaggcagatggttttgtgaattgaggccaaacaattaggaatatactcaaacctctgtctgctaacccccaaaatcccactgtcctcagtacattgatctttcagttctctgcgttttccaaagttctctttatttttagcttctactcaatcatgtcctgcacctacttagaaaaatagtctcctgagagtctttattgcaagtggcttagtaatgggctataaaattagaatcaaactcctgagggaagttgcagagaagaggtctcccttcctctgccagaactccactaatcattttacctcgaattccctaaggatgggaataagccatcaggcgcatatacagagctctgaagtacatgatgagtgtggtcagttatcatcatttaactgatggagacacacaggttcagactaagcaagctgcccagggttagacacttagagctaaaaactgcttccaagttcaccctccattttcacagtagatttgaaaacaaatttgtatatatgtatatagtctaaatgtttaccagtacagtctgtatttgtcacagtcactttctgtgttccctctctgtccagatgacccatatcccaccctcataagatgctcaacgagctcatactgtctcattcatgcattccattaaccttctgtgagtatcagctgttatcagaccatatgtaggtgctgagaagaccgggatgagtgaagcggtcattcactgcctctgcagaacgtggaaaagctcaggcttccatgagcattcttaatccaggctgggggaaaatttgttaagaagtttcttgcagacataatgggttatgctgaaacctaaaggactgaccagtgagtaaaatggaggagtaaattccagaatgaagagacaaatgacttgaggggagagaatagacacatgggcaggtcctggaatccgtgaatcctttaccatccaccaacctcagtgttttctctggaactctctggctttttccatgatccagtggatgttggcaatttgatctctggttcctctgccttttctaaaaccagcttgaacatcagggagttcatggttcacgtattgccgaagcctggcttggagaattttgagcattactttactagcatgtgagatgagtacaattgtgcggtagtttgagcattctttggcattgcctctctttgggattggaatgcaaactgaccttttccagccctgtggcaactgctgagttttccaaatttgctggcatattgagtgcagcactttcacaccatcatccctcaggacttgaaacagctcaactggaattccatcacctccactagctttgttcatagtgatgctttctaaggcccactcgacttcacattccaagaagtctgtctctagatgagtgatcacatcatcatgattatctgggtcgtgaagatcttttttgtacagttcttctgtgtattcttgccacctcttctaaatatcttctgcttctgttaggtccagaccatttctgtcctttatcgagtccatctttgcatgaaatgttcccttggtatctctaattttcttgaagagatctctagtctttcccattctgttcttttcctctatttctttgcattgatcactgaaaaaggctttcttatctcttcttgctattctttggaactctgcattcagatgcttatatctttccttttctcctttgctttttgactctctccttttcacagctatttgtaagacctccccagacagccattttgcttttttgcatttcttttccatggggatgctcttgatccctgtctcctgtacaacgtcacaaacctcattccatagttcatcaggcactctatctatcagatctaggcccttaaatctatttctaagttccactgtataatcataagggatttgatttaggtcatacctgaatggtctagcagttttccctactttcttcaatttgagtctgaatttggtaataaggagttcatggtctgagccatagtcagctcctggtcttgtttttgttgactgtatagagcttcttcatctttggcgcaaagaatataatcaatctgattttggtgttgaccatctggtgatgtccatgtgtagagtcttctcttgtgttgttggaagagggtgtttgctatgaccagtgcattttcttggcaaaactctattagtctttgccctgcttcattgtgcattccaaggccaaattttcctgttacccccaggtgtttcttgacttcctacttttgcattccagtcccatataatgaaaaggacatctttttggggtgttagttctaaaagatcttgtaggtcttcatagaactgttcaacttcagcttcttcagcattactggttggggcatagacttggattactatgatattgaatggtttgccttggagatgaacagagatcattctgtcgtttttgagattgcatccaagtactgcatttggactcttttgttgaccatgatggctactccatttcttgtgagggattcctgcccgcagtagtagatataatggtcatctgagttaaattcacccattccagtccattttagttcactgattcctagaatgtcaatgttcacccctgccatatcttgtttgaccacttccaatttgccttgattcatggacctgacattccaggttcctatgcaatattgctgtttacagcatcagatcttgcttctatcaccagtcacatccacaactgggtattgtttttgttttggctccatcctttcattctttctggagttacttctccactgatctccggtagcatattgggcacctactgacctggggagttcctcttttggtatcctatcattttgccttttcatacggttcatggggttctcaaggcaagaatactgaagtggcttgccattcccttctccagtggaccacattctgtccgctggatcatggaaaaagcaagagagttccagaaaaacatctatttctgctttactgactatgccaaagcctttgactgtgtggatcacaataaactatggaaaattctgaaagagatgggaataccagaccacctaacctgcctcttgagaaatctgtatgcaggtcaggaagcaacagttagaactggacatggaacaacagactggttccaaataggaaaaggagtacatcaaggctgtatattgtcaccccgcttatttaacttctatgcagagtacatcatgagaaacgctggactagaagaaacacaagctggaatcacgattgccaggagaaatatcaataacctcagatatgcagatgacaccacccttatggcagaaagtgaagaggaactcaaaagcctcttgatgaaagtgaaagaggagagtgaaaaagttggcttaaagctcaacattcagaaaacgaagatcatggcatctggtcccatcacttcatgggaaatagacgaggaaacagtagaaacagtgtcagactttattttggggggctccaaaatcactgcagatggtgactacagccatgaaattaaaagacgcttactccttggaagaaaagttatgaccaacctagatagcatattcaaaagcagagacattactctgccgactaaggtccgtctagtcaaggctatggtttttcctgtggtcatgtatggatgtgatagttggactgtgaagaaggctgagcgccgaagaattgatgcttttgaagtgtggtgttggagaagactcttgagagtcccttggactgcaaggagatccaaccagtccattctgaaggagatcagccctgggatttctttggaaggaatgatgctaaagctgaaactctagtactttggccacctcatgcgaagagttgactcattggaaaagactctgatgctgggagggattgggggcaggagcagaaggggacgactgaagatgagatggctggatggcatcacagactcaatggacgtgagtctgagtgaactctgggagttggtgatggacagggaggcctggcgtgctgcgattcatggggtcacaaaaagtcggacatgactgagcgactgaactgaactgaactgaacctcagtgttcctgggaacagaggcggggttgcagaagggacgtttggcagataataagatgtttactactctcaagtttggactttaggtcctgactgtgactcctgggtctggtgagcaggacagcgtcaagactgaatcacgagggttccttttatccttttggccttgatccagagcagttgtggcagtaacatgtttacagggaacattccatctttaatcaaaataagaaaagcattgtgtttcactggggaaaagttcttacaacccagatgacattttcatcttatttaaacccccaaaaatagataatgatataaagaatgcccatgtaactcacttcctgtttaagcagtaaatcattacaagaatgacttaaatccctgggtacccttccccatggacctccctcctcagaagtagctattaatctgaatttgatacatattattcccatgcatctttttaggctttgttatataaagatatctattaggatatatggcatagtcttgcaagttttgcttttttgaagtaaagttgatttacaatgctgtattaatttctggtatacagcaaagcaattcatttgtatatgaacagatatactttatgtatatagacttcatattcttttccattatggtttatcataagatattatatataactctgtgtgctttacaggaccttgttgtttatccggtaagcttttaatctttatgattggaatcatattgtaatagtccatctgcagttttctttttggggagaagatgggggacattgtttttgagatttgtgcatctatttttgctcattcagttttttccctccctattttccattgtgtgactatactttatttcttattgatggacctttagcttgtttctattgtgtgtccatgcagatggttctgcctcaaacattttgtgtagatttgatgatccagttattgaatagaggaacctcaaatggaaaactggcactgttttcagctgttcacctgtttaaaaccaggcatatttgagaaataatagcatggagctgactttctaaactttcatcataaagttcagtcccacatcgtgaaaatgtagacagactgctatagtccattgacggcacatgggttgtgattgctcacgggtagcttggactgaaacaggccactgggccattttgattttatctcttcggtgccaaaaaaagaggggtggaaaggggaacctgggataggacagctctttcctgtaaagccttgaaaagagcctggattaagctgctagcctgcttcttccccaggaaaggggttccttctgaattggacacagttccaaccacatggaggggaagatggggaagaaatcacccaacaaagagggacaagatcaagggaggggaagaccaggagttgacaacagagactctcccaggggaggtgagagtgggaccctaaaaatggttcagggtgtgaatcctgaaagttagcgtgaacctgcccgagaacgcgcctctagcgtggagtggggagaatctggagctccctctagactttaattgtgctgctcctgctttcctgaatgtttttggtttcctgtttagcccagtgggtttaatttttagactcttagtcaactggggctgttactggacctcttacaagaggagatcagtaaaatacacaagaagccctgcctgtacctctgtgagacttctctatttttgtaactgttatttctcaccccagatgttgtggccatccccagacagtttctgcctttgtcccattgcagtctttctttctttctttcttttttttttttttttgatgccccaaggtttctgggatctcagttctccaaccagggatcgaacctatgccctctgcagtggaagtgcagagtcctaaccactggatcaccaggaagtccccactctattatgaaaatacctgccagagtgcttcattgaaaacatgagtcaaaatctctctctccctctgccctactacctctcatagcttattttattggagtatagttgatttacaatgttgtgttagtttcaggtgtacagcaaagggtttaagttacacatatacatatattcattcttttttcagatgaaagtgaaagtctctcggtcgtgtctgactctttgcaaccccattgtctaggccagaatactggagtgggtagcctttcccttctccaggggatcttcaatccagggatcaaacccaggtctcccacattgcaggcagattctttagcagctgagccacaagggaagcccaagaatgttggagtgggtggcctatcccttctccagtggatcttcctgatccaggaattgaaccagggtctcctgcattgcaggcagattctttaccaactgagctatcagggaaggctttttcagatactttacctttatagattattacagaatattgagtagagttccctttgcttacagtaggtccttgttgtttatctattttatacatagcttcttaatatcactccaagggaaaatcaaagttaagataatggccgataggttattcttggctacttctctgcctcgtgtcccattggccctgccccctgctcattctgcccccgtcatactggcctcactgatggtcttcagtcatattgtgaaatggctgaccccaggacccttccacttggtgttcccttatgacttgcttcctcattgattttaggtctaggcttaaatgtcacctgttcattttttgaggatttcatgaccccattgtttaaaatggcacctcaattgaacctctggaatagtctgcccctcttccctgcttgtttttgtatgttccatctgaagactgtatattttacttatttatcatagttgtcatttgtatcttccttccagaatgtaagctcccggagggcagggatttttcctgctttgtctgctcttatagcccagtgcttagggcagtgtttggcaccaggaaggtgttggattgaatgagttatgaaaggctcctgtctgtttacctgagcccaatgatgtgggccatcagctgtgactgtctttgatgttgcctcccaccccagaaagctctgaaacagacaaggacataacttcatttgagcttatgccaaggcaatagcatgtagggcgtccaagaattcaagaagctccccttttccagtctagtctcatctgaaaatacgctctccttttggaaacatactttcaggggaaaatctgagaaaagcttaaagtacagcaaatattaaaagggaagtgacttgtcaacttaatgtgtttcagtttccaggagaatatatatctgtgccaggttgagaaagttagggcatactgacttactgagtaactgtgattgaagccacaatggggctaggtgctttctctcttgttaatgctcattaagctgccagataatatgatttttatattaaacatggaaaataaaagttcataatggctaactaatgtatccaaaggtagtgagtacagaacagaatttgaactcagattagtcccaaagcccacacttttcgcattatcattcttctttccttgaggaatgaaatggaagaggaaaggagggagcttgaattcaagaaaaggtccagaagcatgaatccatttttcacagttcatcatattcattctgtgtttcatctacttgtggcaaatccccctttaggaagattttccttatggatgggagcacaaaagggtttctggtcaatccttgttaaaatagaccattcatttcactttgcctttttctggtccccacactctgttcaagagtcctgagtcatcaggttcttactctgccttcttgtatgcagaaattaactattgggcaaattgtgaaattgtctttttagtgttgaactctaacttttcctgcctctgccaaaatgtccatgaagatgtgatgagtgtgcatgggtcaatttttaacttgcatagagtccttgtttgaaaatacaaattcagggacttccctgtctctccggtggtaagactctgtgcttccactgcagggggtacagattcaatccctgttggggaactatgattccacatgccatatggcatggccaaataaataaataataataataattcatttcttttggtgtatggcaaaacgaatacaatattgtaatctccaattaaaataaataaatttatattttaagaaaaaaaaggtaactatgatcatattcagatttggaggttcatttctaaagcatttcttagcaaccaaaattattggtatctaaggatccacactattaaaccagagaaacaccactaaggaaattgcatgctaagctagagagttaattgattcaaatgggaaagaaatcatctgaagaatttagctgggtgaccttagccagaaatttcactcacattaaaaagatatgtgaatgaaactggagcctattatacagagtgaagtaagccagaaagaaaaacaccaatacaatatactaatacatatatatggaatttagaaagatggtaatgataaccctgtatgcgagacagcaaaagagacacagatgcatagaacagtcttctggactctgtgggagagggtaagggtgggatgatttgggagaatggcattgaaacatgtatattatcatatgtgaaatgaatcgccagtccaggtttgatgcaggatacaggatgcttggggctggtgcactgggatgacccagagggatggtatggggagggaggtgggagggaggttcaggatggggaacgcatgtacacccacggcagagtcatgtcaatgtatggcaaaaccaacacaatattgtaaagtaattagcctccaatcaaaataaataaatttatattaaaaagatatattttaatttttgttgcatgggtaatggtatgaaacttttggcaaataaatggaagttacacataatcttgtcataacatcatgatacctttcattctagctttttttccttgtgttggacagaagttttaaaacataattatctatcacatacctatatccatcataagtagtttgccaaaggtctgtcatttaaaagagaaagttaaattttagtaataaatattgcttttcaaaaagttgttcataaagaaaatagagacaaaaacaccctgaggcccatcactggagttgttcagttgctaagtcatgtccgactctttgtgacctcacgggctgcaacacgtgagacttccctgttcttcactgtctcctggaatttgctaaaaactcatcactggagatcatcactgtgggagtgcctactggcactttgttttacacatgttattaatggttgcaggatctcctgtgaatgattgtacactacagtccatctaatattccactattatgtggtcggcttacaaattttggtaaaaagtcctcccataagttaggtctctagagttataaaaactgagtcacggggcatacattgtttttattttttttaaattggagcaaaattgctttgcagcgtatttgtttttgctgtacaatgaagtgaatcagctgaaagtatatgtatatcccctccctcttgaggcttcctcccaccttccctcccttccatcccacccctctcagtcatcacagagcactgagctgagctctctgtgctatatagcagcttcctcccagctatctgttttactcatggtagtgtacatacagcatacattgtcttctggctatttccaaggtaagaggcttctccctgggaagtagtgttgttaggaggggtgggatagaagtggcgaaactcaaaaaaactcaaaaaaaaaaaagaagtggcgaaactcaatcagcatagtttctgccctctagactttaaatttttttgtcactctacaccccttcccacctcctgtaccaccgccctcccttgctgtcccacgaataaacatgcccagggtacatccacgcctatttcttggctttgctgtttttcctctgctcttaacaaggcaggaattggttaaagtttaaagttactttaaactttatttaaagtttcagcttaggtcaataggtggagcttaaccatttgctttcatccagagccaagaaggatgacattgctctttgcttttattaggaagtcacctctgtttgcaaagaaagctttagagcaaatgctatctgtctggtcttccttcctccacgtgatcttctctctctctggtcaagagtccccgcactgggttacctggtcaggggtgtgttcttctgcagttggtgcccatatataatggcttcatcatgtacccctgagaattatggggaagaaggagcaggaagcagtgcctgtgtaggattgcttcttattgtgtttactcccatagtgttttcactttgagggacttggcataatagtaataagaatgatgagacctggtatttgtgggatgctcatcatatccctggcaggacaggttgtgtggttaaaagaccaatgtctgaggttagagaaaatgagcttctctctctccactttttttttttaataggtatgtatttgctttgggcttcccaagtgactttcctggtggctcagatggtaagaatcttgcctacaatgcaagagacccgggttccatccctgggttgggaagatctcctggagaaggaaattgcaacccaatcaagtattcttacctggagaatctcatggacagaggagcctggtgggctatagaccatggggctgcaaaagagttggacatgacttagtgactgctgctgctgctgctaagtcgcttcagtcatgtctgattctgtgcgaccccatagacagcagtgcaccaggctccctcatccctgggattctccaggcaagaacattggagtgggttgccatttccttctccaatgcatgaaagtgaaaagtgaaagtgaagttactcagtagtgccaaactcttagcgaccccatggactgcagcctaccaggctcctccacccatgggattttccaggcaagagtgctggagtggggtgccattgccttctctgacttagcgactaaacaacactaattgctttacaatgttgtattagtttctgctgtacaatgcagtgaagcagctatatgtatacatatatcccctcccttttggacctctctgttacccggcatcccccatcccagccatctaggtcatcagagagcaccgagctgagctccctgtgttacacagcagcttcctctctggcccattttagcaaagcatctttgtctctgatttcatttttcacattttccttaacctctacaaaggattcttgagaaggtcacagaaaataatttgaaactgtaaaatgatattatctgaatatcattactgtatttaagtatcattactataattatccatgtgctcttcaaccatatgccactaaccatcaaggaaaaagatatacttcttgaactctaacgttgatgaatttcatttctttgcaattatagaattattcaagttaagcatttttttttctgggtatatgttgtccatttttatgtttggagaaatccttttttaaagacaaattaataaagaggctactccttgattttcttcacaaagaacagtgctgtcaatgaaatcagagttttgaataggtaataatgaaaaccacacattgaaatttgagggccagtttaagtaagcgactctttttactgatgaactccgtaagggctaaagtataaagtatcaccagctagagacattgaagttgagaagctgtattaagtgactattattttgtggcatttaatgcacatgagtcttcccttctcaatgagacttcacgtgtccattcagtctgccccattgcactccaagactgcctgttcccttcaccctgctgtgctttgcattttcccctagactttatcattctaatacataaatcagttatcttttttgttatttgtaccttcaaaacttgaatgtaaactctattaaaggaaaatatctttgttttgttcactattgtatcccagccacctagaaagtgaccagtacctggaaggtgctacatatacatttgtggcatagctggaatgaaaagtaattatataaaaatatgagtggtatttatactggataattttaactgagcatgtattagttacctggtagtctgtatgtatcatctcattcagtgtttcctacaaatttatgaaccaggtatcatgaatacctggagaagggcatggcaacccactccagtattcttgcctggagaatcccatggacataggagcttggcaggctgcagtccgtggggtggcaaagagtcagacatgaccgagtgactaagcaccacaaatacccacaaaattacagacggagaaactgacagttagaaatataaaagtacatattctaaggtctcatagctgatatagtttagaactttgatttaaacccaataagcctgactcttgtggactctatccaagcagaacagcattgcttctgtgtaccaaactgaaatcttatgtttgcaattctaggccttgagcagatttccacgtggttaaattctgtgacatttgaactatttccccaacatatgatttgttatttggttttgcagaagaaaaagtaaacaattttgctgtgttaaaggctttcttctactcttatattgacaaaaaaaggaagaaagaaaaaaaaaagaactcttcttcctcacttctccacatttccttgtgtttgctctggttttgcgtgtttggtctgtgtcaattccagttactgtccccttcatactcccttaacttctcttttctaggagaatgatataaacctgacccacattgaatcaagaccttcacgtttaaggaaagacgagtatgaatttttcactaatctggatcagcgcagcgtgcctgccctggcaaacatcatcaagatcttgagacatgacattggtgccaccgtgcatgagctttcccgggagaagaagaaagacacaggtaagagacaggaatttcacaaggtaaataactctacatcctcatcataaaatgacggcaaagaaggacttacctgggatcccagtggttaggacattgccttccaatgtagggggtaccagttccattcctggttgggaagcggggatctcacatgccttgtggccaagaaaccaaaacataaaacggaaacaatattcaaacaaattcaataaagattttaaaaatcatgctggtgctaggttgcttcagttgtttctgactctgtgcgagcacatcaagaaatctttaaaaaaaaataatttcaaaggtaatctctaccacgaaagaccaggatttggtgagaggatgtagtttagggatgcagaatagtggctgtcacagttagacatttaatagctgttccttttcccttcctcaagataactgtttcttatattagttgtctttagttgcctcctactgcaatttttatacattttccattggtggatttttatgctttcaaaatttcccaatctctagaggtaggatgattagggtgtccagggtgctttctgtttaaatataatgtcaggacaaattctttagtaatctctattgcatctcatggtctccccatgtgcttctcatgagctggagctctttggttccttgttcttaggactttcattgtctcttccactagattacaagctccttgtaggcagggagagtctcttacctacattaatatccttagagagacatagctctcagcaattatttgtgcatgaatgactaaatagagcagttgtcaagacttgctctgcccacttgtttacttactgaaattgctaccacatccaaactggttctgttctgtcacatgatggaccagtaaatcaggagacaagttattggggacaaggactagtgactttattcagaaagccagcagactgagaagatggcagactgatgtctcaaagaaccatcttaccccagtcagcatttgggctattttactaaaaatagcccaaattatatttttatgttaaaaagaggagttagttatctattgcaaacttcttggtgcaggaatcctttgttcttacagtgtccctgtaggtcaggtcatgatgttcctgtgaatctccaacaaaacaaatgctattttctgttttgcaactttttacccatatatgtataaaggccagagccctgagaatgggctatcctgtatattttaagttctaggcaacattcttttacaaaaggtggagagccagtgtgactaactgctggcagcagagcacaaagtttaaaataaaagaaacatctaatatggagtcatatttgttcttccttattacaaaatattgccctggagaagagttagggcaatagagtgtaggaatttcatgggcttggccttggagaggcttcagttcacgccctactttttccacttattggctttgagacccttgacaagtctctttaacagccctgacctctatttttcacaggacttctgtgaggattaaatgagatcttgcatagtcagtgcttaaaacagtgcccagctggataaatgatagtatgtggtggttgttgaactgatgagccatgctaataggtgactattaactaaagaccagagtttccattagggataatgctttgcattgtatagttctgttgattttgacaaatgcataatgtcatgtgtttgctatttcatgtcatacagaatggtttcagtgctctcaaaatgcactgtgctccacctgcttatccctctctccttcccctttctcccggtcaccacccatctttttactgtctccatgattttgacttttctggaatgttatgctatatgaatatggaaccacagactatatattctttttaaaaatatttatttatttggccttgttgggtccttattaggtcttagttacgttatgtgggatcttttgttgcagactctctagttgtggcatgaggccttagttgctctgaaacatgtgggatcttagttccccaaccaggaattgaacctgtgtcctgtgcattgcaaggcagaatcttaaccactggaccaccagggatgtccctatatccttttagactgttttgtttgtttgtttcatttagcaggtttccttcatgcctttttgtgatttgatagctcattttttggtaatcactgaatagatgtaccgcatctcgtttatccattttgctcaatctattgaaggatattttggctgcttctaaattttggcaattatggatgaggctgttaaatattcatgtgcaggtttttctattttcaaagttttaaactcatttgggtcactacttagaagtgattgctgagatgaactattttttcctatataatcaaaattttttttctgttgtaaaatttaaaatcaaaagctttttttggccacaacattaaagactagcttaagaggacttcagtcttcgcagttgaagataacatgttaataattactgtagagatgctttaaaatgagacataagactgaacactcccaccgaaccccccaccccacataaaaagactcctctgaaaccatcctaggggatctcttctcttcctgcccttgctctcttgtggctgtaaccaagaccaggaagtccatcctgggtgtctgcccttgctgagagtggcagccatgcatgcaggctctggtcaccggtggggaggggagtacttggaattcctcctcaaattaaccctatctgcttcccttcttcttctaccttctaagtgagctgcttccctgatgacctcctcttgcttttccggccacctgctcccaacaggagcctcaggccctcagggcaaagggcctgccggatcctggggcgagctctgccttgctgggagcaggtggaagcccggccagctggggccctggggtagaaattcaaagcaattgacaggcaggcaggcagcccctcagggaggcagggaagatgtacatagatcagctgaagggctggcagcctgaactggaggctcaaaaaacagatgtggaaaagcagttaggagcccagactccggaaccaggacacccacttggtgtgattttgggcagattattgatcatcatagtttatcactgtattgaattcaagtaagaagtctctgtcttacaagattaatgaactaacaccagtggtgtattgaggacagcccagagcacatttaagggcttaatagaggttcactattcttagtgttatcatcattattataaataatgacttgagcacaggagccataaaagccagccggtacacaactacattttcagaggttctgggaactggaaaatgacctcagaggtcatgcagcccaacatcctccttaatttttcatccgataaaatcagaggccacaacttgtcttcaggcacagagtgaattctgtgcagttgtgggcaagcgggtgtcgagcacccttctatgccgagcaccatgcttggagctggagggagagagagagctggcagggcctgtccttagggagctcacaggctgacgagggcagctgggcagccaggtgaatgcagaagaggggtgggtgctgtgatggagacatggctggtagaattcggcctcagttccaccttaactctgaggacctagcaagtgtgaaagtgaggaagcccacactctgacatcgaggcaccacgtcatcaatgttgggctcatcagaggtaggatgtgacacaggtctgattccctggtggggcccaaagtggcagggtgttgagtttaacactgggtcgatattttacctagtgaggaaaacactgctcagactaaccctccaaaacactatgtgtctcaggacccttgtttctttggatggttcttcaccccggcccatatttgttgcccttccctggcatggtttcctgatccttgcatctgctgaaagacatggccctttgggtttctgggttagtttttgtgaactggagtgtgggcccagaaacagatttttttttttttaaggggaaacagccatccctttgcagaattattctttctgtcaaactccatgggaggatgattagaagaaagcatcttcatagatctgaacctttgattctttcattcaataaagtgccctttctattgaggggctcagatctcaggggcgagtctgacaacaggctgaaggagggggagatctgaacccctcaaatcaattgggctaaatcactttccattctagtggttaaaccattcaaaaggccgtatgggtgctagaaaatgaaagttttcagtttcttaactgctaaatttccccacccaaaacagcttaagggaaggctaattatggtgacaggttaaagaaaccccaaccttctcaaatggctcctggctgataggaatttaataggattttaatccatagagtcttttgaatacttgaggtctattctcctgtccccctgtctcctgatgaactcaaatccttcttcaacccaacatgaaagagtgttaatatcttccatcgattagtctcctaatccttttacctttctctttgaatcttttgcatgacattacatttagctgggggcaggggatgtaaaattcctacatggagccagattgcagccaggagaagcagatagacaaaatgtcttggctagacagaggtgtaggatcatcacctttcgagaaatttatctgtttggagttattttccaagagcaattggacttgagagttattttccaagagcaattgggtagattttgttcaaattgggggtgattataagggtctcggtgtggaaacaaagcgtgtccagattgccaggacaactgtattttctgtggggagtagaaaggctatttatttacttcttcatctatctactacctatctagcctggaggtgcttatgattttgtcttttttatttggattaattcctgaagcaatgattcaagtggaaaaattattgcagaagacaaaataacattatatttattccctccttcctatacattatatttattcccccactcttctatgccccgctcccctcccaacccacttgagtttttctcttttctgcttcaacatcactgctctgaaaggcagtgtcatgataaggctgaagcttcagatccatcatgggaggaagaagggtaggattcctgggaggagtctgaatagcccctaggattgtgggcaaaattgtacatgtgcacctgcttgcatatattttaggagagaggattttcaaaggggtcatggttctcaaagagttgagatcctgtagagagaagctgcttagggcaggagggggctccagatggtcgtgatatttctccatttctaccacctgcacctgcctttcctctggctcttcctctgctctactcttccatcatcttccctttatctccccctcacttctgaacctcctcccttgcatttcacttggccccacatgtgtctcagggctggagatgctcgtggacctgggtctgatggagacctgggatccgcatgttcgtaaagacatacaggattgattgacagccttttccagtctacctggatgcttgctacctgtggcaacatcactctaagtcctctggcagctagggatgggacttttgtttcagtagcctgcctcatcgctacaagcatagccacagctaaaaggacaaacctgtttgtgaagagatggcagcagccctgaagctggaggctggcctagggcttgccctcttgcaagctgtcagaagcatgtctattcacggtgagggaagatcctgagtaaatgcggtttctgaggccagtctgcttcccaggttccagggcttcaagctgaggaacatcataagattataaacaggctttcattctaacaggaattccttatttgcgggccaaatccaaaatattttccccttaggttgtctccctgacgctttgcaactcaaccggccagagtaagcagataacctgatttttattctccatattaggaaatgaggcagaggtacacttgaatggcagtgtggattttggaatcttcatttttccagttagattcctgggctgtagttttatggccaagttgctcgccctctgtaggcctagattttcttgtctgtaaaatgaagatatctgtgtgccagtgcagttgtgtaaattctgtgatatgattgtacaatgtgcctggcataaaggatccatgcaaaaaggtcaggaaactcatgcctagtcttttctaaggatacccaatgaatctcatggtggagacagagtcagaatctccaaagtcctgatctttgataaagaaaggctaccatgttgtgctatttggatcaatccaaaagatggtgaagattacaaagaattagactgagaacaccctttctctctgtacagatgtgttccctcaattgaaggaagtaaaaagagaatatgaaatgtttataatggaatgtcaatttgccattgatgctgagttgagggagcagcatagcaagtaaaaaagagcaactacttgaaaagagtcaggagccaggatgtgaattcctattctgtacaatgccagctaggcttgaatcccatctgacttcctgccagctgggagacctcattacctctccttcttcatctgtaaaatagagccaagatccactctgtcatcttctgggtcttacaggggaatcatgcaagatactcagtatgttaggatgtttgatggattgagttgaacttgcttgagttgaagagacccttgatcttagatatccttaagcgtcagtaaggagggagctttatggtctgttgctgttgttcagacactaagtcatgtatgaccctttgcaaccccatggactatagcctgccagtctcctctgtccatgggattcaacaagcaacactggatttctttctccaggggatcttcctgacccagagatggaacccatgtctcctgcattggcaggcggattctttaccattgaaccaccagggaagcaaccacagcttagtatcaggctatttgctaccaccagctctttggggtggacactcaccaggctaatgacaaatagagagttggtggcagccactccttcactggggctagccccatctagaagccagggagtcaacttcctgtgtgggatgatgtgagggcccctgggaatgatctctcattcacaaagatgacttcctatgaacatagcttggatgtttgatattatccatgtgactctgtgttatattggagatagcactggtctaggagatggaaggccagcttcacattcagatttcctgccttttcctctttgttcttcttttcttccctcctttcctttttttccttctcttcttcctcatccttctgacaacattcattaccaaaagcagtagcctctttttttgttatcttcctctttgaaatatttgtaacgtttgacagcacttttctccctggaatcctctctctccttcatatttgctaaatcacatgggtcttacttattaaaatcctgacgattggggttttcttcctttttcttttacatcttctccagacccagagtctgctttaccaccttcttgtcgttcattcacatttatgccctaattcagtggatcattcatccatacaactcatatatattgaatacccattcagcagcagccacatggagggatgcattaggggaaatcagtcacatggtgtcttgactcatgtgtcttgtgttgctgttcagccatgtctgtgtagggataggggaatgggtgtgtgccaggcacaccaagaatctacactgaggccagtcttgggcatggtggggagaggggagcaagggttgaggaggggcttctgtggggggacagacattatatggaagaggctttagatgcattctgtttgcaccaatgtaggttgaccataactccagaggcaagtagctggtaatcaatctcacctcaatgtggtattcagtatttgggaacatagtgaacatccccatcaagaagtaattaataagataagtgacatcttaaaatggctgttgggaggatagctccagtttagatttgtgattggaatacacacccttttctttgttcatcatttcactggcatctctcactcattccatgcatttattcattttgacaccttttcagtctttacttcctggtagatgccttttggagaaggcaatggcaacccactctagtactcttgccaggagaatcccatggatggaggagcctcgtgggctatagtctatggggtcgctaagagttggacacgactgagtgacttcacttgcacttttcactttcatgcattggagaaggcaatggcaacccactccagtattcttgcctggagaatcccagggacagaggagcctgttgggctgccatctatggggtcacacagagtcagacacaactgatgcgagttagcagcagcagcagcagatgccttttactcacctggtttcatattcattttgatacgtggatggagggatcacatgttttgtctggcctgtcagtgataagtgagccctgcctccaccatgcttctgttcgattcaggaggagggaactggcttggtaccatcatctgcatttggctcacccattcttgccaagaccttcacagagagtgttctttcttcagaaagaaaatggaagctccttaaaggagaaacctaatgccctcaaaggcattcatccttctctgctgggctggaggccatggcctcagaaaagacatccaggagcctcggaagggggaggagtgaacagccttctattttgggcctcggaagccaaggatttattgctctccctgagacaggctggaggcagaagtctggggcaagcctgggtgccttgctggctacaccctggggctggtgagcatctggtggagggaggggtcagatgggattcaacctgcaccttgaactgctataaatcttcctggccaggaagcaggctccagccaggcctgtcgggggtggggtggtggtggtggtggtggtggtgatgctttttgctcaggagcacccctgagccagccgcccctcggcgtccaggctgagcagttgaccccgacttaatgagactacaacgtgggtgtccagggccagctctcctgtgggctgcttcccttggagtcaaatcaatatttattaatgatctgcccccctcaccccacccccggatgcctctggcttcacagaggccctctgttgcaccagcctgctggagccattcattaactgctgagccccgctgcctgtgaggccgtggaggggctcacagaggccagcccaccgcggaggtatttgcaaaggtcattaatgagctaatctgatttcacttttccaaacagaagcctgggtcgctggggtcagtctctattcccagctttgtgagtgagtctggttgggacgggagaggcctgtgatcatcactgaagaagagaaagggaataggaaggggtcttggaagaacctagaacgtgcatgttaaaaagttaccacttctaaagccagggtgcctgatggaaggtgggggaagacctggggctgtcctagggattttctgtcagcccctctaaattcctgtcttagtttgtcatttcctccccctctgtagatgggagaacagaaatctaaaatcaagggtcccccaccctcactttattctaagccagcccagtggttcagtgcacgagctgccccagttctgattccagtcctgccagctctgtaatcttgaacaagtcacctcatctctctgaccttcagtgtgctctgttaataatgcaaaaataatcctgtctatccccagggcttccctggtagctcagatggtaaagaatctgcctgcaaagcaggagacctgggttctttccccgggttgggaagatccctggagtaggaaatggcaacccactccaggattcttgcctggagaagttcatggacagaggcgcctggtgggctacagtccatggggtcacaaagagctggccatgactgagtgactaacacaaacacctgccagggttactctgagaattaaaacagacagtagaagtcaagtgcttagcacagcatttggtggccgggaagctctcaaaaagtgtaactttaaaggaaaaaaacagttactgtaaccttgagactgggaaaattggaagaacccataagttgataatggggacataggtaagtgtcctatcctggccaacagtggcctgcgggaccttacttaaccagacaagtgtgttctgagccttttctgaatgatgatggggcccagaagctaccaggagcccctggacttggatgagggccccatggcctcacactgccacctgggtctccctgacagtctccctgacggagtcctagggattgttaagctgcttcaacctttgtcttctctttgccaagacttaacgcctgggggatttccttgtggctcagacggtaaagagtctgcctgcaatgtgggagacctgagtttgatccctgaatcgagaagatcccctggagaaggaaatggcaacccactccagtattctttcctggaaaatcccatggatgaaagagcctggaaggctacgtacagtccatagggtcgcagagttggacatgactgagcgacttcactttgccaagacttgaatcctttgagtctttgcaaccctctcaagttctctgattttttttttccccaccaagaggcctgaaccaagccatgtgacccaagtacagagtgttttccttttggaggagaggaaacgagaaaaggagagaagagaagagaaaagaaaaggagaggagaggaaacgagaaatcagccaaagctgaaagtaagctggttctgctgccctctggcgttcagctggaagctgaccagcacacccggctctgaacccgggtggggacaaagaagcttgtttctggagcacagccttgtttctttgggaaacagtagggtcaggcatttggggagctgaagaaacacagtaactgtgcttctaagaacaagtcaggctgacacatagattgactgaaagtgtattttcatgagtcccctagccagcgttagccctccacataggcatatgaaaccccaaaaagatcatagcagctgtgaatgaaatgcaagggtctacattttttgcaggggaaactgagcccaagatcagaaaacctgttaacatcagagcagagcttgtctgagaaggtgcttctgactccagcctcccttctttcctcccgttccctcccctcctcctctcccttctctccttcattcgtctcctcctcctttttcttcttcctcatcaccactgaactttttccatcctagtggttaacaccaatgcaacacttcctatggccagtctctctgctaaaatgtgtcccatttcctctagcatttaacacaagtgtgtgcgtgctcactcgtgtccgactctgagaccccgtggcctgtagcccgccaggcttctctgtccacggaatttcccaggcaggaatactggagtgggtgatcgctgcctcttccagaggatctgctgacccagaggttgaatctgtggctcctgcattggcaggtggattctttaccactgagccaccttaacgtttgcaatgaggcagtaatatggaaagacagttttaattcattttctggttaaagaaactaaggctctgagagataaaatgcttgctgagttacacaactggatggattcctagcctcgctggaagactttatgctctgctccctgtattatattaagggcagagtaaaaacaaaagcaaagtccccggagtttgtagctgaacagtcccaatgcagacattcctcttctatcgtgctttgctttaccaggcttcacaggtactgtatttttaacaaatcacaggtttgtgaaagccctatatggagcaagtccatagccttcatttttccaacagcgtttgctcacttcctgtccctgtatcctatgctggtggttctcacaatatttcagcctatctcataattgtatttgtcatggtgatctgagatcagtaatgttactactatgacttgctgaaggctcagatgatacttagcatttttagcaagtaaatatttttaaattaagatatatacattgctttttcagatgtaacactattgcacacttcatagactacagcgtagtgtaaaaacacaacttttatatgtcctgggaaacctcagagttcatgtgactcactctactgtgatattctctttatcatcatggtctggaaccaaacccccagtattccccacgtgttaagtgcttagttcctgcagttgtgtctgactcttcgcaaacctatggactatagcctgccaggctcctctgcccatgggattctccaggcaagaatacagaagtgggtttccatgccctcctccaggggatcttcccaacctagggatcgaacctgcttctcctgcattgcagatggattctttactactgagccatcagggaatccctatttccaacatgaatctgtatttattatgtgccagactctgttctcaacagatcacacatattaactcttttaaacttatgtgttcctataaagtggtactttattatccccactttattggtaggaagactaaagcagggttaattatttgtccacttgacttcacattccaggatgtctggctctaagtgaatgatcacaccatcatgattatctgggtcatgaagatcttttttgtacagttcttctgtgtattcttgcgaccttttcttaatatcttctgcttctgttaggcccctaccatttctgtcctttattgagcccatctctccatgaaatgttctgttggtatctctaattttcttgaagtgatctctagtcttttcctttctatgttttcctctatttctttgcattgatcactgaggaaggctttcttatctttccttgctattgtttggaactctgcattcaaatgggtatatctttccttttctaatttgcttttcacttctcttcttttcacagctatttgtaagccctgctcagacagccattttgcttttttgcatttctttttcttaggaatggtcttgattcctgtctcctgtacagtgtcatgaacctcattccatagttcatcagccactcgatcagatctagtctcttaaatctatttcttacttccactgtatagtgataagggatttgatttaggtcaataagaagctgaagttgaacggttctatgaagacctacaagaccttttagaactaacacctaaaaaagatatccttttcattataggggactagaatgcaaaagtaagaagtcaagaaacacctggagtaacaggcaaatttggccttggaatgcacaatgaagcagggcaaagactaatagagttttgccaagaaaatgcactggtcatagcaaacaccctcttccaacaacacaagagaagactctacacatggacatcaccagatggtcaacactgaaatcagattgattatattctttgcagccaaagatggagaagctctatacagtcaacaaaaacaagaccaggagctgactgtggctcagatcatgaaatccttattaccaaattcagacttaaattgaagaaagtagggaaaaccactagaccattcaggtatgacctaaatcaaatcccttatgattatacagtggacgtgagaaatagatttaagggcctagatctgatagatagagtgcctgatgaactatggaatgaggtttttgacattgtacaggagacagggatcaagagcatccccatggaaaagaaatgcaaaaaagcaaaatggctgtctggggaggccttacaaatagctgtgaaaagaagagaagaaaaagcaaaggagaaaaggaaagatataagcatctgaatgcagagttccaaagaatagaaagaagagataagaaagccttcctcagcaatcaatgcaaagaaatagaggaaaagaacagaatgggaaagactagagatctcttcaagaaaattagagataccaagggaacatttcatgcaaagatgggctccataaaggacagaaatggtatggacctaacagaagcagaagatattaagaagatgtggcaagaatacccagaagaactgtacaaaaaagatcttcacgacccggataatcacgatggtgtgatcgctcatgtagagccaaacatcttggaatgtgaagtcgagtgggccttagaaagcatcactatgaacaaagctagtggagcggatggaattccagtggagctatttcaaatcctcaaagatgatgctgtcaaagtgctgcactcaatatgccagcaaatttggaaaactcagcagtggccacagggctggaaaaggtcagttttcattccaatcccaaagaaaggcaatgccaaagaatgctcaaactaccgcacaattgtactcagctcacatgttagtaaagtaatgctcaaaattctccaagccaggctttagcaatacatgaaccatgaacttccagatgttcaagctggttttagaaaaggcagaggaaccagagatcaaattgccaacatccgctggatcatggaaaaagcaagagagttgcagaaaaacatctatttctgctttattgactatgccaaagcctttgactgtgtggatcacaataaactgttgaaaattctgaaagagatggggataccagaccacctgacctgcctcttgagaaatctgtatgcaggtcagcaagcaacagttagaactggacatggaacaacagactggttccaaataggaaaaggagtacatcaaggctgtatattgtcaccctgcttatttaccttctatgcagagtacatcatgagaaacgctggactggaagaaacacaagctggaatcgtgattgccaggagaaatatcaataacctcagatatgcagatgacaccacccttatggcagaaagtgaagaggaactaaaaagccttttgatgaaagtgaaagaggagagtgaaaaagttggcttaaagctcaactttcagaaaatgaagatcatggcatctggtcccatcacttcatggcaaatagatggggaaacagtggaaacagtgtcagactttatttttctgggctccaaaatcactgcagatggtgactgcagccatgaaattacaagatgcttactccttggaagaaaagttatgcccagcctagatggtatattcaaaagcagagacattactttgctgactaaggtccgtctagttaaggctatagtttttccagtagtcatgtatgtatgtgagagttggactgtgaagaaagctgagcgccgaagaattgatgcttttgaactgtggtgttggagaagacttttgagagtcccttggactgcaaggagatccaaccagtccattctgaaggagatcagccctgggtgttctttggaaggaatgatgctaaatctgaaactccagtactttggccacctcatgcgaagagttgactcattggaaaagactttgatgctgggagggattgggggcaggaggagaaggggacgacagaagatgacatggctggatggcgtcactgactcgatggacgtgaatttgagtgaactccgggagttggtgatggacagggaggcctggcgtgctgcgattcatggggtcgcaaagagtcagacatgactgagcgactgaactgaactgaactgaactgaactgaatgatctagtggttttcccctctttcttcaatttaagtctgaatttggcaataaggagttcatgatctgagccacagtcagctcccggtcttgttgctgactgtgtagagcttctccatctttggctgcaaagaatataatcaatctgatttcggtgttgaccatctggtgatgtccatgtgtagagtcttctcttgtgctgttggaagagggtgtttgctatgaccagtgcattttcttggcaaaactctattagtctttgccctgcttcattgtgcattccaaggccaaatttgcctgttactccaggtgtttcttaacttcctaattttgcattccagtcccttataatgaaaaggacatcttttttggatgttagttctagaaggtcttgtaggtcttcatagaaccattcaacttcagcttcttcagcattactggttggggcatagacttggattactgtgatattgaatggtttgccttggagatgaacagagatcattctgtcatttttgagattgcatccaagtactgcctttcagactcttttgttgactatgatggctactccatttcttctgagggattcctgcccacaggagtagatataatggtcatctgagttaaattcacccattccagtccattttagttcactgattcctagaatgtcaatgttcactcttgtcatcatctgtttgaccacttccaatttgccttgattcatggacctaacattccagcttcctatacaatattgccccagagaccactttcaagcctaggttgtctgcctgtgtaatcagggccttaaccatagctagattgtctccccctgagaaacgggggccctgatctgggctggggacaaactctggctattctagtccctttgagccatgcgtggaaaggtcgtgtcatgtctctctgaccttcgccctggggtctggagccatgagatgttatataaaatagtatcttcttccttttctatttcctggcactgcttttttcttcttcaaggacttcctggcattgttatattttaaaatttacttatagcttattccttgtccctctctctcggatgtgagccccacaggagtgaggaatccactgtattcactcctcaacgtccagagcctggcagtataagtgtttaatacgtagtcatgaaaactcctctgggaaggctaagggtcccccaagtcagaagatggtgcagggaggaaaggctggcttgctgtatccccaggggcagctgttattgccagagttatggataaatttctggcaaaatagaggctgtgaatgagcagggacaggcagccttggaagggaagggacggggcagcaacacactagagaaacagggaggctcttagagggggtcctgagtcctgactgactacaataggacatccttccttatgccctcccagacccatggagggaacagacccattttcagtgctgacaacagagatcctcatgcaaggctctggattcaagaagaaagaaaagcttggagagaattcaagtgacaaagtgggaagtcaggtctcatcttcagtgagctgaatgcagggctgagtcatcccagactccaaagtccagcacctgggacagcggaggactgtagagggacctttcctccctgcccctcggtctcctcttctgaaaatgggggtgataataataccatcctcactgggctggtatgagaattgggtgaggaagggtatgtagtgtttaggacagcgcctggcacgaaataagagctctgtgagtcttaacctggaattactgccacaaggtctgttcctgttattattattgtagggagcccaccttgagaaccaggctggacttaggggcaggcagacctccagatgggaaactaaagaaaagcaggcagtcaggctccagagccagcccctctgcccaacctctgtgctccccactcccatacctgaaaggttggattttgtggtccagacctgagaccacagcatcattcaggcccaagtttgaatattgaatccactgtttccaacagtgtgtgtatttgggtttatcacttaacctccccatatcccagttttttcattttgaatatggggatatcaatagtaccaccaggctttccttgtggctcggacagtaaagaacccacctgcaaggcagggtttgatccatgggtcaggaagatcccctggagaagggaatgacaacccattccagtattcttgcctggagaattccatggacaggggagcctggctgcctacagtccatgggtctcaaagaattggatacaactgaacagttaacacacacacgatcagttcagtcagttcagttgctcagtcgtgtatgaggctttgagaccccaaggactgcagcacaccaggcctccctgtccatcaccaactcccggagtttactcaaactcatgtccattgagtcagtgatgccatccaaccatctcatcctctgtcatccccttctcctgttgccttcaatctttcccagcatcagggtctcttcaaatgagtcagttctttgaatcagatggccaaagtattagagtttcagcttcagcatcagtctttccaatgaatattcaggactgaattcctttagaatggactggttggatctccttgcagtccaaggactcttaagaggcttccccaacgccacagttcaaaagcatcaattcttcggcactcagctttctttatagtctaactcttacatccatacatgactactggaaaaaccatagctttgactagatggatctttgttggaaaagtaatgtttctgcttttgaatatgctgtctaggttggtcataactttccttccacggagcaagcgtcttctaatttcaaggctgcagtcaccatctgcagtgattttggagccccccaaaataaagtctaacacttttccattatttccccatctatttgccatgaagtgatgggaccagatgccatgatcttagttttctgaatgttgagctttaagccaacttttccactctactctttcactttcatcaagaagctctttagttttttgctttctgccataagggtggtgtcgtttgcgtatctgaggttattgatatttctcctggcaatcttggttctagcttggacttcatccagtccagtatttctcatgatgtactctgcatataagttcaataagcagggtgacagtatacagccttgacatactcttttcccaatttggaaccagtctgttgttctatctccagttctaactgttacttcctgaccagcatacagatttcttcaggaggcaggtcaggtggtctggtattcccatctcttgaagaattttccacagtttgttttgatccacacagggctttggcatagtcaataaagaagaagtagatgttttttctggaactctcttgcttttttgataatccgactcatcgaagagtacccaccaatagtacccacaccaatagtagacacacacacaatagtacccaccaataatacaaatactaagtatttggaattatactcagtgttagttagtttttattattaacagaggaggaagaaagattagcatctcagatctatgtaaaggaggctgttaagtggacctttattacttgtgttcacataactatcttgttttgatggaatgcagctgtttcctgtctgaggctctaatgtgtagaccatgggtgacagttccccagtatgaccactagatggcacgcatgttctttcctgcctgacgagccaagccagacacaatagtggaaagctaccttttatcatcctgtcgctgggctgcaacctttgcctacattctcatttactcctcacagcctcacagcagttcccagattaaaggacatatttcaccaaaaatgctaagcacagttcctggcatatgacatgttgctgctatttttacagagttgggactgagacacaggagagagtgagtaggcagcaggagcctgggttctaaaaggtagacccaactggctgcaagtttagcatcttttcccctaaaatttcctccctctgttccctctctgcacatagaactacagtgcagtctgtttcctgactccgtggaacttacagtccaaaatgtcctcatctctgttcattcattcctgggacagttctgctctcagtgtgccttctttcttgaaggccacagagatctgggtgctgccacctactctgcaggacccagtcactgtgggtcacaccattcagaccccacgttctctcccactgtactgctactgcttcagagcaagcccgtgggtttttaggtactgcacagcatcttcaaatcccaaactgctggatggtgtttattccatgtcaccatggctttgacatcaaaatattttgcaaggtttcctggaggcccttgggagggagatacatgaaaagaagatgggtcgcaagagaagagttcttgggcttaccgctgcttacaatagaaggcttcccaggtggcgccgaaagaaagtgaaagtgaaagctgctcagtgctgtctgactctttgtgactccatagtccatggaattctccaggccagaatactggaatgggtagtctttcccttctctaagggatcttcccaacccagggatcaaacccagttctcccacagtgcaggcagattctttaccagctgagccacaagggaagcccaagaatactgcaatgggtagcctatcccttctccagtggatctttctgacccaggaattgaactggggtctcctgcattgcaggtgattcttcacctcgtggtaaagaacccacctgccaatgcaggagacataagagatgtggtttcagtgcctgggttgagaggatcccctggaggagggcatggcaacctactctagtattcttgcctggagaatcccatcagaggagcctggcgggctaaagtctatagcgtcacaaagagtcagacatgactgacatgacttagcatgcacagaatgaatattccagaatatatctggaacatatatcacatgaaatattctgctgctaaagtaaaccatcaaacaccactccactgtgccatgataggtagacaagagatgaattttgagatcattcagagaaaatctccaggaaagggaataggtgagggaacatgttttaagtgaaataagtgagacagaaaaaaaacaaaaaacatactgaatggtatcatttatatgtggaatcttcaaaaagaaaaaaaaagtaaactcatagaaacataaagtagataactggttaccagggtcttaatggtggggtaatagggagaggctggttaaagggtacaaacttttcagctataagatgaatgaggtctgagacttccccagtggttcagtggttaagactctgtgcttccagtgcagggggcatgggttcaatacctggggacgaaactaagatcccacatgcagtgtggaatggccccgaaaacagatgggtcaggcctgaggatctaatgtaaaacatggtgactgtagtcaacaacattgtactgtattgttgaaatttgcaaagagaatagaaccctcaaaagataaatatgtgtggtgatggatgtgttaattaaccagatgaggggaatcctctcacaatgtatatgtctatcaaaccatcatgatatatgcttaagctatcgtcaggatttgttactggcttattcaacttcaatgttgaataaatcgataaatatatacaatttgtttccaaggaaaatgagatttgacttttgagtaggaatttgggggttatctgggaccccacttgccagcaccatgggcttgcctcattggaattgatcccctgcttctgatcttggtgagacctttggccacgttacacccatctggtaatctggcctttgccctttctgtgttgcagtgccctggtttccaagaaccattcaggaactcgacaactttgccaatcagattctcagctatggagctgaactggatgcagatcacccggtgagccctcggccccgcccatgaggctccctcagttcccccctccaccccctccaccccctttggagcaatgtgtctttgtttgcttgtatgacaaacatttattgagcgtctacttagacatcatcattatcatggttatctttgaagcaaatacagatcaccatccagaaactattatttatttatcatatatgtatgtaagggatgggtattcacatatgcacaaaaacacgtgcacatatgtaaatcacctttatttctgatttggtcctaccacagaggtttaaatcaagtgctcgggcgacactaagctactaacaactccaccggctacagtggggcagtgggggtggtgacctggaactggatttcaaagcctgagaagatgctggtcatataaggaaccaagaggctctgtgagccaagggagtagcatatgcaaaggctcagagtcctcagtatctggaatatttgggcatgagtctgagcaaactccaggagatggtaaaagacaggggagcctggcgtgctgaagtccatggggcgcaaagaattggaaacaactcagttactgaacaacaacagcaatatttggggaatggctgagttgatgtgttaggcgtgagggtgagagtgtcaggagatgaagctgggtggtgggttatggtcagattttaaaagatctgatgtgtcagatagagcatttgactgtatcctgtatccattcatatttttaagtagaggaccaaggttggagtcttactctcctttttagggtggagaactttagaaggagcagccttctagaggctgagaggtgaggcttctagaggtgagaaatgccaccattgcgttgactgtcatttactcgccgaccaggcaaatggttcctcagtctttaaacgacttggaggctgttttcactggcgatggttcctgtaactcacttagagcctcttcattttatcaggactctgttttctcctccgtctcagctatgtggtctttaccgctgagcaggttgtgaatgtgctcttcacaaaggctcttttcagtaagcaaagctgatgttcccattgtactgacagagtcactgaggcacaacaaaagtaaatgagtcatccctaagtcagcctaaactttggatccttcgactctttcatctgtgctcatagtacctgaggacagaagtctaaccagtgtcagaaatccaggccctttcacagagacaaagagcaagctatttgggcaggcaacccactccagtgttcttgcctggagaatcccagggacgggggagcctggtgggctgccgtctatggggttgcacagggtcggacacgactgaagcggcttagcagcagcagccttttaaaatatgaacagttgttgcttgttccaattcaaatagtaaaccccttagagtggactcaaaagtgcagaaaagcatgaggaagaatatgaagatcatccctaatcttagttatttctcttttttctcttggttctattctgcacttttttttaacttggagaaggtgttttataagcagaagcaaaggtgaatttcctccagttcctatacttcaaaacagaaaaaaaaaatcacctgttatactgtccaaaaccatcaatattttattaattcatttatttagacacgcgtgagtacacatggcgcttcccaggtggtgcagtggtagaaggaaacgggaacccactccagtattcttgcctggagaatcccatggaggaggagcctgggcggctgcagtccacggggtcgcaaagagtggtaaagaatctgcctgccaaatgcaggagatggagcagactcgggttcgatccttgagtcgggacgatccccggaagtaggaaatgacaacccactccagtattcttacctgggaaaccccttggacagaggagcctagtgggctaccgtctgtggggtcacagagtcggacacgactgagcatgcacgcacacagcatggttatacacattttaagtcagtgccatcaggtcctaacgcaccccccacaggaagcttgtaggagggttcagtctttcaggatgattcggcagtgaatcctcctgtctgtgcatctttaagtgaacttcccagagcttctctgattctcatttgtgaaattatttaaggatagaaaccggatttcgggctcctcatatctattacttaaacacctgctccctgcaaaaactagaggtacagttgcagcatttggaatctcgtcccatcttcctgggtagaaagcaactgagcggagcccggggaagcgggggcacacaaggagatggtctacatgccccgtgacacgtcttgggcagacccactttgccgcctgcccagggagacgagcatctccaaagactccgtttctcagaaatgctgtctggccaccctgcccccgtccctgggatgttttctcctcctcccaagctcccgcctcccgcccagctccgtgtcccttccgctggccacgtgctggctccctcggagcaacgggggaagaggccagtcctcagaaacggcccgttccctctccttacccttgtgtctcctcagaggcactcggggctggtcttaaaactccctggaattcattttctttacagacccagcccatggctttggctccctgacctctctgtgtcatgctttttatcataaaaatgcgatttatcaggtacacggtccccctgacgaggaggccaggctctctgtgttcctttctgtgacttttcatcagatctggggaactcgcgggccaaggacagagtaaaccctccagggtgcttccccgcagcctccaggccccgcagggcctggcctcgccgcaaggggtggctcgggcgttcttcccggaaggaccctctgttcctcccggtcccctggtgttcaggctgaccccctgcccttggcagtgtccactgacagctgagccagcatctcacttcagggctttcaaaaccgcccctttgaggaatgaggccaaggaaggcttgttcccgaaatgcagggtagagggtacctgcctttcagcggcaatgtggaagcccttgccctcttctcctggctctctcccgccttcccccacaaccccgccttccttccacaaacactgattaagcaaataacatccacagctaatgtttctccagtgaggactgtatgccagatgctgtgctgaatgctttacccacattttcaaaatttcaatgttataacctccctgggaggattgaattttctcattttcagaggagacaactcagacaagcgggctgtgtagcctcacgtgtatgtggactgtgtcccaggctgtggagaggagaggggctgtaaatgattagtgagacctcgttccttctgccctccacaggccttcggtcatggggtagagtggggaggggtgtccagtcctcccaaaaggatgccagagggggctaggatacagcctcgcaggcggaattcaaatgggtctagtttttgtttttagatcattaattaatttggttgctttgggtcttgtgggatctagtgccctgaccagagatcaaactggggggccccctgcattgggaacacagagtcttagccactgggtcaccagggaagtatcccaaattggtctgattcctgtttctaaaatggactctcctttctctgacatctcccagcctctgtgctcctgtccctgtcatttcctttctctgggatattttttcttattctctcacttctttgcctgctggcaaacctgtcttttcatcttttaaggcccagctcacatatcttggcttccctaaagccttcctcctgaactctttctcctggtcaagtttttcatactgatgctgcagagctatgtgcacggggttttatactttgaacacagtatcagctcaaaataaattcattgcctcagaggacttctttaatggtcatgtgcacagttcttaaattgtagtctttgaaaaaaattctcatgatcaaggaataaagtctgtattttagactctcattttaagcatctataagttccattatgtcactagaggctttggaaaatcctataaaaatgaaaccaattcaacctaatgttccttaaatttctttgcccatggaacccccttttcatggaatacctagccacactatcttgaatggtagtgttccatggaacatagtttgagttcagtccagttcagttcagttgctcagtcgtgtctgactctttgtgaccccatgaactgcagcacgccaggcctccctgtccgtcaccaactcctggagtccacccagatccatgtccattgagttggtgatgccatccaaccatctcatcctctgtcgtccccttctcctcctgccctcagtctttcccagcctcagagtcatttccaatgagtcagttcttcgcatcaggtggccaaagtattggagtttcagcttcaaaatcagtcctaccaatgaacacccaggactgatctcctttaggatggactagttggatctccttgcagtccaagggattctcaagagtcttctccaacaccacggttcaaaagcatcaattcttcatttggtaaaatcataacacacaaagtacatggttaaacatcaggtttaaagagtcagatagtatatactatcagttctaaggtccctgtggactagaatggtttggaaagacttctggaaagagggaggtctgaggtgagccctctagtaacaaggtcagtagttgttgttcagttgctaagtcgtgtctgactctttgcaaccccatggactgaagcacaccaggcttccctgtctttcactgtttcctggagtttgctcagattcatgtccattgagtccatgatgccatccaaccatctcatcctctgctgccctcttctccttttgccttcaatctttcccagcctaagggtcttttccagtgagtcggcccttcccatcaggtgaccaaagtattgatcagtagggccaaatgcttatcaaacaacccccaaatctctatgaattaacccagtaaaagttcatttccagtgtaggtcaaaagggaaatttcctcccacagtcctgcagagatcaagtctccttcgacctagtggtagcatcctcatctgggtcctgggagccatctccattctgccaggcatgggagaattgctcctgggaggtttctatggtccaggatgaaaggtgactcacatcccttcacttcagtttcactgcctgcagctcagtcacagggttgctgctccctgaaaaagagaccaggaacagtggtttagcaatgctgtctgaaagcgagaaggcccagatcttggggaccaccagcagcctctgccacacagaccctaaccccatagattccctcttccagttttcctggcgcctgtacctgcttctaaactgaagatctgcctgagggggggctttctggtggggaaacattagccaatacaactgcttttctgtgtctctttctacttcttgatttaaatctctcaaattgcttttcaatatttccagaacatagatgctgagtttccctgctctccaagaagagccttgttctttcctgaaagcaggactatctttccaatatttctctttcccttttcctttgcccatccaaccttctccatcccagggtcctgtcaaggtctgttctaaggatcagtcagagagttgagtcatcaaagtctccttgtgcttctactaagctgctctgtcaaagtataacttttaaaaagttaagaacaactgtcatacaggtagatagtgaacatctctcaaagatctatgaactctggagtaagggaatcaataacatggcaaggacagtgcaaaggaagatataagagatgaaaacataaggtcattgaaaaatgggatgctggaatgagattacaaagatgggtacgtgtgattcagttcagttcagttcagtcgctcagtcgtgtccgactctttgcgaccccatgaatcgcagcacgccaggcctccctgtccatcaccatctcccagagttcactcagactcacgtccattgcgtctgtgatgccatccagccatcccatcctctgtcgtccccttctccttctgcccccaatccctcccagcatcagagtcttttcccatgagtcaactcttcacatcaggtggccaaagtactggagtttcagctttagcatcattccttccaaagaaatcccagggctgatctccttcagaatggactggttggatctccttgcagtccaagggaccctcaagagtcttctccaacaccacagttccaaagcatcaattcttcggcactcagccttcttcacagtccaactctcacatccatacatgaccacaggaaaaaccatagccttgactgaacggaccttagtcggcaaagtaatgtctctgcttttgaatataaacgataaagtcacaaccacgagtgctttctattggacagaagccatttgcaacttgatcataaaataaatgtttgcaacttactaatctgtaagggcttccccggtggctcagcggtagtctgcctgcaattccagagacacaggtttgatccctgggtcgggaagatcccctggaggtgggcatggcaacctcctccaatattcttgactggagaatcccatggaagagaggaacctggcaggctacattccacagggtcacaaacagtcagacatgactgaagtgacttagcatgcatgcattctttccagaagtcaaccctactgaagcaaaatcatactattcaacaccccaagtaaaaaaattgctgagattaaggcgagagattccaggtggactgcgggtgatgttacaactttgctcctatagacttctctcaccatcttcccatccactatgcctctcttctgactccccccaccactccttcaccaacaatatattttcctgtcaaaacatacttggttacatgcagtgcaatgaaaattgctgctattagcttaattgagacagggtgattataaataaattatgtgcagtcctacagaaattgctgctattagtccaaattgagatgggatgattagtcatcaccaactgtagcttaattcagagtgtcttccgcgtggtcacagagccctgtggccacctggcagcccagggaatgcaaggccaaatgcctgagaggtgggcttcaaggctgcagatctctattgctggtaacagaacaaaagtctgtgctgcctagttggcagggttcctttgtacattgagaatgaacttcttagaaacttgaagttggaaaagactatagttagaaaacttgccatatagaaaatttttgtaaaataatagtatacataattatatagataacataatggtatataaaatattatgcaatataaaatataataatattatatttggatgtgttgatacagctcactgtatcaatcttctgtccattcccataatgatttgagatgcatttttaatattattttactttttttctaattataaaaggggtagagataaattgggcttccccagtggctcagcagtaaagaattcgcctgtagtgtaggagacgctggtctagtgcctgggtcaggaagatgccctggaggagggcatggcaacccactccagtattcttgcctcgtgaatcctgcggacagaggagcctggtaggctatagcccatatgtttgcaaagagttggacacagctgaagtgactgagccaagataaattttcaagttgggattaacatatgtttttgtttaatcactacattgtgtccaactcttttgtgatgacctctctcttttgtgatagtagcccgccaggctcccctgtccatgggatttcccaggcaactggagcaggttgccatttccttctctatgggaggttcccgacccagggattgaacctgtgtctcctgcattggcaggcagattctttaccactgagccaccagagattgatatatacacactgctatatataaaatagataactaacaaggacctactatatagcacagggagctatacttaatattttgtagtaacctataatctgaaaaagatatatgtatgtatatgtattcagttatacatatatataaatgtataactgaatcactgtgccatataccagaaattaacatgattttgcaaatcaattatacttcaaataaataaataaaaataaaatgataaaataaacccaactgtaaaaaaaaaataaaggagggaaaaagaaacccacattcacagtaaaaaaaaaaaattactgtgtatttttacacattaaaagtacatttagaagcctaaatggcacagaagaataagaattcccatttcataccgttgattggatttgggtgtatttattttatcattgtttttattctatttaaataatccctctgatatagttgctacctaccagagatacaattttatgttaagctttttttttttttttttattgttggaaaaatctttaaactacctagacaaaatacattgaaggtaaaagaaaaatgagccaaatggttagagaaattgtcatgggcatcccattctggagacatcataataaagtggaaatccactggttaagcgaatttgaattcttcactcctctccctgggtaactatctcagacttcaaaccaaaactcaccacctggctaggacaagaaaacctaagtggaggtgctgtttctgcagttaagggccccttggcaaatggctctatgggcttcactttctgtatatctacatcaaaatataaaaatagatattctccaaggcaactttacaagtgcaaatcctatgctttgtgtttagggactggaaagagccatgaccattaactaggacttgtagtgaggatgactgactgacaaacgttgaggttaaattttgagtctttaagtttggagatatgttcttcatttagcccagtagacaggttcctcaaagtgtttgttagcgctgcttggaaataaaatgatagagtccaattttctttaatttatttttatttatttttggacaccccacagggcatgtgggattttccctgaccagggactgagcccacggcccctacactgaaagtatggagtctcaacctgtgcaccgccagggaagtccaatagcgcccagttttcttactgtattgtcccaaagcaacttactttcatccagaagaactgggttcagcagtagttttacgttttcagattcctaagctttcctgcctgtagttaatgatttaaaatcattcagtgcttgagggaaaacactatagttatacattgtaataactatgttatggaatcttttctaagctgaataattgcttaatttgagatttagttttggaataaaaaactaaataatatggaaattttactttactttttcagtgtgaaacatttagatttttctttttctcaaaaaaacctataaatatcctaggaaacaagctagggaactcctttctccctccctttctctccccctctatgtactcctccctccgccttatccttttcttccttctctattttaacaagtgttggtggttctttccatatgccaaccagactctgtatgctatggatacgcaggtgaaactacataatatacatggacccctggctctttggaattactggtagagttgggttttataaaacaaatgaacacaataaccaaccaaccaatcaagtgaagcagaaaacaatatctgaaagtcagggaatacttatcctttaaaaagagtctttaaatattactctccatggcataaacctttgttgtttgttcattaatgccttggtttggagggatggtggaacatagaaattgcaagctaaagtgatggatggtacagtttattggtagatgcttggagggaacaaagcaaggttctagagtgatgacactggtatcttgtttaactaaaatatagattacaatcaaatttttctggaaaatggtcttttttctagcttttttgaaatataattgacatacagcatcatgaagtttggatttacaccatgctgatttgatatgtgtgcatattttaaaatgattaccatatgtgattattataaacatataatatgattaccgtatgtaaggtcagttaacacctctgtcttttcacataagtaccattcttttcctgtggtgaaaacatttaagctctactctcttaccagctttcaagtataaagagtagcattttaactatagtcatcatcctgcacattagatccctagaacttgttcagcttgtaacttgaagtttgaccctttaaccaatatctccctgtttctcccactctccatcctctggcaaccaccaatctatcctttgcctatgaatttggcctttttagattccacatataagtgatgtcatacagtacttggtctttctctaacttatttcacttagtaaaatgctctcaagtttcacccatgttgtcagaaggtttttccttctcttttatggatgaataacatcccatcatatatatgtaccacattttctttatccatttatctgtcagcgaacacttagtttatttctgtatcttgactgtttgaatggggatgcagtggacatagaggtgcaggtacatctctaatagtgagtttatttcctttggctatatacgtacaagtaggattactggatcatatggcagttctatttttaattttttgaggaacctccgtactgttttccaaagtagttataccagtttacattcccatcagtagtacacaaagagttccttttctccacattcttaccaacactcatctttttgataatagctattctaacagatatgaagtgatagttcatggtgattttagtttcatcttactgatgattagtgatgttgagcatctcttcatatacctgttggccatttgtatatcttctttggaaaaatgcctgttctgatcctctgcctatttttaaatcagactatttgatttctgtctattgagttgtttgagtttcttgtatattttggatattaattccttagctgataaagagtttgcaaatgttttctcctattttattgattgccttttcatttggttaattgttccttttgctgtgcagaagcttttctgtttgatgtagtcccacttatttacttttgcttttgttgcttgtgcttttggtgtcatattcaaaaattcattttctaggccaaggtcaaggagcaatcctgagaaagaacaaaactagaggaattacatgccctgatttcaagctatattacaaagttatagcaatcaaaacattttagtatgggcataaagacagacagatgaactaatgggacagattaagagtctgaaaatagactcatgcacgtacagtcaactagtgtttgataagagagtgaagaatactagtgggggaaaactggatattcatatgcaaaagaatgaaattagacccctgtcttacaccactcaaaaaatgaacttgaaatgcagtaaattaggacctgaaatgataaaactccaagaagaaaacataaggaaaatgtccttttaaccagttgtgatcatctccaactctaggatgtgacctcccccaaccctcaacactgaaagacacacttggcctcttttcactcagaaatgtttacaaattgttgtggaaagtctgtctgcaagtcagcctcagaggagaaactagtatcatcctggttatgccctggggcagaatcttagttagtcaggcccctgccaagttttaaaggttgatatttcctgaagtgaagtgaaaagagtatggaactgagtgattcaaatcctaactttactggactactcttctctgaaccactgtttattctggaaagaaagggatcctcacactggtttaccttacatgtttcttgtgagagttataagttcctagcatgcacagactggcacataatagacactgaataaacggtattttttaagttgcaataccagtaagcatttacctattagtctattaagaagttagaggcagtgctggactcatacctttggtcaggagttgagtggctattgtatatcattttcatagacatttatcctaagaactctgcctaatttagcacatttatagattagaaatgctatagatgagatttctttaaaacccagacaccatttacgcttaggaatcccaagcgagagctcacattgaattgaaagtgtggctagtaatgtgtcactcatgatatcttgtgggacaatttattctcagattaactgagactttatttccagaatataatcaggggaaggcgaggtgaaatgtcagtggtcaaaggcccccattcaaagcatgtgtagataggccagatttcaaagcctgaagaaatcaagtgtctcctttcttcctagggatttaaagatcctgtataccgagcaagacggaagcaatttgctgacattgcctacaactatagacagtaagtctgctcggcgtgttggtgggggatggggagaagaccatactctcctttgcccaaagttggaaaataccagcttggagaatccttccctctgtgtatgtttgtgtatgtttaaatccttcctttaataacacacattaaaaaagtcaccatgagataaaacaatattaccccccacaccagggcccagctctctcccaagctttgttgtgtaattatgcagtgacatctgacataattataaaaggcctcagtcctgaataaaagagcctctggtgtttctgcattaaaccgggaaaaaggagaaagaagtatttacattcaagaaggagttggctgctttaccgaattagtgaatcattggaggtttcaggagagccaagcctcagggttctacttttatctgatctgacccagatgcgaagggcaattttagaatgagtttatttttttctctctgggattccgccagattttagctagaggaaaatgcaaatatcaaatgttatttgggaagagaattgttttgctattttgagttcttgggaactacagaaatgctcccatgagaaacttagtgtttggggacctgagctccattcccgagttaagggtgtgagaaaagacgtgctcaagaagaaaaatacagggtttagaacatgaggtgatgggactttaacagctttgctagaatatgggggagataaaggagatgctactgctttgtatacagaataaaaacgaccttcacaagggaaaggcttccagagaaaattcctttatctgaatgaatcctggtagtagcaggatccagaacagcgctgaccttagtcatgtctagacccagctggactttggcttgtggcaagcagggatcacagaatgtggtgatctctctccccgtccccatcatggccccagcatggtcaggtggacacatcaggcacagacaagagtccttcttcagacagtcaataataataggtcatttttaatctccttgctatgtctggggctttgctaaatgcttaatgtacataatttcatgtagtcttaataataactctccatttttcagatggaaaaactaaagctttagaacagcccagaaaataacttgctaaagtcatagatctggaaggtggcagagcctggttttgaactcaagcttttttaaccacaaagtcattctcaaccacttccttgagtgtctggggactctccaagtcaggagacaacacttctccagatgtcccaggagctgcttacggggtgcactcactccttcttggctcttgggacttgagggagagaaactcaaaccacctcttttccataaaaatattatacctggtgaagaagtgtggagttggttgaatgcttcctgattctggatggtcatgagttaaactggctactgaaaactatccagagatggctgatactcaaatgcacacgagatattttcaggcaattttacacctcatgttcagttcagttcagttcagttaagtcactcagtcatgtccgactctttgtaaccccatgaactgcagcacaccaggcctccctgtccatcaccaacggccagagtctacccaaacccatgtccgttgagtcggtgatgtcatccaaccatcctttgtcatccccttctcttcctgccctcaatctttcccaaggtcagggtcttttcaaatgagtcagctcttcacagcaggtaaccaaagtattggaatttcagcttcaacatcagtccttccaatgaacacccaggacagatctccttaaggatggactggttggatctccttgctgtccaagggactctcaagagtcttctccaacaccacagttcaaaaacatcaattctttggtgctcagctttcattatagtccaactctcacatccatacatgactactggaaaaaccatggccttgactagagggacctttgttggcaaagtaatgtctctgctttttaatatgctgtctaggttggtcataacttttctttcaaggagtaaccgtcttttaatttcatggctgaatcaccatctgcagtgcttttggagccccccaaaaataaagtcagccactgtttctactgtttccccatctatttgccatgaagtgatgggaccagatgccatgatcttagttttctgaatgttgagctttaggtcaacttttttactctcctctgtcactttcatcaagaggctctttagttcttcttcactttctgccgtaagggtagtgtcatatacatatctgaggttattgatatttctcccggcaatcttgattccagcttgtgcttcctccagccctgcgtttctcatgatgtactctgcatagaaggtaaataagcagggtgacaatatacagccttgatgtactccttttcctatttggaaccagtctgttgttctatgtccagttctaactgttgcttcccgacctgcatacaggtttctcaagaggcaggtcaggtggtctggtattcccatctctttcagaattttccagtttattgagatccacacagtcaaagactttggcatagtcaacaaagcaggagcagatttttttctggaactctcttgctttttcaatgatccagtagatgttggcaatttgatctctggttcctctgcctttgtaaaaccatcctgaacatctggaagttcacagttcacatattactgaagcctggcttggagaattttgagcattactttactagcgtgggagataagtgcaattgtgtggtagtttgagcattctttggcattgcctttctttgggattgaaatgaaaacggaccttttccagtcccgtgggcactgctgagttttccaaatttgctgacatattgagtgcagcactttcacagcatcatcttttaggatttagtgaagagaaattcacttcatgtagtgaattcacctcatgtagtgaagtgaaattaaaagacacttgctctttggaagaaaataaatgacgaacctagacaacatattaaaaggtagagacattgctttaccaacagatgtccgtctagtgaaagctatggtttttccattaatcaagtatggatgtgagagttggactgtaaagaaagctgagcactgaagaacttatgcttctgagctgtagtgttggagaagactgttgagagtctcttggatagtaaggagatcaaaccagtcaataataaaggaaatgagtcctgaatattcattggaaggactgatgctgaagctgaaactccaatactttggaaaagaccctgatgctaggaaagattgaaggcagaaggagaaggggaaatgacagagggtgaaggagaaggggaaatgacagagggtgaaatgattggatggcatcactgactcgatggacatgagtttgagtgaactccgggagttggtgatggacagggaagtctcatgctctagtccatggggttgcaaagagttggacatgactgagtgactgaactgaatagtgaagtgaaagtcactcagccacgtccaactctttgtgaccccatgaacctgccaggctcctctgttcatggacttctcaaggcaagaaagctggagtggtttgccattcccttctccaggggatcttcccaacccagggatcaaacccaagcctcccacattgcaggcagattctttaccagctgaggtaccagggaatcacctcgtatagatgaaccccaaatggttaagtgacatactgaagggcatgtgtctcattagggactgaacttgtcctccaatttaaagcctgtttctgacctcatctccgctcatctcttttgaacttctgatgctgttttccatcccttccctctttacttttgtcttttatctcagcatctgttacagttgattctcattctttgaaggttacttgcttacattgatttgagaccccagcaaacacagggcatttccacattcatccccagatatgtgcagagcaagggaaaatgtgagtctcctgatgtatcagttcccaactgaggtcaaacaaggcaacactgccttcttgttttggcttttctactgtaaacaagtgtttcttttgcggtctctttagagccatgttgttgactttttgttcttttggttggtatttttgttgtttaaaatggccctccagcatagagctgaaattctgtctcatggtcttgagtacaggatggctctgacacgcctaatggggaaaatgtgtgttcaatatccttccttcaggcctgggctatagtgctgctggctgtgagttcagtgtgaatgaatcaaccatatacattaagtaaggtgtctttaaacaaagccatatgcaagacaaggttgggattatgagttgaaatgtgatctgggtcctgcacttcatgtaggagcaacggttcagggttcacttgagttcatggtgtcttgatggagcagaactgctatcagtaaggagaataaactctgttctactctctgaagttttaccttcttcctccttcaggcttcatctcagtctcctctgccctcctcctcctaccccaaaaatcatcatgcctttcaagacccagttttgaccctcttccatgggctctgccagcctccatgccaacagccccacattctggcccccagcaccttcccagtcctcctcccacatggaggtcaaaatcctgcccctggagtcatagattcacaggatcacttgatccaatgtgtttactctgttccaggacacatgccaagagcaagaccaacaaactccatgtcctctggggattattgagaaagacagacaatgacaaaaagaacaatacatgctatcggtatgaccaaagtcaaaacacgggtgtcatgaggccagataattaggaactttaattctgactggagggtattggttagaggaagtgacatttagactgagaactgaagatggagtaggcatttatcagcccaagagaatgaggaaagtgaacagaagggcaggtattgttagaaacagggcttttgttgtaagatgtatatttgggtccagaactgaattactggaggcagtcagaaagcagctaaaccctgttagcaaccttttcttggcccatccaccatgtgatgctctggttcctccctaagagtatttagcaaaagccttaaaacatcagtttgaagaggcactgacaaattactcttgtgtttaggggcaccaaattatttgccttggtaatgattacatgtatggggacttggtgtaaaataagactgggtgaggaagctgatactttcctggactataggtgctaccttgaatgccatctttggctggtggaataatgtaaaaccaggatcttctccttaaaatatggttttgtttttgtgggttttttttttggaagggagatcccaattggctgaaatcttatttcaagctaagttgataatttttatttcaagccaaattaatactttccctcaaatatcttggtttattttacttcctgagatcatagtttggtaaaacaattgatgatatattcaaagactgaggatcttgtgtaacctaggtctcttggtagaaggagaagatgaaagaaaatgcgcagaatttaattcctaagtagaccatggatggacagaggagcctagcaaggtcacatgatttagtgactaaacaacaataaatattcccagaacatcatgggtgttaaataaatatttgttgaatgaatgcatgagcctaggagaccctatgacagtaaagattcaaagtaccaagtcagatggagctagagattgtgtctagaaccacttagaaggcagctgctgcagagtttgattatgtttctggagtggggttagactttagaattttatcaaagaatatgctaaatggactataagaatttttatcttttagccgcaactgaactgaaacaaaaggggtgttttattggctcctataagtgcaaagtgtaaagggaatcgttgaggtggatctaggactccacttccattctccttccttccccctgactctggcgtcccctgtagtgatcttgctcgaaggcactggcctcatctctctcagaagtggacccagcacctctaggctgacaccacaatctggccagaggttctatctcttttcaacagaatcaataacatttctttcactgagtctcattggctctgatcaggaaatgggcccatctctcagccaatcactgtggccagggaaatgagacactctaattggccaggcctggtcacatgccccctctgaaggtaggaggggtggagtctcctcttatttgaacctgcagactgagagcggagaagggttctttactggcagaatgggaatgggtatggaactctggaacagcaaatgtcaaccaaggggatatctcattgtctagtatgttacagtctcttgaaaatgtgctgctgttatagcagagactttgctttctaaatgagaatctgttatggtgataatttccaactatccagtcgtattgtttgtcagcaccagtgttaggtactttatacatagtgtttcacttacctctccaccataccctccaaagagttacttgttattagcccatgtcctggctgtataggctcagagaggtttactaaattgcctgaggttactcagccaatggcagagcaaagcagtctacttacctctgaccttttccaaagcctgttctttctcttcgtcagcacttaaccctgaaacaatggtgcctctgtaggcaggtctttcgaggtgttcttttcacagttcctacaccattatagaccctctgggcttttaattcttaagcaaaaatcagtcttttccccctaccctctgcccatcactccatggaacataacagtgactttgttttcatgtctttggaagagctacaactctgaaagggaaagagggacctagtttggagcctgaagacaatccataattctaaggtaaacagtcttgccttgtcccagacactgtgtaccctgttaggaaacaggccggcagcccagagaacagtcatgagtctttgaagtcaggctttgtttggttttcattttttgctgttcagaacatggctcactcttagctggttttcaaaaggaccttttgaattaatgacgctcggataatagagtatcagctgggagtatattggaatccagaagcttgggtctcccctcccccacagttcagttcagttcagttctgctcagtcgctcagccgtgtccgactctttgagaccccatgaatcgcagcacgccaggcctccctgtccatcaccaactcccagaattcactcagactcacgtccatcgagtcagcaatgccatccagccatctcatcctctgtcgtccccttctcctcctgcccctaatccctcccagcatcagagtcttttccaatgagtcaactctccacatgaggtggccaaagtactggagtttcagctttagcatcattccttccaaagaaattccagggctgatctccttcataatggactggttggacctctttgtggtccaagggactctcaagagtcttctccagcaccacagttcaaaagcatcaattcttcagtgctcagccttcttcacagtccaactctcacatccatacatgaccacaggaaaaaccatagttaaacttttccaaaaaactttagaggaagcaacatcccaaactcattctatgaagccttcattgacctaaatcaaagttagacaaccatactaatcaaccaatcagtggatatcaaggtggcaaagtaggaaaacatggaacccacctttggctacaaacacagcaaaaacacatctacatgaggaaaatttcttacaaaaaaaccacctggaaactggcagaagatctcttatacaaccaaagctacaagaaagatctccacataaccagtgggatcagaaaaaaaaaagaatagaccaatatctctgataattgttgatataaaacttgctaatactaccaaatctaattcagcagaatgtttaaaagattatacaccataaccaaatgatttcttcctagaatgcaaggatagtacaacctgaaaaaaatgaatgtaacatgccacattaacagaatgaaggatgaagttcagttcagcccagttcagttgctcagtcgtgtccgactctttgtgaccccatgaactgcagcacaccaggcctccctgtccatcaccaactcccggagtccacccaaatccatgtccattgagttggtgataccatccaaccatctcatcctctgtcgtcctcttctcctcctatcctcaatctttcccaggtcagggtcttttcaaatgagtcagctctttgcaacaggtagccaaagtattggagtttcagcttcaaaatcagtcctaccaatgaacacccaggactgatctcctttaggatggactagttggatctccttgcagtccaagggactctcaagagtcttctccaacaccacacttcagaagcatcaattcttcgatgctcagctttctttatagtccaactctcacatccatacatgaccactggaaaaaccatagcattgactaaacggacctttgttggcaaagtaatgtctctgctttttaatatgccatctaggttcgtcaccactttctgtccaaagagtaagcgtcttgcaatttcatggctgcagtgaccatctgcagtgattttggagcccagaaaaataaagtctgacactgtttccactgtttccccatctatttgccatgaagtgatgggaccagatgccatgatcttagttttctgaatgttgagttttaagccaactttttcactctcctctttcactttcatcaagaggctctttagttcttcttcaatttctgccataagggtggtgtcatctgcatatctgaggttattgatatttctcccggcaatcttgaattcagcttgtgcttcatccagcccagcgtttctcatgatgtactctgcatagaagttaaatatgtagggtgacaatatacagccttgacatactccttttcctatttggaatcagtttgttgttccatgtccagttctaactcttgcttcctgacatacagatttctcaggaggcaggtcaggtggtctggtattcccatctctttcagaattttccacagtttattgtgatccacacagtcaaagcctttggaacagtcaataaggcagaaatagatgtttttctggaattctcttgctatttccatgatccagcagatattggcaatttgatctctggttcctctgccttttctaaaaccagcttgaacatctggaagttcacggtcatgtattgctgacgcttggcttggagaattttaagcattactttattatcatgtgagatgagtgcaattttgtggtagtttgagcattctttggcattgcctttctttgggattggaatgaaaactgagcttttccagttctgtggccatggctgagctttccaaatttgctggcatattaagtgcagcactttcacagcatcctctttcaggatttgaaatagctcagttggaattccatcacctccactagctttgtctgtaatgatgcttcctaaggcccacttgacatcacattccaggatgtctggctctaggtgagtgaccacaccatcgtgattatctgggttgtgaagatcttttttgtacagttcttctgtgtattcttgccacctcttcttaataacttctgcttctgttaggtccctgccattttggtatatatagcaattaatgcacaaaaatcatttcacagaattcaacaacctttcaatgtaaaaactcaacaaactagatacaggcgaaaactactttgatataaaaaattaaaattcacaattagcattgtactcaatggtaaaaagctgaaatctttttctctacaatcatgaacagacgaagatacccactgtctccacttctattcaacacagtactggaagtcccagacagcggttaggtaataaaataaatcaaagtcatccatatgggaaaggaagaagcaaaatgatctctatttacagatgatataatcttatgtgtaaaaaatcctaaacattccattgaaaaactgttagaataaatgaattcaaagttgcaagatacacaactaatacaaaatcacatatgtttctatacactaaaaatcagttcgtgggtcattcacccagcagtaatgggacttattttatcatgattatgcccctcctacagtctcctgtggcttctactttatctttggacatgaggttgtttttctttctttttttttttttttaaagtgagttccagcatcctcccctcccccacaggttcaggatataaggggtaggtccaacatatgtacttcagcaaactctccatagttttgttatgtcatagcaacagattctgagtaagcagatcttatacctagcatgcatttaaatactcttataacatcctggggcagaaacaccaaatccagcaagtttatgcccactcaacaagggatctcaaactcatggtgcatatagtaaatccacttgagcccacaggtatggttgctttagttgacaatacaaaacactattgttttgcttgagcttggatgcttttgttcagaaagaggatgtattcttcacttgtctcagtccccatcctcctattatctatccctgctactttacacattaaatgctacatgttaaatgcacttctgaatgtaagtgcatttccacactgggtagagtaggatatagaagagcaggaaagcccagtagttccccatgaatgagaagaaatccttggtgcagtgggtaaggttgcaagcttctgtccttgcttaaccaagtcacatgaatgtttcctatatcaagaagtggaatttttctctttcagataacttatgaaataggaaatccactgtcgtctggggtggcagctcatggactctggacccatgtccctctccccaagctccttcaccctttcctctgtacctgccctgctgctgacaaatatttcatgtctgtttcctagcgggcagcccattcctcgagtggaatacacagaggaagaaaagaaaacatgggggacggtgttcaggaccctgaagtccttgtataagacccatgcttgctatgagcacaaccacatttttccccttctggaaaagtattgcggcttccgtgaagataacattccccagctcgaagaggtttctcagtttctgcagagtaagtgcacatctgggtcaaaaggttgggggctggggatggaaagggggagagaaggaaatttaggcaagtgtgagtgtgttcgtgctgatgcaggcaggttgattctcccaggaaaatgagtatttcactgctgggctctgcctccctgccaggcccccaaaatccagtgtggattttgccatgtctatatccctgaaaggtttttttaatgctcaaagcccaaggtgcctagtcagggttctccccgcagctcctgctatgttatgagctggctgcagtgtgcatttgtgtaagacatgcactatttgtgccaagagatctgagccctaagtctattcatctggtctctggaatcttgttttgatcctctctagttgggagaaccttccttagtttagtcatttgtcaaatggagaccatccaccatttagtctttctcatagggaaattgtgagaatgaaatcacatactgaaagtgaaagcctagcgctcatgtatagtagatgctcactgagtttgggatgcattgcaatctgagtaattcagtaggtaaacaggtgattgaactgacctgcccatcatttcaggggagaaaagtgttttcttttctgccaggagctgttgactcagcaaaaccaagataaacagtcaacacatgttaaacacctactatgtgctaagtaaaatgcaggaaattagggaggcagaccacagggtaatagaaggaagagttttctatgcctcagagctacacagagacggtgtggccagctctagggcaagaagccagggaagctacctggtcgggagggaagtgggagctggactagatggggagtgagttggatgaccttttgaatccctcctatttagagtctttactattcagatagagaggagcagggctcaaacaaaataaacttcaacctgagggtctaagatacataaaccaagggacaaaggagtcttaaagatattctttggctagttatccatgttgctatggccaataacaagaagaatacaacagtaatactagtagttgtgtgtgtgtctgtgtatgtgtgtgtgtgcatgcacacacatgcatgcatgtgctcagttgtgtctgactcttttgcaaccccaaagactgcagcctatcaggctcctctgtccacggaattttccaggcaagaatactggagtgggttgccatttcctcctccaggggaccttcctgactcagggattgaacccatgtctcctgcattggcagctggattctttaccaccaattgatggggtggcaggtgggggtgggaaagaaatgtgtgctaagtcgttccagtcgtgtctgagtctttacaaccccataggctatagccctctaggcttctctgtccacggggattctccaggcaagaatactggagtgggttgccatgatctcctccaggggaccttcccaacccaggggtcgaacctgggtcttcagcgctgcaggcaaattctttaccgtctgaacaaccagggaagccaatgactatagactgcaccagtgcctaggagagaagtccagttcagtttagttgcccagttgtgtctgactcattgcgaccccatggactgcagcatgtcagtcttccctgtccatcaccaactcccgggcttgctcaaactcctgtccctcgagtcagtgatgccatccaaccatctcatcctctgtcgtccccttttcctgccttcaatctttcccagtatcagggtcttttccaatgagtcagttcttcacatcaggtggccaaagtattggagtttcagtttcaacatcagtccttcgaatgaatatccaggactgatttcctttaggatggactggctggatctccttgcagtccaagggactctcaagagtcttctccaacactacagttcaaaagcatcagttcttcagtgctcagccttctttatagtccagctctcacatccatacacgactactagaaaaaccataactttgactagataggcctttgttggcaaagtagtgtctctgctttttaatatgctgtctaggttgatcatagcttttattccaaggagcaagcttcttttaatttcatggctgcagtcaccatttgcagtgattttggagcccaagaaaataaagtctctcactgtttccattgtttccccatctatttgccatgaaatgatgggaccagatgcccattggagaagacaatggcaaacctcttcagaattcttgccttgagaaccccatgagcagtagaagagaagcatcgagtagtgattatagaaacagactctgaagccagagtgctggtagctgtgaccttgggcagagctttaattgctgcgtcttctcagctcccccatctgtaaagtgcagagaataggagctctatctcctagagttataatgaggattaatccgtgtatataaaatgcttaaacctgtgtctgacacatggtgggtattatacagcattaactattactatcatgatcatggtcgttaccattctccttccaggtctgaaattagggagattgagagacagatacaagagccagaggatgggtgatcaaaatggtatcggtattttattaccaatagaagctgctttgagaatgtggtatagatgtgtaggcaaaatggactttctaatgtttcacccctggattaggtaaactaacttgccagttaattcactggcacagtatctagtccattggctggccaagagccgactagaatgtgttcctgtgtggacagtcaagagagaaagggcagagagggtgaagttgagaatattcatttcctcttctcaaatcttcagtcagagaagtcactgttcctcatggggtgtacctatatgtgctatatggaaagcactacagaaaagctagaagtgctcctttcatattcttccctcctgggaagcagaatgaaaattccctgctactctggaaacttgagaagtaaggaataagtgttccaccctaacaaacaataatgaaagtttaaatttattggaagtttccatgtgctaggctctaagtcttttatacttattagctcttctgattctcagaataatcttaagaaatatctccccacattttgcacatgagaaaactgaggctcagagaggtgaagttacctggcccagatcacccagctagaaagtagtaaggcatagatttgaagtcacttctgcttgacgtcaatgtacacgctcttggacagttgaatgtactgttttcctccctaacggtcttctcctctggctccctgtggtgggctctgagttttctttctcctttgcttcgcaggttgcactggtttccgcctccgcccagtggctggcctactttcttctcgggatttcttgggtggcctggctttccgagtcttccactgcactcagtacatcagacatgggtctaagcccatgtatacaccagaaccgtgagtactgtccttttgctatcagtttctagccacaatgagttctgtctcacccggctctaagaacagggctggtccacaggactcattgcctgcattgtttgatatagtgcagccagggaatttcatctcttctggggatttcccccatctaaatagactgtcatgactggagtttaggcatcttttgaatcaaaggttaagatgagagaatgagagttcacattcaaattccaaagagattgtagaaaactcagagctatgaaatgccaaatgggaataggaacaagtgacagccaggctgtctcaacacttcctgattcccggatcacctctagatgattctcatctctctttgcctaggttgggtctcagctgaagatacagaatgtctggccactatgcttcttatttttgcatgtagccatctccttagacagctagaactgaagtagtttatgtgaacagtcagcaggataccccaaatgatctttcccagcctgcaaaattcattactagaaatcagaaaaggcctattcctagtaaatctggcacctagagtgttaaataaatgtaagctttcttctgtaaccagtgtcagccccctccaggataaaacaggagtgtcactaatattattattgttgctgttattattacttctactattattattatttagttctcatggagaataactgagcatattgtatctgcccagggatgtcaataccaaggagaaaacttgggatgggaagtgtttgtgatccactgttcattcgggtgtatggctgcccataggaatactggctcttttgttctacatcccacggggcatacactcaaaatcccctggccactgtgttctgtcctgtcccttacatttcttttcccttcttcttttcctcttgtatcttgtttcaactgataccaagccttacataccccttattcttaggaatgaggttataagactgaatgagttccttgttgctttctgcccattcctcgtgtagaaagactgagtcctgcatagcttataaccctcctcccctccaagctctgtgctttttgtttttcagggacatatgccatgagctcttgggacatgtacctttgttttcggatcgcagctttgcccagttttcccaggtgagcaattcatttctctagccttctagttacagggtgagacctggattgctcagataaattgaaccaatggaggggccctcatgtcctctgcgagggtggaatccaggtatagttctgtgaccccatcacaggtgggattgtggtcccatggggctggctaattaccaattccaggaaccacagcctggagctggtgatttggtcatcctaggaatcgtgtgttattgacttagctaatttcacctgttctactggatgtcgtttaagaaccttttcatctgtgaaaacctcccagatccccatgcagaagtaaccttgctttcttccaagttcttgtggcatctttcccctcatattttgggtctttgccactttctaccttatcaggcaatcatttttgtatatgctttaagtaagtaagatggcatttgccaagagtctagtgccaatagcctgactcatggcaaaaaataaagagccagttgccttctcaccatcatcaaggcagcaggctaaactttgattcatctattatagtggtgagcaggctcaaaaatgctttttggatgactgaaagaatttcacaaattctcttctggcactgagaggcagccccaaaccatggtgggcaactggaatggtgggagagtggaatggtagtgctgtgtagcccggagcaagtcgccacaccaccctgcatctcagcatagaggtggatccgtaaagagcccttcctgatagtctccttcctcacaaggaggaatagtgatcaaatagaatgacctatgagcaaatgctgggccaaggatgaatttcacagtaatgggattgtatgtgaatcacttaagcatcttcctttagccagaaagaaagaactatttctactcttgaatgaggaggctgctacatgatagctgaaacaaacagagagcaaaattaactgcttactaaacaaggaaaaatggtacttgttagacacagcctctctaaacaaagaaaacggctgctttaatgtatgttagatgctcagtcgtgtctgactctttgcgaccccatggactgtagcccaccaggctcctctgtccatgggattctccaggcaggaataccagagtgggttgccacttcctcctccagggggtctaacaaaccgagggactgaacccctgtctcctctgcctcctgcattggcaggcagattctttaccactgagccaccttatgtgggcttgggggaacggcgaagttcagaaattgttggacttttagaagtgggagtgtttagaaattaggtgaacctttgctgtggaagtgtcaccacaggagtagctgactttcagaagtgtggttcctgctgccaagatgtcatagattgctttcaaactaggattggaagtttttattctcattactaaaagttttgcttcccagtcagaggctaaatggccatcctccgtaagccattttcaatttgggcatccccacagaggggttggaagttacctgaatcagcagacaggagcttctggctcatccgtgttcctggttccaattttgacctggacagttccaaagcagggagttattttgagttccctgagcatattcttttttgatctaaaagcaggactagtttcccactggagtgcaggatggagtggggatgaagcactttgggttccttgttttaggcaagatctgggctcacaaagaatagtggctatgagaacagggagccctttccaccttgcatttattgatgatgacttctgttagacaggcttcccaggtggtgctagtggtaaagaacccgcctgccagttcaagagacataagagacgtgggttcagcctctaagttgggaagatcccctggaggaggacattgcctctccttaaagagatttttcacaggctgtgcatttgacctgtacaatgctctttcttcagctatcagcagagccaataacagcctcacttccatcaagtctttgctcaaatatcacctttccaatgatgcttttaaattgtggtgctggagaagactcttgagagtcccttagactatagggagattaaaccagccgatcctaaaagaaatcaaccctgaatgttcattggaaggactgatgctaaagctgaagctccagtactttggctacctgatgtgatgagctgactcattagaagagaccctgatgctgggaatgatcgaggacaggaagaaaaggaggtgacagagaatgagatggttggatggcatcactgattcaatggacatgagtttgagcaaattgagtgaagcacaaggaagcctggaatgcctcagtccatgggttgcaaagagtcagacatgacttcgagattgaacaacagcaacagagtgatttttaaaaatcattctggggccttatttaaaatcacagcctctggacttctctgatggtccagaggttaagaatctgccttccaatgcaggcatttgaaggttcaattctatccctggttggggaactaaggtgccatatgctgccgagcaactaatcccgcatgcctgaactagagagcctgtatgctgcacctactgagcctgcaagcggcaacgaagacccaatacagcaacaacaacaaaaaaaaagatgaaggatagggcaatcaaagccccggaccccacccctgcttctctggcactctggatcccccttgtccctttctcctttcatttcttctttccaaagaacttatcacctttaacatgcttattatttactgtctatccacttaaatgtaaaggtcagggatctttatcaatttcgtacattacctgtcacatagaaggcattcaataaatatttttggaataaatgaatgcatattagtaggaaataaatataatatataagcacacacacatattatatttgtatacatatatgtgctctgtctgctgcaaatcagtctggagcaaatgctgtaaaaagagacagagaccacgaggggtttctgacttgggagctgtgataagaagtggccagtgacatctcagactctccagctatgcatatacctggatagatgtcaagcacttcacagcaggtctcctatggtatcttcaggggacttgatgaagtcccatctggtgcaccaggaatattccacttgaactgtggaaggataatcaggacttgaaacattagacacaaccaactgtgtgaccttgagcaggtcatctcttttctctgtgcctcagttttctcttttgtaaagtgaatagaggaccaagtgatggagaaaggcttcctccatcctcgagatctgtgattctatgaagtgtggtcagggaagccttgacagaacagttaagagtctacctgggcccttctgaaggtatctagctgctcttcctgtggtcaaatacgaggttggatctgagggtcaaggttgaaggtcagcagaccccagccatgtcagtgccggtttctctgccgttacaggagatcggccttgcctccctgggtgcacctgatgagtacgttgagaaacttgcaacagtaagtaccctctctccctggtggatggtgggaatgtctcgggtctttgaaactttgctgttttcctgaaagccagatcatttgaaaaaagaaaaatctgaatgccttgcttacatttgcacaagtgacatttcacattttgatttcttagtggtttgattttgaaatcaactacatgtatatgtttacatgtaactaaacagtatgtcttgaaagcaccaacaggctgtaatgatagtcgttgaaaatcgccttgagtgggtgggaagtagtctagattcgcatctttgaaaaggaagatatttactttctacctgacactgcagccagcattgcatctttcctttcttagatccaaggtgggagtgggaactgacttttcccttctaaccaaacactctcttccccaggggtgtgatgactgtcatccatagataccatggatgagcaactctgcacagaagctttccttcctgtagactcctttccaacttgagtgattccctccctaacctctaagccacattttttaataatgtgctcagcttggaagataagaaatgaaactttataatggaactagggacttcagattaatgcacacatatcattcagctcagttcagttcagtttagttgctcagttgtatctgactctttgcgactccatggactgcagcactccaggcttccctgtcatcatgatatatcagtttagaagtttgtgaatttaatttaagagaaggttgaaacctcccagatcctttctcactgcccagctgctcagagaccctgggcaagtagcttttgcaccctcacctctaaaaatggatacaattgtttatatcatttccatctcaacagtacaccatgaggatcttgaggatcaaaagggttaaatttatgtggatgtaagtttttaaatgccagatgctatggtgatacaaaaagcaactttcaaggaaactgcagaacttgatagaatctctcatttgtaagaaaaaaataataatcacagagcattaagttacctgctgtaattgtgatacaagtattcattaccaacctagcttctcaaaaataatcttattattgatatactgatctgagaatagtcttgggccccttgctctgcccttgagatgctgtgtcactgtatgtgtgtaacttgacctctctgggctaaagatgtctcatctgtatgtgaggagctcagacttactcagttctgacagccttcccaggtttcacattctctagtgcaataaacagacttacctagaaaccctgggctggaagaagcacaagctggaatcaagattgctgggagaaatatcaataacttcagatatggagatgacaccacccttatggcagaaagtgaagaggaactaaaaagcctcttgatgaaagtgaaggaggagagtgaaaaagttggcttaaagttcaacattcagaaaactaagatcatggcatctggccccatcacttcataggaaatagatggggaaacagtggaaacagtgtcagattttattttggggggctccaaaatcactgcagatggtgactgcagccatgaaattaaaagacgctttgagactccttggaaggaaagttatgaccaacctagacagcatattcaaaagcgagacattacttttccaacaatggtctgtctagtcaaggctatggtttttccagtggtcatgtatggatgtgagagttggtctgtgaagaaagctgagcaccaaagaattgatgcttttgaactgtggtgttggagaaaactcttgagagtcccttggactgcaaggagatccaaccagtccatcctaaaggagaccagtcctgggtgttcattggaaggactgatgctgaggctgaaactccaatacattggccacctcatgcaaagagttgactcattggaaaagaccctgatgctgggagggattgggggcaggacaagaaggggatgacaggatgagatggctggatggcatcaccgactctatggacatgagtttgggtgaactctgggatttggtgatggacaggaaggcctggcgtgatgcggttcatggggttgcaaagagtcagacacaactgagtgatactgaactgaactgaactgagaaaccctgggtcttggctttctcttggccctatgcagtacgaaagaaagtgaaagtcactcagtcgtgtctgactctttgcgatcccatggactatacagtccatggacttctccaggccagaatacaggagtgggtagcctttctcttctccagggaatcttcccaacagggatcaaacctaggtctcccacattgcaggtggatttttaccagctgagccacaagggaagcctgagaatcctggagtgggtagcctatcccttctccagcagatgttcctgacccaggaatcaattctaggacgttatttcccaagccatctatctgggacatgttgcactgggagctactgaaagaaaaaaacttggttatttggaggctgagtgcagtgaccgacagggttttagcacagattgttggatggtggggatattgaataataaccttagaactttgaggccaaataaggaagcagataactcaataaaatgcagtgatgaagtttattgtaggtaacttatacacaggaaagggcaggtagatagcagccagaggctttagcaaccacactctatgccatgaaaaggatatgggaggttaaaggggccaacactactaagatccagtgcatccaaattaaaatttattagttaattaattaaaggggccaaagctaagaatagaatctgattactaagggagaagcaggttcacactgtcaggagttaggggttttttcctccccctggaaggtctcatgaccattatttcttgtgaggcattacccatctgcctcagcaaaagtttttatatgtcagacaaagtttttatatcagataagaagggtaaaagttgatgaggaacttatctggttcattccttgtgagtagactaaagttcaaccatgcagaaaaggatggggttaagactttaggcttagatggagctgacaaaatggagctggtgtggttcagccacacagatgacaagatactccctcactgattctatcatgacccaattccctacctcccactgagcctgatgggattgtctggtaactccagccaacatgaaggagcaactccctctagctgatgccatagagaagaaagtgggaggggtggaggagttcctgtcatagagagtggcttgttggggtatcctttgggggcttccttaatactctcccacaacttcccatcattatcttgcattcagttcagttcagttcaatcactcagttgtgtctgactctttgcaaccccatggactgcagcacaccagcttccctgtcatcaccaactcctggaggctgctcaaactcatgtccatcgagtcagtggtgccatccagccatctcaccctctgtcctccccttctcctcctgccttcaatctttcccagcatcagggtcttttccaaggagtcagttcttcatatcaggtggccaaagtattggagtttcagcttcagcgtcttgcattcagccatcttaattcaacaggtaactggataggataagacagaatacaaaaccatgaccccagatcaggctgattcagagaacagacctgcacaaactcccacctgggcaccttgtctctggccctgggtcacctgctgcttccttgtgtagactttgaacttgactttccatttcagatttactggtttactgtggagtttgggctctgcaagcaaggagactccataaaggcatatggtgctgggctcctgtcatcctttggtgaattacaggtatgaaccaaagagaaaccaaggatggatttgtgagtgctaggtacagcagaccattcattttccctttgtgctcttgaaaccctcttatatccactttgaaactgaacctcagagtttctccttaagtgattgattgacctcttagcagctatgatttggtcatgactgtgggttttagagattgaaattgaactgcagatacacaggtctccagaccagaggggcctcctgaatctagggatgaactgtgcattgggacataggcaaacacatgccagaaaatgtggctgctcccacaccgtctgttgatcacgttacctgaaaatggttggggtaaaatattccttttgatcctgattgctgtctagtatgtgcaaaataatttagttcacctgcattgggactaggctatggaagaaatcaggataaggtgggaggggatacacaaatagcctaggggttgtggcagggaccagcagccctgacttaaccatgacgactttccatttgggacccgcagtattgcctatcaggcaagccgaagctccttcctctggaactggagaagaccgctgtccaggagtatacgatcacagagttccagcctctgtattatgtggctgagagttttaatgatgccaaggagaaagtgaggtgagatggtaaccacgctgggccagcagcccttgggacctcctgacttgacctggtgctgccggtgtatgggaggttgggcaggagaatggactccagggcctacagcagcagcgtgcatcagacagtattctctccccaccctatctctttctgctggggtccagccccaatggatccagggtaatttgaaggggagatggagtaggcgtcctaggaaaaagctatttaattagaaatataaagagagattagaaaaggatagtgtagtaggaaatattagtggagaaaaggagctgaataacttggtttacatggaaaaccaataaaaccttgagacaagaggtttgcaccatctacataggccaccggtgcccacttgaatagcagaagggccccaccttgggctccctctcgtgtgggtcttagaagcgagggcaagtaagtagacatggcaagcctccacctccagatgggaattcagccagaaggggagagaaagaacgacacgggggaatcagtctttccagaaactgatctgttttctttattttcaggtttgcttatatactttttgttacacatagagatagaatacagagtcacgtggggtcagcaatcctgacccttgtcaaaatcaggtgcttcatataaatgtatacaaaggtcttaggggttttacatcatcttctggccatgaggcctgctgacattttatggccctttctgataacggcagtcaaccagaaaacttattttttccaggggtgattttttcttaaaccaggcgccaccctccaaaggtaccagatagagttgcattcctgtagggtgagggtgtagtgggttacaattaagaagagaatttatttagcctaaggtttaacatgattaatcttaaaggttaatacttatttctcctatatgctagttatattcattaatgtgtataagggcaaggaatatggagacttaacagcaaatattggcccaacaaatgaaaacccttcaccagtataatttctaatcaacccactatactaataatttctaacttctcaaaagaatctgtatttagaaagtttaaagcatctcatgcctctcactgttgggaggctgtaaacaatcacatgtggccagacaaacctgttcaggcaggctagagaaccttcagtgcattggagaaggaaatggcaacccactccagtgttcttgcctggagaatcccaggggtggcggagcccagtgggctgccatctgtggggtcgcacagagtcggatacgactgaagcaacttagcagcagcagcagcagcatagaaccttcagaggagtttgtaagttgaaacattcttgtcacgcccaggaatttttattgactggagctgcaagttaactccttctccgatagaagtggtgggggacagcgccccgtaaagtcagaggtataggtgaaagcataaagcagtaaagtaggcagacgctggttttgggggtagacgctcgggaacagggggtctcctgaggctcgatgccgcctttgcgtatgctgtgcctccttcctcatgacccttgccacgggcggagttcctcacgctggctcccggcatctttccactccctgttgagagaagtgccttcctttgcaggaccccatttcagagcttgctagccgaatgtgatgacccctgtagaaaggcctaccaccctatccttgctcagtgtggccatcaggttcacccctgaactctcctatgttcagagcggccacagaggtacccccatcaaagagccctagatgtcttctcacccaaggaagtcccttgtcacttaaatctcccatatagttgcataactcacccctcccctctcttcagcctttacccacatttaaccttttttgtgtgtctttctctaaccaacttacttaaaatcaccacccagccctgtccccccagtactctgtacctgctctgtgatttacttttctccttagaacttattaatgtctaaaatcttgtatgatttaaggtccatgaggataggggggtttgtcctttctgctctttccctccacttcaagaacagtgccagacacatagcaagcactcagtattgctgttgttcagttgctaagtcatgtcaggctctttgcgaccccacagactgcagcacaccagacttacttgtccttcactgtctcctggagtttgctcaaactcatgtctattgggtcgtgatgccatccaaccatctcatcctctgaatcagtgagtaattggcaaatgtgccaatctcagaggcaattcagcaccaggctggtggagtggtaccaggactctgagactctcagccctccaagattgccctgccatcagcctgctagagccacactgctcccagcgggagatatgctgggcagagggtctgcttagacagggcaaccacgataccatttttaccacttcttttgttatatcttagcagtgatgcataataaatgtaagtcttacaggcttctgggatcccatgaagctgggcatgtcagcttcgaatgtatcaggcttaggtaaccaacagtaaaatggtagcccacaaatgtactttctttgatccccaatgattccctttactcttttctccagggcccttaggtccttcctgccattctttcccatttttctcctaaattttcacccttactgggaacctagtcttcctgtagccctgaaggttccactctgccattcctgggactcctttagggttatggattttcatgagttcatgcattatgccaccaaggtaattataggtacaggtaaggtgactcagacagtaaagaatccacctgcaatgaacgagacatgggtttgacccctggggtcgggaagatcccctggagaagggaatggctacccactccagtattcttgccaggagagtcccatggaccaaggagcctggtgggctatgtgccatggtgccacaaagagttggacacatgtgagcgactaacactttcacttttcgagatgcctggtagctattttgtaccaaacactgttctcagtgcttttcagatattaatccatttagtcattaaataagaccacaaattgaaaataggagtacagaaacattgacggggtaagtaactcactcagagtcatacagctagtaagtggctggcctagggtttggactcaggcagtgggactcagagccagtactattaactgctgagtcgcactgagattcccatatggacaggcccttcaggaagtgatcagccccaggccaacagggaagaccttgccaggacatgggcctctctttgaaatcccaccagctctgctagtgtccacttcccctggtgactcggtggtaaagaacctgcatgcaatgcaggagacacgggtccattccctgggtcaggaagatcccctggaggaggaaatggcaacccactccagtattcttttctggaaaatcccatggacagaggagcctggtgggctatatagcccatggggtggcagagagtcagacatgacggagcatgcactcactcattgttagtgtctagagcccagagaagatacaaaagctctcatctgctgagagctggctcacagaatgaaacagaattctaaagaacacagttcaaaaaaagaagggatctgagcatctctgggataccctcagagcatcccgactaaaagaaaccgttgccaaccattttcaatttcggtattcaagttctagcagagacggggctgagtttgttcacacacctgctgcctgacctgaggagggcagagtgggcctcagactgacggcccaactcttatacctccagtgggggaggtcgattccccaaagaaaaaacaaggtgcgcccaggaataagagggaagaggggaagagtaggcagagccacaggcatctactacttggttcatgtcaccagctggactgagaaagctttttccaaagaacagatggggaaagatacttaaccacttactcttcatgcatctgcagtcactaataaaagattcctcctaggcccaggagtggtgccccagggaggcagggaagtgaggggtccaggccagattcacactacctgtgtcctttcctttctttataatgtattgccagcatggccttagtagttatttagcttcctccagcctcagtttcctcatcataaaatgggaatagtaaaatggtaccttcctcttaaggtttttatgaagactaatttagtgataatagttgttaagagtataaaacagttgaaacttgttatggttctcaaacataggaggctctcaatccatgctgagtttcattcatagtgttgtcttcaactttggaaaccatttttctttctttgcattgatggtcaagcatctcagagctttttttttcttctataacattctttggctatattttactttctccttttattttatttaatgataagaacttggccttatgtgcttttattgtaaggtacttctgacattttggaggcatgtgcataagtgtgtttgtatatacacagacacacctaccacatacagaggcttcctaaagaggacctaaaactccatttcacttctcagcccagtactaaagcccctggtgatgtttcagtgctactaataaccaagtgaatgccactgaaaaatcttttaaaattatttttccccaaatggtagccttcactcagacctatgattttggtttcaggaactttgctgccacaatcccacggcccttctcagttcattatgacccatacactcaacggattgaggtcttggacaacacccagcaacttaagattttggctgactccatcagtagtaagtaacatatacccttttaggccattctctcataggggattgtgttttcctaccttcatcagagtaacagtaagaaatgtattaaatatttaagaaaagcatttccagggaagccactgacttattgagagagaaacacttagtaataaaaagccagaattgccttgagtgtcctttctgctttgaccttcctggaccccacgccacctcctatgacccaccacctttccacactggcttgttgctgccacattcctctttctcctttgcattttcacccctttccctctaagtgtccactggaccttactctgcctggaataccagctcctaaggatagattttatctactttatcaaccacagagtagttcatccattggccttttattttttctggacaacaagaatattataatagttgttcttaaaaagtcattgtgctattgtgttcatctcccaattctttctaaccttcaaattcccttcgagcaacattgaccagcccttagttcccatgccttcccctggcctttgcccatacagtttttgtttaaaatactctctttaccactcccatttagggaccccatcccagtttatcttttaatcgttcatacatgtctcttcttagggtaagcctggtttgggtgtccctcctaggttttggccttcccacagatccttctctcagagcacttatcataggttttttattttgtttttattttataattgtttgcttgtctgtctccccaactagacttgagcagagggccatgtcaggtttgctgtcaaatccccagcagttttccatattcctaaaaatcatattaggtactcaagagctattgaatgaatgaacaaaaccaccaaaggatcaagcttaaagggagaagttctagtccaaggggtggggagtttctctctgtaaaaatgtgctaacaaaggccggaagggctggtggacttggcgtatccctctctacccctgtgatgttgcctgagaccactgctaatgtgtagaactagctcattatactcattcctatcaggtatgacctccctcccataatgagccattttgataaagtccaaagctgattccctcccatagatgccaccttgaacactcagctggaataatttgttcactgaagaggccagccaagggctctggaggctggggtgtgagagagaagggttaggccatagctgttttctctctctttttcatttcccctgagaaagtgacaataatttcaaagactattatttataagaggatggggggctatgtgaaccctacttttaggttctgtggcttagccccttgcaagcatctgtggatggtcatgtgaaaaggaaacagaaaagctagtgatttccctggggagaaaaccattaactccttccctgagaaatggactatggaaagaggaagcttaattacattaattgctctttagcacttcctacaacttggaatcatctgtaatggctcagattttatcaccctaactaagctgtcagctccttgaaggttggggtagtacctagtgcatccacacaccccactgattccctagccttttacacactgcagacacttgaagggtgtttgtttgcagtatgagtggctcctttgtttttctttgtaggtgaagttgaaatcctttgcagtgccctccagaaactaaagtgaagtcatggacagaaactaaactgagaatctctcaatggaaaccgacctacttcttttatttcatcttaaaaagtgtaaaaaacaagccttaattcaaaatgacagccttaaatcctttcgagagcaagatggcgggtcaacagataaaatcatatgaaatgatagcatgttaataataccccaaagcataatggtagatcttttggggtcatctacgatttagagatgataatctcatactctggattgaattaaaaatcaataacctgtcacatttcatcaaagttaatgaaaatttgggacctgttttattcaaacttcctaaataatttcattatttgctgtagaggattcctaaagggatatatatccctcactgtgaaacacaagcctatcagaattgaatttctggatttaatataaattttaacctacaaaagtaattttctgtttcagggaactatgattttacttactgctttgttattttgcctatgtag

SEQ ID NO: 188 - DNA, 76661 bp, Hippotragus leucophaeus
  source 1..76661: mol_type = genomic DNA
ttaaagtttcagaaattctgataacaggcaaacattaaattgttacataagaaacacaagaaaaattcaccagctctaccaatcctttccagataaagaatgtatccaatgtgaggccaggagaatcacaatctatgagacactgtttgcttaagggcattgtcagcaaacatgacaacccattgttcaaccaatctcatctccaaccatacatttgttctcagacctttgaaatgaaatctagatttcagcttatgtgaacaaaatacttgcgcaatttcccagcccacggttagctaacttgtaggcatcaagagccaaagtgcaaatccatggagtttcaacccttcagctacagatggcctacccaacctcagaactgaaaggcctttgcacactgtggcgaatgtgacaaagaaacagaacatgtagctgacttgtggtcctttggttccaagcccccttttcctcctggtccatttcagagtatgtgcttcatttcagcagttcagacccaagcctgtccagtggtctggcaccatcaggaaatatttgtccatggcttcacagaatctagtcctgtacaactctggagagaccacagttggcattttacctaggattacaaaagggtaaagagaaaaaaaggaagctgttacataactgaccagaccactgacttcgacagctatgttctttcatgtaaacgaacaaaaaatgccatgtcctgtaaacacacacactatgatgggctcagaaaaaagggagggtgctcactgtgcaacatgacaagggacaggtccttcttggtaggacttttttcttttaaaagatgctcttgcctagtaatgagaaatgtctgaaagcaacctgttgctctcagtggtcagagaacttgaagtacttcaagcgttaaatcaggacaacctcctgttcaggaactctggcctttctttcctttaacttttcattttgagaacctctggtttcttaacagagtttcccagatgatgcagtggtagagtccacctgccaaagcaggaggcacaagaggtggattcgatccctgggtcggaaagatcccctgaggtaggaaatgataactccagtattcttgcctggagaattccatggacagaggagcctggcaggctacagtccaaggggtcacaaagagtcggacataactcagcatgcagcaggtaccgcatcttaacacatatttaagatcccatatttccccatttaaacaattccttttattatctgatcattttggaaatgatgataaggtcaaagataaccagttatgttttataattttttctgaagtatccatttgttatatgttaactgatgaggaagataatgagaacagtttaaagagttaaacagaacaaaaattctgctcaccttgtcctcctaaaattcctgttgattttacaaccatctcaagctttttgtcccaggtaaatgttcggatataatctgttgcagggggtgagattagcagtaaaagctctcttaataaatataagcagataacaatcacaattaccactgctattacttctacattagttaacactgagtgctggcaatattgcaggtgcagacaatatgccaagggctgtcctaagggttttttaccatattaattcttccaaacctcataacaacctcacaggccttcatcttaagtaaattcctgaatacacatattttttggtaatgaaaatggaaatgagaaatatgaataaaagtactagaacagaaaaactattatttttaaaatttcaaatgagtttgtgaaaacattcaataagctattactacaccaggttctgtatagtcttcaaagattactctggcttcaatcatgaactgcacataagacatgctcattgacctacctataattccaactactagctcattgctggtatcgtctcgcccaactagcaaagaatagtctataatgaggtggctagaaaggaagtgggagtcgctccggatcgaggctctcagcacagctttggaatgagaacggatatacagagggttgtctcgaaccatctttaagagattttcatccagaagaacgacatcacagctctctttcccggtatcggtttttacatttcgattcctaagtgaacccttcaagtcaaaaacctagcagaaagaaaattctctgtcatttatgtgagttgctacaaatggttaattaatataattaaatttaaaaggcagacagcttccttgtagccactatccttaaacaatttaatatttaactttaaaatttataacttatgtaagtcactgaatgcatacactgtaattgtataatacaaaaagcacatggcgatataactgtatcatatgaaactaataacgaggttcccaaatattcaaatatgtcagaaatatactgacccatttaatcaactataagaaacattaacaagtaactccaaaaatatattgctgaatcataaagcagtttgaaaaacagacgtaaacaaagtcttaggaaatttcaagttttgatatcaaaactgtgcaattataaaggacaatacagaagcaacagtatttctaggaatttctagacagtaggaaaagcaatgctagtcaggggacttgggaactagacaggtggaacctgaggcgtattctacagaccactgctagtcagttgctcctgactcaagatgaaagagaagctgatgccagaatgtaaactgattatatcattaaacctacagtttagttcagcagctgcttttgctacacaagactttctcaatgaagaaagcagtacattaaattacattctaaaaaaaaaattacattctcgtacaagctcctagctccacagactggaaacagttcaaagacctgcacattgaagagcactgttctagaatctagaccaacttgaattctaggaagagctgtgagaccttgataaagtcctcaattcctctgagcctcagtttcttcatctttaaaatggccagacccattggatctgccttcttactctgtaattctgtgtttctaggatattggttatgttaaattttaggaccagaccaccatattcctctttattctttcagtaactcaaaagttaaagctgacccagtaaccaaagtttaatatttactatcaaataccatgtcattctctaatcatcatgttcaggaaccagaagaatgaagggatccagcagctaaatagtttgtgtggttcattatccttacctgtgccatctttctcccatagaaaagattttccatgacaaggagatctagcttcttctcagtgttgttctgagaattcttataaccaattctgtaaactccaagaatcttggccaatgcagtaggtctctaattcagcaagagtaaatagatacaaatgaatgtacatgcaaaacagaaatagacttaagaaatataaaacaagcctgtggctgccaacgcagagaaggaatggtggagggacaaattttttctatgagaataacaaactactctgtaacaaacagaaaagcagtaaggatatgtcatatattaacacatagggaattacagccattatcatataataaatcataatgaagaataatctgcaaatactaaatcattattttgtatacctgaaactaatacaatagtgtaagtcaactatatttttaaaaaggattatttataatttaatatcaatatctggattattcatgtattatccagacatgattttctattaatatgggtcaggagaccttaaaagatattctgaatctatgaagcaagtaaagcagcaatgccaataaactttaatattctcccaagggataatccttcacaatttctaaaattcacaaattttattatgacttaatttttccaataaaaggcaacaaaccaataaatggaaaaaaaatctacatgactccttcatattctcactggaagggtctctgtttaatgacaagtgggcaaactacacacacacacacacacacacacactgctttccgccacacacacacacacacacacacacacacacacagctttccgccacacacacagacacacagacactgacacacagacacagacaaacacagacacagacacgcacacagacacgcacacacagacacacacacagacacacgcacatgcacacagacacacacacagacacacacacacacacacagctttccgccacacctcaaaagcacaattctgttcacttactaccatagagaaaactgcccttaggactttcagaaggtgaaatggaccagtaaactctagttacagatcagggtttaggtttctaccttttgctgaacggcatttgtaatgtaattgaagtagtgtggtgcgaagtcaaggaaagactggacttccagacgaggcatttgcttcaaaatgaatctgtcatctaagaggcaaaaatttcacgtttattcggttgcaatatttactgaggtaatctaaaataaatcattctaagactcctaaatgacttgctctcttcatattttgaagggatatttttaatatgataacaccgagaagattttgatcagaatatagttctcaagttgaaggtttggaagggcttttgagaatgtatatagtcaagaaaactctacatttgacagttgcacacttgaagtcatagctagatgatgtactttttaaaactaccacgtaaaatgttacaaactcctttgttagcaatccaggaactaacagttatgaaagtgcttatcaagcacatctttcctgatgcattttctcaattaacttcattttcagtgagtacggagaactcaaacatgtagtacaaatggtcaaaatctgctgtaaacttctgcaggttaagaacttggccttccagttttcaagtcaaatgtttcaatttttgtctttctcccatcagctctgaggtaccttgtgagttttctagaagttctgttactatttacatgtggaaaacttgggactagaaagaatttagtagggatttgatcaatacttgtctttcattatacactgtacaccatgtattttttcaatgttcttctttcatcctctcaagcataaaaagaaaaacatgtttgctaaatgacacatcacattacctcagttcaagggattcataaattatccaagggaaaaaagatggatgctgcttaattatcaaatgatcaaaaaggccttggaaaaggaaatggcaactcactccagtattcttgcctggagaaattcttgcctccagtattcttgcatggagagaggagcctggcaggctaagtccatggggtcgcaaacagtcagacacaactgagcaactaaacaacaacagcaaaaaggcctaccttcagtagcgtaaaaggcagctcctgatttgcctcctcgggcctgccacggagaagagtgagaaagggaacgaatgaaatcttcttcgctgctgcccagaatcacttctcgcatcttatgaaactctcccgcatagtagagccgacaataaaacttggcgttggcatccgaaaattctataaacagaaatgtttttagaaaaaagctcttctgaatcagaaatatcttttccttcttgcccactctccacccccacaccaaatgcaagcatttaattttctccatgatagtatttttcatgttaagtctactacattcctgtttatcactattgtgttatcttaaggaaggattaagagagtaccttaggaccacccttacatatttatagaaaaaaaaacaaacaaaacaagactcggttctaattttatgctggtgactgcattttcatcattgtatggttatatcttaaatttcactgtgttactatcctgggtaacaaaacaggcacacacaattctagatgccttggtaaggtactgtggctctaaattatacaggaacaaactatttaaaccttacacatctaattaaaatttataaattaaattatatttaaattacatttacaaatagatttcctttaaaattaaataatgtatactttataaactaaatctagatgaaacaaatgctcatcagcacaaagacttagtattcatttcaagagataggatatttgtctagtgtgaagctacgagtttcaaataatgaagttgttcaattatagtcctgggtccccaaaccagagatttatctcatacgtacgaagctccacatgaggatttgtaagttgtttcttctgtgtatctcctccatccacttcatctaaaaaatttaacatcattagtaaagccaaagttttaggcagttactcagtttattttgtgtgttctttttccctgatataaactaaaaactaagtcaattagtattatcctagtcaagccatgctcaagcaagcatcatgtatacaattaactataaattattacaataaaaatgtatgtaccttctgaaagatcaatttttagattaaaaagcagagaattcagattgaagaataatttttcttatagttaaataatccctatgatagcaataaacttactcaattctaacatcaagactttctgtggctattttaccagagtttatgaccagttttccctgtgtataaagtaatgctttcccaatattctgagatgctttctttatcatacactaagatatatgttcactatagaaaatatactaatatctacatcagagctgttttttttttttaatttgactaatgtgtctggcaaacttattgccagacaattattgtggagttgtaatatattttaactctaattacagtaaagttgtaatatattttaacatctagaagaacaagtcatcctctaaggttcccatttcaaaattatttttttcaaagcaccaatgccttctaaggatcacagcctatagaatactaaacacagatcttaattattaataaaaacgtgtcatgcaatttctatttcttaaactactaattcatgctgtaatccaggggttgccaaactactcctctaaagggccagatggtaagtattttactcagttgccactactcaacttgccaatataatgggaaagcagccagacagtaagtaaacgaaaggatgtgtctgtgttccaccacaactttatttacaaagacaggtcagcttagttatctgactcctggtctaaccctgtattcaaacaccatcaggtaggtgtatttttttaaatacctaaatgaagctgagtatcagtagctcccaccttacagagactggaaaagaaaggggatgtctgggagggcaatgtggtgacctcatttgaacatatactgtgagctacacagtgagacagatgtgtaatgtcacttagtcctcagtgaaccttggaagacactgcttttccactttatcggtacagcaagtaaggatttctgattcctccactcggtaagtgagaacagtgatacgtgaaactagctggattctcccagcaccaggcttttcccagtctacccgaccacggtgtgagaggagcgggaaggccctgatttctgcagtagaagcatctacttaaagctgtaagaaacataaccaactgaagtaagtaaactgaagcctaaaacaagcacattggtctccttcaacacaccttgaggctcaatgccttgattctccgtcccctccttgcccgtctgccccacttggtagtaagcactatctgctccacgtaaggtctctctcttctgggaagagaggtcagggcttttccctgctgtccctcggaagaaggacaacattccagaagcctttttggctaaaaataagaggtaacatattaagtacaggtcactgcacgtagaaaaataaaaattttcaattcattcctgtgtaagcagtaaccattatatgaaagtaataaataagagtaacactgatagatttatttgcacagattattatttgatatggtttatgggggctttaggggggcaatcaagcactcttattatcaaaaacagaagaaaagcaatgttcagatagctacatatcaaaatgtgagaaattattaaatatagagaaagactttaaaaaatttctttccaaggctgtcatagtatcttaagcaacaagtttaagatagggctaggttcttatagtatcacagtacagctcattaaactaatacagaacagtattccaagctacgaggattcaaagttaaaagtaacatatttatatcgtctgtgttccatattttaacacagcaaaatatataatttgagttttagcatttttcaaaaattagtacaggatgaccaaagatatcactaaagcttgctctatacatttattcttccttttgagcttcatcatatcattaatgatcctaatttgggggtagcctttcactcctccaagggatcttcccaagccagggatctaaccgaggtctcccacattgcaggcggattctttaccagctaagccacaagggaagcccaagaataccggagtgggtagcctatcctttctccagcggatcttcctgacccaggaattgaacctgggtctcctgcattgcaggcagattctttaccaactgagctttcagggaagccctttgtacatttaccattaacaaaatccacaccaaatctcaatcattaagtgcttagggtggcagacactatcacagcctcctcaatatccaatcccaccttgctcttgctaacagagttgcaattttctttagggcagcagcatgcagagtcccaggaaaataatcatgatttgtataaactggccaggacaatgatgctcaccactttctcagtctcctttgcaggaaagggtggccatgaggctcagttctaaccaatgagactgaaaaggaaagggaatttcctaatgaaagggaagagcagaagcttgtacctcccttccttctgcctcaaatgcagacattagagtgggacatctctgaccatgagtaaaatttaagagaaatcaaagagaaactaacccctatgttgtcatgacaaagccaagtagctgaaccaatgccagcaactgcccatttgcagatgttgctattttagaaaaataaactgtccttgatttaagccccagtagatttgagttttctgttcagttcagtcactcaattgtgtccaactctttgcaaccccatggactggagcatgccaggctcccctgtccatcactaactgggttttctgttacttgtagggaatattcctaactgacaaagtcaaaaaaatacaacttcaaatctctgctccccactacctgtgtaaccttgagcaaagtacttaatctaagtcttaacttactttctgaaaatggagatatgtcaaatatggggttattgtgggaattaaagaagataagacatgaaaagttcttttcacaatgtcaacaatgctgcaaaaacaaacaaacaaaaaaactgacgttgtatttcttatgttgcatgctttaaactgaaagctctaaccaagaaggccgatcctgcttctttttgcatgaaacgcttctaggcatttcaaactcaaaaacttagaaatcaaagaaaagtgaaacatacacaaaagaagagatataaaaattttacatccatattatatttcaaagatcagaaacaataaatccttgccagatggcacttcttatctaatgtgttttcttcttcaaaccacaattacaaacaaaagtacttctccagttgtaatcttacttggttgtggttctgcttctactgcacggtttgtctgtcctccactgatctcaggtaacctaattgggctgctactctttggtctgctgtctaaagtactaaaatgagaaacagaagaaaagttggttttatatgattcagacacaaactaacaagtactctaattcctatattaatctactttccacctaaccccacctacaatatcagaaatctggttcataattttatataaacacaggttcgcatggaagaaaaagtcttgaaatgtatactaggcttttaagaaaaagaaaatgttaaagctataagactatagggtcttaaaatatttttctcaggtctatcagaactatattatagcacccataagtcaatggtgacaattatgacaatttctgtctcaaatacctaaaataacaaaaatacttaaaacagctggtttggcaggggtttgctttgttttttagctgttaagatctttaatcattatggaaaattcttaaattatttaaagtacaaagctaggcagtagtttaccaattttagaagttaatatttttttaatgaaagcagcaaagagaacttaaaaacttaaaaatgtaaatatgcaatacactttgaacttccatgacaagaaaactgtaacctagtactttttaaggtcttttgctatacctgaattttgttctgtcaattactggctaaaaaatgagtcccactgcttatattctagaaacttttacatcaagaataagctgtaataaaactgaaacaggaacacctagaaaatgatatagttcaattaaaataaattttcctcaatcacatatcacctgtttgttggaagcccttcttcagcactgttccgctgagtggctttggacaattcctctaaggcattccggtattctttacaacttaagataaaatcaggttgaaatatgttaaacattaaggtcttcttttatagtaaatcatatgctttagaataagctctgcattatagaaacacaaacattataagcatccatatctaatgtactttggacaaattaagttacctaacaaaagttatcaagtagaaacttcatgaagaaagtcaatatgttcaccaaaaaataacagaatataatccaacatgccagccagacttaatatcctaaacaatgattgtgaaggccaccatactaacatttagatcaaatgccttcaggggttgaacagctcattgaaaagcatgaaacttcaccatttagtgtaatagagaggaaagggacttgagagtgcttttcaacttaaaagtactgaactttaagaaaaaaacatttttctggttgcactgtccaacaaaatccaactggcagcctgggaatcccgatttagataaatcagatgtgagcatgtattatttttccaagatattacaaaaaaggagatgtcaactagaaaacttgcttcctaatattacaaaacacatttttttcgttgactttcctgcctttcttatctattcatgtagcatgttcagttcagttcagtcactcagagtcgtgtccgactctttgtgaccccatgaactgcagcacaccaggcctccctgtccatcaccaactcccagagtccacccaaactcatgtccattgagtcggtgatgccatccaaccatctcatcctctgtcgtccccttctcctcctgcccccaatccctcctagcatcagggtcttttccaatgaatcagctcttcgtgtgaggtggccaaagtattggagttttagcttcagcatcagtccttccaatgaacacccaggactgtctcctttaggatggactggttggatctccttacagtccaagggactctcaagagtcttctccaacatcacaggtcaaaaccatgaattccttctgcgctcagctttctttacagtccaactctcacatccatacatgaccactggaaaaaccatagccttgactagacggatctttgttggcaaagtaatgtctctcctttttaatatgctgtctaggttggtcataactttctttccaaggagtaagcgtcttttaatttcatggctgcaatcaccatctgcagtgattttggagcccagataactaaagtcagccactgtttccactgattccccatctatttgccatgaagtgatggggccagatgccatgatcttcgttttctgaatgctgagctttaagccaactttttcactctcctctttcactttcatcaagaggctttttagttcttcttcactttctgccataagggtagtgccatctgcatatctcaggttattgatatttctcctggcaatcttgattccagcttgtgcttcctccagaccagtgtttctcatgatgtattctgcatataagttaaataaacagagtgacaatatacagctttgacatactcctttcccgatttagaaccagtctgttgttccatgtcaagttctaactgttgcttcctgatctgcatacagatttcttaagaggcaggtcaggtggtctgtattcccatctctttcagaattttccacagtttattgtgatccacacagttaaaggctttggcatagtttataaagcagaaacagatgtttttctggaactctcttgctttttcgatgatccagcagatgttggcaatttgatctctggttcctctgccttttttaaacatctggaagttcccggttcacatactgctgaaggctggcttggagaattttaagcatcactttactagcgtgtgagatgagtacaattgtgcagtagtttgagcattctttgggattgtctttcttagggactggaatgaaaactgaccttttccagttgactaaccaataaaaggagaagcaaaaacttcatgaacatcaaaaggcaatgataaaaaaaaatgtatcatatggaatcttctaaaggaaaaaactccttattatccaactagtaactctaaactctataaatgctgaaatctataaatctatcttgtttaccacttatacccagtacccagtataccacacattgcaacattcaaatatttgttgaataagtggacaacttgtaaccaatattaaaaataaaattttaatttcaatatctttcaatagggaaaaaaactttattagatatcctagattctacttaaactaggtactatcactgccaagacatcattaagattaaaaagctttgttattttagacacaatatataaaaatttctaaacaggggtccttctttaagacacataattgtgagcatgtaaatgagttaaggtataggaacagcattactctagggaaacttgaccttctatgtgtgggaagcaggaaggaaataaatgaagaatacaaaaaagatattcagaggattaaaggcagatatgttccaagtattatatcaataaataaaccaaaggaaaggatacaatagacacgtattataatatagagaatggacagaggatataagaattagcaagtaatttgcctagttaacttaattattaggagcttgcttaagaatcatcctgttaatacttcggcaaacagtacattaccagatacaaaaagaataaactgtggcacccaaaggatatatattctgtacttatatttactactttacatttacttatattttgctctactctatgtaacagagctcaacaatacagcaattaattaataaatacacataaaatataaaaatacaaacacaggtgaaaaagccctatgagtaatacctgagagcaaaagcaatgatggagctgggctccttctcacagactgcaatgggcactcgttcatgttcatacattaaatagtgtttatctggatcgctgttcaaaaacatgtaaatcagaacaaaattagcagaaaatcacatatacaacccattagcacaattacaagtaaatctcaggacaattttaagttaactaaataatgcacaattacatgaacataattaagccaaaatgtatgcagaacttgaacaaacagtcaaggaaaacagatcaacagaaagtttttaaaggccactgaaaatgatcagaactgtttttcaaatcagagggtcctggaatcatcaaacaaagttttccacgttggcaagatgttgggtcatatttatctcaaaaaatacttacaatgaatagcagaagtttaagagattttgttctactttaagtttgaaagaaaagtcttttggaaattgtggaaatgtaccactagtccagcagtaaatgacataaactattcaagtctgaagcagagaaaacagaggccttttatacatttacaccacagaacatacagctcaagacaagagctcctgagagcaggagtttcccttactgatctttctctacgttctgaggcactaaagctgccacttaaacattaactgaataaataaatacagaagtcaattgagaacaaaatctgtattaacatatctgtttcactggagcaagcatcatcagctgatagccagacatgtcaaccagtggaagaaaaactctcacattcagcctgtatttccccccattgtgagaggacctggtacacacaagatcacacaaaaacttcaatgggccattgcaattcatcaccactgttagaaacacaccatgtcccagttaagcaccaggtcagtaataccctcatatacaatcagcaatatgtttttatgatcatgagatcaattgttgttgttattcaatcactaagtcatgttcgactctttgcgaccccatgaactgcagcattccaggttcccctgtcctttactatctcccggagtttgctcaaactcaagtccattgagtcagtgatgctatccaaccatgtcatcctttgtcatccccttccccttctgccctcaatggagctgtatatcttttaaaatgtatgtgtgtgtatatatatatacatatatatataagcaactctttattaatctacttatctactgttaatatataaagactaaatgttccacaaagtacattatacaaaaagacaccgcttttatggtaatggaggataattttggattgagaaatacatatataaagttaaataaacatatttaaatatggagagtatatccatagagaaatctttaaaatgaagtgaaaataaaaccacccaacagccactggcttatataatacttacaaaggaaatggaatagggttatagctatttcctggaagcaaatttgcaaagatggctttcatggttgatttttccttcacctggctgtctgtagatcccagcaaatgtccatcaaatacatctagaatgaaaaatattctacttatatattcaggaagagtaaaagtataaagtgtcaactatatttcttttcctttttggaacacagacacgggcacaccataattaccaattatagtgtaaaatttttgatctaggaataatgactatctaacaggaaacaaccatgaagcatacacagctctgaccccaaggggcttatttttgttacatttcaacatgtttgaagttgagatcatcctgcaatcaacagcctcttaccctcaaggggctaggcaacagctgtggtgaaattactggccaaccatgcatgaactcagtcccagctgtttctattgccacttcaactcagttataagcactgtggctattatatctgagcttaattgcaatttaaaagttacatttaaagtttacactataattaagtagtcagcgcttaaacagaaaccaaggcaagagagggaaaaggcatacgtctattatcggcgaaacaaatgtttgttgttggagaagcggttgcaattttatccttctttcttagaagggaacaatcgtgtgctttatgagacttaagaaaatattaataatacccccagaaagtagataaagctgaatagcattttgttactgagacagtcacatgtcaagcagtgcaactgaagaagggatatggtaaaaagctacatctaaaagagcattttcaacagtacaaattttaaatcccaagggataagaaagcattgtgccccagcactcagagcgtttgtctctactggacgaagtacagaaatagtgacttgacctgtaccttcagaactgctggcagtatcgagttcggggggccctcccatggcctgctcaggcacgccttcaggagaattaggcagctggagatggggggaactggtggagctctgactggacagggtggccaagaagcggtcctctaaagaaaaacaccgtgcaaatgagtcactttaaaacattatgtccgtttctacctaataacaatgctttcaaaatgccaaaacctttttctacttcataaaccaaaacattttcgcttcttaaataaagtcacatgggtcatttcacaaatgaatttcagaaattttagaaatggatacaaaaatccagacaggttatatgacttgaccacaatcagatcttagtgacagcaggatgactggcaaccaagtctagtaccactccagtattctttgcatcagaccataatgcctgggcttccttagtagctcagctggtaaagaatctgcctacaatgcaggagaccccagtttgattcctgggttgggaagatcccctggagaagggaacggctacctactccagttttctggcttggagaatcccatcaagtttttattttaccccatggggtcacagagagtcagacacaactgagcgactttcacttcacaatgcctacttaaatattttgttcattcaatttaataaggaatgaaattatgatactactgaggggaaaaaaaaaatcacatgtttattctcaagggggaaattcacttaattataattttaaaaatgccaaaaattccaagttgagtttctattctaccaagatagtctaagtaaatttcccttccaactccctagagtggcaccaagttattcaatgaaatattgaggaaaaacaggcttaagtctagaaaagattttagcaatataaaaatatcaactaagctttgtccgattttttttcctacgaaaccaaggacttaactgtaacacaattaagagagaaattcagtttccttttatctttctgttcttcccctaaaaagcagccttctctaatgatcatctggcttccctggtagcttagctggtaaagaatccgcctgcaatgagggagacctggatttgattcctgggttgggcaagccctggagaatggaaaggctacccactccaatattctggcctagagaattccatagtccatggggttgcaaacagtcggacactactgagcaactttcactcacttcactattgatcatctatttctctatcctaacttaggcaatgtattttataataatcttaaactgagactgcttacaaatgctttacagcaaggaaaaaaatgtctctgaccaactgcatcagaaaaaattctcaaaatttagtgtttaaaacaagttctagactaagaaacgtctttaaattcaaagacaggtgatcaacactcaaggaccaacctttttctccatttggaagtcctggagaagcattccgtggagacgcatccactgcacttatctgtagagaaggaaatattctgttcttaaggaaatgttaaaatcacactaaaaaaaattttaacaaagtaaatcttacactttcaacctcttaagaattattaatattgattcatttaaaaataataaaaaacccattacctattactataaacaacacattttaattaaaaacagattttttttaattggtaaaagagtggcattgttttatgcttttacaaatatttcaatgtctagaagacattaaagtcttcttttaatagaagagagttaaattcctctctgacttctgtgtttaatctgttgagctgtattattataatggaacttataaagataatctagcctcacagagttacgcagttgaaaatgggaaatctctcagacctcttgaaagggtctaggacctccagggtccttgaactacattttgagaatactgttctaaacagtagctcacagacccattaaaatatccaggaactacttatgattatccattaagcccagcaaccttttattatccattggactttctcaagtcccataatccattgataaaatatatatttaaatgactgtcagccctgtgtacaatgtcattaaaagtcacttctcacactgctacttacaatgtcctttgatttgctcaccctagcagagactgccctagtcctcctatataacataactcatcatcaccaactccctcggcattactctccatttctcgttaattttttcctcacagctttgtttccactcgttttttaaatgttcattggttcatctgtttattgtcagtctcataaacaaacattccataggaacggtaactatggcctccatccacaaatgtgaactttcgtgttcatgtttgtgaaccctgagagccctgcactcagaacagtgtctaaaagcactcaataagtatttatcaaatgaatgaatataaacacaaaggcagtgctacagattttcaaatcaactttcaatctttcaaaaagaatatcatctattaactgattttatattttcaattccatgtcttacagcactagctttgcagtttcatcagcaggcaaacagaaaggcctctagcagtgtgtgagagccattaacggtcccagactacttgaaaatactaatgaatcatcttcataattcttactctcacccaaactttaaggaaaagtgattcctacacagttatttatgagacagaaagtagaattcagtgacagtgttcctaaataatacaaagatctaaggcacttgtacccatcattccatgaaaatactctgttgtaagtattatacacttgtacaaaaagaaacattctctcaaaagtactcatgctatcagaatattaagtctttaaaatatactgacattaattcatctgttcatggttagcatagtggcagaatttcgtgagacacatacacacacataccacacataccttcaatcaaacatgaatccagatacggctgtgaagggattctaccatgtatgtaagatcacaaatcagtcagccttaaactagggaaattaagcaggtgggcctgacctaatcatgtgtcctttaaatctgtgtccagaggttagacacagaagaactcaagagatctgaagcatgagaaggattcaatccactgctgtaggctttgaagatgaaatgtgccacatgcaaggaatcaggcagccacgagaagttgagatttgcctctagtcaaatgccagcaatgaaacggggacctcagtcctataaccactagaactgaactctgtcaacaacctagatgagcctgggaaaatatcctgagcctcagataatcaccttggccaaaccttcatctcagccgtgagaccgagcaaagaacccagccatatactctgccagagtcctgacacactgtgagataacagatttatgttttaggtcattaagtttggagtaaggtgtaatacagcaagagaaaactaatacagttaggaaaggttaattaaatcaccatatagaactaacccggtgtggcctcttaagaaaaacttctcacttaagcacaaagaatacccaaagttcatagtaaaataggactctgttatacaccaagtacatctacaccttctcctttacagcacctattgcctctgtgatgctaccttcaatgatgccagtagacagcagcttttgataagtatttcaaataaatgaattataatgtattttatttcaggcaaagataaaaaaaattaatccaggtcacaccaagaaacctgactgcttcaaaattaaaaatgctaatattatcaataaagtatgcattaaactaccacttctaagtgttataagagaaattaattctatttatcacaatgaaggccccaagacaaaacattaccttgctttcttcaccttgtctcagtcttccaggacttggaggaactgaaggccgcttcctacccttttcttgttggaaaaggtcttgtagcctataattaaagaaaaaaaggaaaagtgaaaagaagaacatggttttctttctaatatcctgaataatgcacacacatattctccttatagctttgaaaccacaaaaattaattttcctatttcaaatgcaatagattttacagctgtacataactaagagtaagttttgttttatttctaatcaactaatcagttgttattgatatgatcatggttagaaaagaagagcaagttataatgagacaccaacagaccaaggcccaaagcctagctctgaaaatcaacagctatataacttgggcaaatcccatagtctcatagagccacagtttcctctgtaaaatgaaagcagtatatacacgtgtgggactcaaaatcaaataaaagagtgcatgtccatctggtgccttacttagtgcctagcatcatccaagtgctcaataaataaatgctatactaatccaagtgaacttttcaatatgcattaaaaggaaacatttccccaaataaatatttaaatacaggtataaaatacacaaaacaatcagctgaaactcatggcctaacacccagtaattactccatggtttactacagacaaattagattcagttagcacacatactatattagaaacagcaacaaaggctattctcatcttttttttgtatccttgcaaactgcactttaaaggatgaaagaagtggagggtggcaggagcgataaaaataaaacctcctacaacttgagagtaaaaggcaacatccacaactaacaaggatatttaaatcaaaaacatcatggcagagcacattctgcaataatatgaaagaaacacctgactgcagagtcacacctgttattccaagcttgcagcacctcacagaggctttgtttcttggcaatgagtgactcgaagactgactgcagttgctgaggggtctccatggaggaagacaggagccgtgcctgcatcttctcagtccagctcttgaactcgctttcttccatctaggggaacaaaaggcactccagcaatctgagacgcatcccaaaaggaacttctaacaagttcacaactaactgctgggtttctgtcagaaaaatgaattacctccttttgtgcaaagatatcttccattttttcctctcttgatttgctaaatgtatcagttttcaaagacgcgagtctttcatcgacagcaagatatacctgtgaaactcttaacaaacattaaacactttagaaaagttagaatcaaactgtctaatctcacacaagtagaaaaaaggtgggcaaaaccactataatattgtgaagtaattagcctccaattaaaataaataaattttttttacaattctgtattgattttgccatacattgacatgaatccaccacaggtgtacatgcgttcccaaacatgaacccccctcccacccacctccccacaacatctctctgggtcatccccgcgtaccagccccaagcatgccatatcctgcatcggacatagactggcgattcgattcttacatgatattatacatgtttcaatgctatgctcccaaatcatctcaccctctccctctcccactgagtccaaaagtccgctatacacatctgtgtcttttttgctgtcctgcatacaggatcatcattgccatctttctaaattccatatatatgtgttagtatactgtattggtgtttttctttctggcttacttcactctgtattatcggctccagtttcatccatctcatcagaactgattcaaatgtattctttttaacggctgagtaatactccattgtgtatatgtaccaccgctttcttatccattcatctgctgatggacatctaggttgtttccatgtcctggctattataaacagtgctgcgatgaacattggggtacatgtgtctctttcaattctggtttcctcagtgtgtatgcccagcagtgggattgctgggtcataaggcagttctatttgcaattttttaaggaatctccacactgttctccatagtggctgtactagtttgcattcccaccaacagtgtaggagggttcccttctctccacaccctctccagcatttattgcttgcagatttttggatcgcagacattctgactggtgtgaagtggtacctcattgtggttttgatttgcatttctctaataatgagtgatgttgagcatcttttcatgtgtttgttagccatccgcgtgtcttctttggagaaatgtctatctagttctttggcccattttttgattgggtcgtttatttttctggaattgagctgcaggagttgcttgtatatttttgagattagttgtttgtcagttgcttcatttgctattattttctcccatttggaaggctgtcttttcactttgcttttattttcctttgttgtgcagaagcttttaatttttattaggtcccatttgtttatttttgcttttatttccagaattctgagaggtggatcatagaggatcctgctgtggtttatgtcagagagtgttttgcctatgttctcctctaggagttttatagtttctggtcttacgtttagatctttaatccattttgagtttatctttgtgtgcggtgttagaaagtgatctagtttcattcttttacaagtggttgaccagttttcccagcaccacttgttaaagagattgtctttactccattgtatattcttgcctcctttgtcaaagataaggtgcccatatgtgtgtggatttatctctgggctttctattttgttccattgatctatatttctgtctttgtgccaataccatactgtcttgaaaaatatatatacagaactttactaatatcgtatctaattaagaatcacatataattttgcagaataaaaagacctgaaaggacgtacataaaaatttaacagttgttatgcttgggagggtatgacttcttttttaatactttggtgtattgtctacattttcccatttttacatcagacatataaaaaatacaattaggaaaataggttatttctgttttcaaagaaagctgaatgaacaaacaagatatttaaagtaatttagatttcaggcagtactaaacaaaaacaggtgatcaaagaaaatgaaacttacttttgaaagaagtccttcagatcctgaagaagggacacttttaatgggacttgatgtttaatgaatattttgggaagtggaacacacacttcaagaagccgaataggagaataactgagaggagaaaatacaagtaatagtcgaaaagtgaaaaatattttaatattttgggtagaagtgtatcatgacagccaactaagtcctatgggcataagagatcataaagtttctataaaatggcattttcaaacaaccaaaaatactgaagaccacgttcaatcattaccaatatccttcccagttttaaaaagattttgttctgtgttgttttccccctgcattgtgctatcatcagttatcccgaggccaccctcgtgtgctttaaaaacaactgcatgggatagaaacctccatgaagggagaggaactccttcctacaattagcttagacacaggtattcactaccttctcagctcccaaggattcttcatgagtttcctttccaccagaagttcatgttgtctagtaaacactatatccaacctaggccctaggttcatgattgatagctcttgcttaaaaaaggaaagaggttcaattaaaaatattttctgaggacctattatgtgtcagatgctgttttaggtgtagaacaagggccaaaattcctgctctcatgattcaggaacaagacttgggcaataaataaaaacaaatacttaaaacatacattatgccagagagtaggtgctacagggcaaaataaagagcaaaaaagcagcaaggactgctaggggtgatagggagtcagggcaggtgaaatctgaacaaagatctgaaaaaagtaaggaaaaataagcaaatgtctagaagcacaatggaagaacaatgagaggctcccaggaaggaggctacctggcataactgaggcccagcctggaggccagcgaggctgaaagacagggagcaaggggagaggagtaggggtgagaagcctgagtgtgaggggtttagaggccataaatggactctggttttcactcagggtgaaacagacacttctggaggctccagagcacaagtgccctaagctgattttcatacaataggaccactcggactgctgcgctgcagggggaggctaaagagaagctggttgaggttattgcaataatctaaggaaggacaacagagattcagttcagaaggggagtgctggaggtggtgagatatgttcagattctggatatatatggctatgctgggtctttgctgctgtgagtgggcttctcactgcagtagcttccttgctgctgagcagaggctctagggggcaggcccagcagttgtggcccacaggcttacttgctccacagcacgagatcttcctggaccagagatcaaactcacgtcccgtgtgttggcaggcagattcttaacctctggaccaccagggaagtccctagattctggatatattctgaaggctttctcaatcatttaaaaccattctttgaactagtgatttcagctctatccagttctatccaattatccttatgctaagtaatgtcttagcaaaaattctgacaggctctcagatgcaaaagtaatggttaagagtcatacctacaataatagcaaatctaccagtttatatcatgactccatcacttgctagctctatttgtagctataaggtctctaagtaagggtaatagtaacacatttcttaaaggattaaataaataatagcactgaaagctcttcacagagtatggccctgtatttgcaaggctgatgggtggggaacaacatacaccaaaagtgagttcaatctagtaacagtggaaatgcttcagagccttccagggagtatgtgtctgtgacaaggttgctcagacttcttacctgaaagatgccaccatctggttataggagaaatactggtgataatcatggtggatggagtgaccacatggctcagcattggctctgcgggtgtactggtgcccgtaaaacctaagttccaggtattttgcaaatgacatggaccaagactcattggaaagagcgacaactggtgttacctgaaattcagcataaattgtttgttatctaatcacatactgagaacctcttttttaaaaaaaatgtattttcttctttagtacaagcctagtatattctgattgcagaaaactagaaaaacaaaaaaaatatgtaaaggtaggtggggtgagggatggctacagaaactgtctcatcagtaatcctaccaccaccatcaatatgctaatacgtttgctttctttccatacatgaaaacatatatccttagccaggatgtttataaataaaaactctttcttatagcttcataaccttgattattagtaatataccatattttcccacattgaatattcttatgcagcttgatttttaatggctgcagaatatcctattatatggacatgtttaaccaatccctattggtgggcatttaaaacatttcaagcttttcattattttgatgaacttttcaatgtgggtatataaaacacacttataagtatccataacgatttccttgcaataaattaataaaagtggaaattggtaggtcaaaaaagggcatgaacatttatctggtctttgatactttctgccatactgcataaaccagtacacctatttggagacacaactgccaccagtatctgagagtacccatttccctactttcttactgatctcaggaattaatatctttgaaatgtgccttctttaaaaaataaataaaaacatacttattttatttatcttttattactaataaataacatgtatttgcacatgtctactggccatttgtattaaattgccttctcatgcccttttcccattatttctatcatagcttatagaagttcaatagtaaatatattaatattgggtcatatatgttgtaactttttttgacacataaaatttttcacttctgtgtaaccaaaactgtttaccattttctttctagcataaccccaaaggctgaagttttgttttgcaatcatgtgtatataccaaacatacaagatataaagatcaaatttaggttacttaattcactagacaatctacaaaagttcacacattctacaacaaaatattgccagctgcctaacaatgactaaaggcctagaagaacaagcatataaagaccaattattgccaagacatgatttcacggatgtatgtttctcctaaagactaactatctttgactttgccctcctcaaccactaatactgaaataggttgcactattatttggtctgtaattcctgtatgtaattccaaacacactccaaaataagccactccaaaataagccaattaatataacaatgaagttaaatctggcacatacacattgcaaacaatttgaataaaaagtatgtattaaaagcaaaatactagcaccaaatatttcctccagagatagaaaagcacagagaggaaataaaatatacagttttgtccccaagaataaatatgagaacagtagagatcaattaaacatgtcctcatctgcgtctcttaagacagaaatgttgacctagattaacttacacaagcattctagcatactgtaattattgtgttataaaactgtttcctccccaagaggacaggagccaacaccttgttctttcttcattcctaaggcctagtacagtacctggtacctacatggtgctaaataagtgtttactgatgaataaacaaacataatcgagaactgtcaaggtaaagtctcaatatattttactggacatggtacctatattttatataataactgataaatcctaaaatggaaccttcaggaaataaacattaaagggaacatacagcaggtaaaataaataagggcccaaagacaaatatcaaatccaaaataacagaggccaccttcccccacaaagaaagaactatagaaagaaatgatactacatgaaatagtacagcaacagagtactcttacctgcttgcagattctgcaccaggagtaggtgagaattgtatgctgatatccaggtactggagaatccagctcctttaggattatctgcacacagccttggccatggacaaagcgtcgaatgtggtgcaccatgggggtatcacagaacatgctagggcactgataggaaggcctttgacaaaaaagaaagtcctcacattaaccatgaaaccgaggagccatgtatagtgaatgctggctaatcaggactgcagacgataaagtgcagcatcctctccagagtaaggaggatgatagatgatctgatcagggtaccacttgtcctgctacaagcctgcagagctgaacaccccaccttcaaccacatcacagtgatacgttccacttgttaagcaccttccataggccaagcatttctaaaacatcatctcattttacttattaaaactcttgatgtttgtggagtttgttagtatctataaaggggctggtaaagattaacccaggtgatgctagtgctaaagaaactgcctaccaatgcaggagacacagagatgtggattagatccctcggttgggaagatcccttaaagaaggaaagagcaaacccctccagtattcttgcctgaaaaattccacggacagaggagtctggggggttacagtccatggagttacaaagggctggacacgactgagcatgcacacacgaagattaagttacttgctctctgtcatgtaagtggcaagcgaaggcactaagatttaaactgaggcccttagttttcttgtctctcatttgaatcaatgtaaaaacagacatcctaaaaaaaagaatctgcaggactgcagggcaattagatgggcatagatctgaaaaatgaactggagaagacttcctgggttgaatataaaacagattacttctctgtacagtaagccctgacattaggcatgaacaggaaggttaaacaagaatgctccaactcatgtttatgtttaggttgaaattttgtgcagcaaaaaaaagcataaatagaacataaggagaaaactggttcttaccggaaacagtatctctctaaaaatattcctaatgtaagatcattttttccataaaattccattgttacaatcctaaaaaaaaagatcatttcttagaaacatatcattagaattacaacccagcaaagacattttcatcagaccccaaactgatatctgttagatgtacttataatacagtattattattaccaacaaaacaggtaatattcttttgttgttacagaacaggttttaccttatctgatataataggtttggactaccatattacagcatcgtatccattcccagtccattagtatcttatgaaactatttaatcagaatacataaacaataacattaaatgggtaagtctgatctgcattaggaagaagtacaagtttcctctacaaagttttaaactccaccaataaaatggaactcctgtctctgctctccagtctacaccattactaagcacaaagagcagcagctcatattcttccaggagagcaagttcctaaatttatatccaactttatacctaaataagagagttcagctacacatactcttttgaaactgacatcttattcaaacctagacctaaattcccatgggctcaaccagacccaagtcagcctgctagagcaacagcaatgtagaagactccctgatctcactggtagaaatgagtgtttctggtgtccaaaattaaaatatggaagacattttgttgcggcaagtactccaaaaacaagcagttatgttctataatacttaagatcagaggtaaactgtataataactaggctttgtgactatcattggaaacaaattataacattataaaatgtgtttctatcaatctacttggaattaagttttagaataaaacttaaaggcaaaaaactgacttttataaaaacaatgcccaaagaaaacctgcctgatttgtgcatgttatcaaagtgcttaaaacaagtttttatgtatcaactttcacttttttataattacaaactgttcttgtatccctcttcactcttaacatacttttatttacttctactcatgaacaaatccaaatttcataatttacaagttcagaagttccatcaattcacatatgaccagcagcttgctgtgtacctacacagcctaatggctgaatttttttcacagttgctggaattctgttcttaagtacaacatgcaagggagggaaggagtcctaccaaggactgacacaggcactgggagcattgctggactgggcagaagagctgctgaagagcacacacagcctctggtggttgacagggttcagacagtccacctggaagggaaggaacatctgggtgagcactccaactccaacgcccacctccaacatccaacacactccactccgtttgtaaagcctctatcagcactacaggggttccagtgaagactgaaaactacaggaaactaaatataaggaagaagagcagttaatttttaagttaaaacaatccaaaaggtttaaaaatgcaagcatgtctcaacttgttttcttactctatttttacaaaactacattaaattattttgggggtagttatttaaatatgaaacagtctgaattgatagctggatataatctcaacctgagacacccagaaatctaaattctaaggtatttatttgtattttatacatgcttttgatcattacaaaggtaccatctgtctctgtaaaattttaaacagctcagaggaagatgcacaagtcctcgaagtacataaagcctctcctcctctgaagctgccccacctcccaaactgataaaaatttgactgtgtagttaaaaatcatgtatttgcgctagctgatacacatatatacacggaaacacccacataagtatacacaggtgattctgttttttaataaaaatgggatgatgctacatatattaaaacacaatgtgctttttaacacaagaaaatatgtcatgggttctctctgggtcattcaatgagatccaattcatccttttaacagcaaacagtcagaaataacgacttcagtaaatatccttgtgcatacattacaataaaatataagcatccttacacaaaatgcttacttatctgtgctttgtaatgtacaaggaatgagttataaaagatagaaatcatgaatcaaaaatatatatgtgctcatgtaaatttaaaaggcccccaaatcacttttagtaagtttacataaatgtataaaacatatatttatataaagtttattgtaagcatttttccatacttcattaaccatggttcttatcacattccttttttccaatttcaggtattaaaaacaatatactatcattatttaatccttcctagactcatctagggagaaggcaatggcaccccactccagtactcttgcctggaaaatcccatggatggaaaagcctggtaggttgcagtccatggggtcgtaagagtcggacacgactgagcgacttcactttcacttttcactttctttcatgcattggagaaggaaatggcaacccactccagtgttcttgcctggagaatcccagggacggaggagcctaatgggctgctgtctatggggtcgcacagagtcggacaagactgaagcaacttagcagcagcagcagacttgtgaaagtgaacatctatttgttttattaaacaactgtattttctcctcaaaagacagatttgttcatgagttttatcacctataatttcctataataaggaaaaaaaacacacccatttcctataagcttccaactctactctcccgctggctaccattaaaaggatcaaagacatcacattacacccaagtcatcatgtcagaaattttaagcagctccacactgccccctacctcacagttctccttagtttgctgtagcttagcgtgaaaccttcaaatctagtttcatcacattacactcctatttcatacattttaaagcaacacgtaagacaaaagagaccacaaaaaaaaacccacagatgaaatatttcataaatctgcatgtaagctgtcatatttgacttttttaccttgccagagcagagattttccacccatcttaaatgtacacaagcacaaaagcagtcttgctcacctttgtcgaccacactgcatcacttgtaatcaaccctttttcttcatcaccttcagttctgcttcctgatttaccacttgaggtacttgatgcctcctttgagtaagcaaaagggtctgaatttttctgctggattcttcctcctctggcccgataatcagctagcattctccccaagctctggctatcccccaggtgctcagcaattctggtgctcacgagctcatgtgagggcaagacttgaatggacttggcctgaacacttccattcatgccctgaaggccagagagatccctaagcatctgtttcttccgcctgctctccatttccttgaactccttattgaggagaggagaccagtaaacctgctccgcaaaataatctcgggtagagcatcgcatgcccttgtcagttaaaaggaagggctcccggaatgtgatgactggcgagatgcagaggatcacatctttcaactcttgcttaaaggtcaaagaatcagtcttccgtttatcttcagaagaggtaacttcttcggtaacatacaggccggtgtcatcctgcagagggtctctaaaggctctcatctggcttgtgggatccggaagctcctctgtttgctgcaaagcctctggctgctccctgcctatggcgtcctgttggtcatccacatggagcggcagcaatgactctggtactgatggaaagagagcacagggggcacccatcgggcaagctgctggggcatgctcttgaggcctcaaagaggcaacatcctgtggcacactcttattttcctggtcacccttctcaaatagaatccttgattctagcaaactgccatcatcagaaggcagaaagtctggggggaagtcaggctcccgggggaggggacttccgctgaatggctcctgtgcagccccttcatcctcctgtccctcaatcagagaatggaaggaagggttttgcgttaatgttggaggcatggcaaattcatccataaggaaggagatttctagttgagaatgataagctacacagatcataaatattaagatctccttaactcgagccagctcataatcagagcctcctctaagcttgattgtacagcccaggtgctgtggacagccttcaaaaaacatcagtgttttggtttgttctacaaataaacaaacacaaggttaagaaggtttaggtggcaatccagaagtccagacagaattagttcattatcttaacatctaccagataaaaactcttaagtaagaccatagttgtatgctaatagccatttcctactattaatatatcaacatcatcgttctgaggagtttattcatttcctcaggtccccccatttcaggtaaatctacactaaagatcactcaccattaggcaactgaaacatctgcatgtaaaatttgtgacaggtgcccaggtggggtttggtaagcagctggtccattgacatcaccaaatcaccttgggtcatccggctaactcgttctaaaacttgctagaacacagaacatcatcatattacaaaattaaagaagaataaaattttagtacattttatatggaaaaataatagaaacatttgaaaatgccctcaccaaaaaaaaaagaaaatagaaaatgccctattttctttcaagatgaatttccttgattttagtaattatatgacttttactgattctaggtaagtctacacttggcaatcagtatgtgcttactaaaataaaccatactcacattaataatatcaaaagacatttaagtattattcattggcacaagatactgatacagcggtggtgggtggggaatttccacaactgacctccatactaaagaaggtaatttttcaagggagagaaaattttctgctttgtatgattccccaaacaaaatgacgcctctacaaagactacttaataactaatgtcaactacacctatggtttggtagacacttataatgagtgttacataactcattatgtatgagtgctacattaattatactttcttcaagcctgagatcctccagtcttaaataaggaaagcactgccgttcctgtactttcaatatatacagtacagctaagaaataaacaattaaagaacactgtatatctaccacacatgcatataaatttacaagctgtcatttttagaaataatagaaaaataagaacactcactgattttacattaatgaccaaagtaatgccgtgttccagcaacatatcctgtgcaattcgagataccgttttctcaaccagaaccagtgtgggtcgaacatcaactatacgctgaacgtaattctttaggaattccctttcctaagtaagataaataaaaaacatggtatgtggtacaaatcaagatctagacatgtaaaaatactagggcagtgtgactagtaacatcaaactaagtttttttcatccacaaaccactactaatagaagtttcctactaagtaaacattgtactgatgtgttaactcatttttcaggtcctcaatctcaggtaaaaatatgctaaatatcacttaccaccgtgtaagcaaattaattcaaatacaaccaagaatattatttatcattctaaactgctgactatgctagaaagagtttcagaagaaactttattctccaactcactaatttttctttgaaggactctgagttcttaataacttgtaataaaagccaagaatccaattagctagctctcgaagcttaaaaaatcaaaaaattctcacagcttcccaaatgaaagcaactaagtatttttaatataattatggatttccccttttacattctgaaactaaccagaataactcttcgttcaggtatttgaataactaacagacactatttcagctacttcctaatttctatctcccaacaaataatattctacttagaacaatggtagttacaaattaaaacaatgtttaatacaatttcatgacaaaggcttactctcaaagcaaatgaatgttgtaaataacaactcgagtttaaaaaatgtaattagttaattgctttataaaatctctagactcaggagacagtggaaggtggggacacacctgtcacttctgctccaaatgcccagtgttttctgagtcaattttgtattcacggtcagagccaccagctatggatgagcctattccctgccatgaacttgccctgttatatttcttttcacctttctctgtcttactgatagaaacgacattctcaaattatcccattattaacaaaaagaaatttttttcccatttaaaatttttttcttaatttttatttaattttttcttatttttttctaaatttttatttgtattttctttattttttctttaatttttttcttaattacttatttttggtggctgcacaagggctctctgtagttgcgggggctactctctagttgcagtgcacgggcttctcattgcggtggtttgtcttgttgcacagcaacaggctctaggcgcctgggcttcggcagttgggtcacatgggctctagagtgcaggctcagtagctgtggccaacaagctgctctgcagcatgtgtaatcttccagacccacattggcaggtggattctcaaccactggacccccagggaagtcccaacagaatgaaatttttttccctgaaatgtgttaatctactctgcttattaaattgcaatttaatgacattttagactattttatttgtgcagcttcaatgaagaactaaaataaattcatttttgtttaagtttctggcctccagtatagggatagcaaatacatttcctcacagttccagctccagtcaactattatgattgtacatgaagcgccttgctaaaattggggcttagaccaggctcagcaaggaacgagtatcaggaggcaggcccggaagacagaatggagcagaggtagaccaacagacctctggggcagaccttgtgaagacagtatgatgcccaacctaattttatccttgcccttttgttctccttcttcttttttactagctaccctgcagcttcctctttgactggtcatgccacaatgagttccccgactccaagcaaagggcggggcagtgtcaaatcaactgatattttctgtcaattcaaactaaaaacctgaataggtcaggacttaaagatataataaactatgttctgaagcactgatgaacaagatgctttgttgctgttattcagttgctcaatcgtgtccaactttttgagaccccgtgaactgcagcacgccaggcttccctgtccttcactatctcccaaagtttgctcaaactcacatccactgagtcagtgatgccatccaaccatctcatcctctgtcatccccttctcctcccaccttcaatctttcccagcatcaggttattttcaaatgagtcggttcttcacatcaggtgaccaaagtattgtagtttcagcttcaaacatcagtccttccaatgaatgttcaggcttgatttccttgaggattgattagtttgatttccttgctgtccaagggactctcaagagtcttctccaacaccacagttcaaaagcatcagttcttcagtgctcagccttctttatggtccaacttttacattactacaggactactggaaaaaccacagctttgagtatatggacctttgtcggcatagtgatgtctctgctttttaatatgctgtctagatctgtcatagcttcattttcaaggagcaagtggctgtagtcaccgtctgcagtaattctagagcaaaaataaagtcactgtttgttactgtttccattttttccccatctatttgccataaagtgacaggactagatgccatgatcttagctatctgaatgttgagttttaagccagctttttcactctcctctttcactttcatcaagaagctctttagttcctctttgctttctcccctaagagtggtgccatgtgcatatctgaagttattgatatttctccctgcaatcttgattccagcttgtgcttcatccaacctggcattaaacatcttctcctatcttaaagcttcttttcagattatgaatttactcagacatccaactgtgtggtaatttgaacgttctttggcattgcccttctttgggattggaatgaaactgaccttctccaatcctgtggccactgctgagttatccaaatttgtcagcatattgagtgcagcactttaacagcatcatcttaatataattatacaagttataattaacaagttatattaattaaatcatgtttattaatatacatttgcccagagcatatgtgtccaacatgaagacttcagtctattaacctggtcataaaaggggagttacagtggataaatataaggacaactttttggtaactaaatacaattttataacaattttacatattttacatctttgcaatcaggatgcatcttgcaaaccatgtggttgtgatctaagtctgtaagtcttccactgataccagtgagatcacgaaaattcccagcatcaaagtagctcagttttccacaaaccataactgtgtttcttctgattccttatttcagttctcattgaaaagtcacagtaaatcacagctagaaggaatggcataaatccggttgaaacccctcatttttactgatacctagctgaattccaaaaaggaaacagtcccagttaacagagttcactaagcaacagagcatggtgcctttcaccacaattaagttttttctgtgtctgtgaattgagaacaaaagtttccctggtggctcagtggtaaagaatccgcctgccaatgcaagagacatgagttcaatcccaggtctgggaagatcccacatgccttggagcaactaagcctgtgcgccacaactactgaggctgtgctatagagcccaagagctgcaattactaaagctacgcaacctagagtccgtgctccacaacaagagaagctgccacaatgagaagcctgtgcaccatacctagagagtcgcccccactcacaactacagaaaagtccatgcatcaaccaagacccagccagataaattaatttttttttaaaaagtgactactcctatcacgtgcaaaagtgagctcatgaatttccaagtaatgcttttcccctaaatgtttctggaaccgaatattaagtgtttctgctataataggaaaaacacatttctgaaaacctcccattctgaacaactgcaaattaattaatagcatttatgggagaaaagaagttggggcagacaacctatacaacttcatatcaagagcactaataataataataagtggtaccttgacagaggacttggacagcccagccaagcagctcagcctagctggaggtggcctcaagggaaattttaaatgtacaaaatcaactgcaacagtacaagtggaaatgaagctccaagcaatgagtgcccaaaagccatccaggaccaggggctgggtctccctggggagagaccctcctctttcagcaggagctcatttctaatctcttaaaatggagctaaagggctgtgtgggaactgagccgaggctgttcttccttccagctgagggctataatcctactaaagctattctgggcctcctcacttaagaaaaaccacacagaaatggacacgacttccatctgacatcactcccttttactgacacttggtgttctagaaacatgttttagtagaacagtctatattgaaaaacaggtgttactgctggaaacctgattaaaaatcgttagacaaatccttaaagtaagttcatgaccccagtgggaagaaaaaacaggatttggattttcaccttttttcaactattccccaaaagtcacatgttgccattaacactttgcaactaaaaacagtgacaaaggctttggtaagcttctaaagtatgattcataagaatgtcttctctaatacattttttaatgaaacaagagcaatgaagtttacctatcaaatttaaccagctggaagaaagtataagagttggcaagtatcttagtatacaaacatttctccagattacggtttcagtaaggagttcttacctgaagcacaataggatcaatgcaagtaaatttggtttcttctctgtagagatattcaatggaacacttcaacagaagaattttggggtttttaatagaagaattcatctaaaatataaatgaacagtttgctaaaactttgaaagtttgcaatttatagacctcctttaatcacaactctaagttcatactggtcataattcctcttaaatagattccctcattatattcagattaaaatactctcatttattttgtgctattcttattttttttttcaaagcaaataattaaagccatgcaaagttctttaaaaactggcttctttttcactaatgctattttacccaattttctatactcttaactatctttttttaaatccctaatgtttttaagaaaagttatcacacccttggtaggagggagagggacttaaaagataggctacttgataaactcccaaagatcagcaattctacaagcagaatttaacttttctaagactcaagaaaagtagaggagggagaaaggaattaaaacatctgctgaacatatttttgatggaataaatttccagcagttgtaaattcgcaagctaaactgggaaacaagcagttaacaacagaaaatcttaaaacacatccagaaatagagactcaaacaatataccctaaccacacaactaaagccagaggcagaggagtctgcatcctgcaacagaagtttccatctgaccaaacttattagcagggcttttttagtaactacaaattaaagactgtctctaaacatggtcattggggccagattcattcacgcatatgtgaccaccacacacataacagtttttaattctgtagatgagcacaacataactacctctgaattcaacaaacatcatttaatctgatttaaagtactactttgatgggtacagtgctgttttaataagactctatgtagaaatatggactttggaccattgctatgaaataatatcaaattcaaacataattttatttatctatggtcactaatactttttaggaagtttaataccttataaaaatatattattattctcagcttagaaaagagtgaaaacagactgcagtttatgcattcagttgctcaagcctgaaatttgcctgagctctcactgtaaccaaaccaacagtagcagagatgaggccaggtgtctctatttttaacacattctcttagtgattctgaagcacagcaaggtctgagaacactgttgcagatcatcagtttctctaaaagtgagaaccagtaaacagataaacaacactggaaacaccgagtgactccattacaaagtcccacccaaatgcaaattggtgcagccactatggaaagcagtacggagtttccttaacaaaaataaaaacagagctaccatatcatcctgcaattgcactcctgagcagacatccagagagaaactccaatttggaaaaatatacacaccccaatgctcacagaagcactatttacaatagccaagacacagaagccatctaaatgtccatccacagatgaatggataaagatgaaaatacacacacacacacacacacacacgaatactaaaaagaatgaaatcatgacatttacagcaataaggacggacctagagattatcatactaaccaagtcaaagacaagtatcatatgatatcacttctatgtgggatctaaaatatgataaaaattagcttctttaaaacggaaacagattcacaggcatagaaaacaaacttatggttaccaaaggggaaagtgtagcgtggggggcagggataaattaggagtttggaaatggcagccactgtgtataaaacagataaacaacaagatcctacagtattgcacacagaactagattcaatatcttgtaataaacttaatggaaaatatgaaaaagaatatacatatatatgcacatacctataactgaatcactttgctgtataccagaaacacaacactattaattaactatacttcattaaaataaaatttcgtttaattaaaaaagtagtcccacccttcctctacccaccccccattctcactcccctaaaactactaaatgagaatttctaaggtttgggcttaggaatctacatttttaataaggtcctgatacatattacatttgctaaccagtagccttcagaataaaatgagagacaaagccctcatctgcttcctccagcctcatttcctgccagttcctggcaccatctggcaccttaggatctcagactttccttagtacaaggagttatttacccttctctctgtgctggtgctagaaagaggcctcacagctgaaggtacagagaaagatacagaattccagtcataattctgtgttcagccctatgaggaagaacagagttttaaaatggtaggcctctggaagaattctggtctgttagaaaatcttttatccctgagatgtggcagggtcaagagagaaatgacaccagcatcctctcagcctgttgactaggaagccttcttctgtctgatgagttctcactgtccaagtccctgtcatcatcagctctgggagactctccctgaacccccaaattttactgctagtcactcctccctgtccaatctcctttccctccataatgagggcaccctcagcttgttggcttggcacacagtcatagtttgctgaacttcaatgttgaactgaatcacattacctttttatgtgcaatattcttggtgcaaacaaatccattgacaaccacagaatcaaacttctttccacctgggatctaatgaaacaattaagaaaacaatacaattcgatatacatctttagaatgcagtcaaatgaattctgtaagtatttatttccactttttgttttccctattatgtaaccaaataagaacaaaaagatctaggatgcatttcttcctttcaaccaataattaatggcaccttcctacaatcatcaactctctaatatactatctggtactctagaatacccatttgaccaaacaaattaatgccagatgtcaattaaaaccactattcagttaaacatcataggcaaaaaatataggcaaaactccactactctctaaataaaacaattacccactgcttttcctcagaacagtaacagccgtgtgtgaagagaggccttcttatagatgacacatcaagaggaggaagtaggaaagtttgggttcccaactcactgcaagcccaacttacccccacccccactcatctctcacttcctaagagtggctttcatgacctttaagtgcactgctaccaaataggacagaaaaacttccctctcctcaccgagcatccttcctggcaacgaccttttcagattaccattaagagacaaattactattgggcccatctcatgaatgctgaacatgaggaaaacattggtagagctcacttttttgatgtggacaaactgacggatatccatgtcatcatcccggttcttgacgtcgggtcggactgtctgaacaacctggcagaccagggatacgatgatgtccctccaagacgttgacaatgactcactatggagcaactgttggagcagcgccatcatgtggttatgattagctgaactacaaaaatgttacaggaaagacgttaatactgccacagaaaacagctctgaagatgcaacacagtctacaaagaaatcagcacatgatttaatggcttacggtaagatcttcttggtcattttattctttcagaatatctgcaccttaatgcttttgcatataaagaaaatctgtgaatatcttcaattaagataacccatttaagggagattcaagagggaagagacatgtgcatacttatagctgattcatgatgttgtacagcagaaactaacaacactgtaaagcaattatcctccaattaaaaaattgaaaaagaaataaaacaaaaagtctatgggtttgataaaaaaaaaaaaccctatttaattcaattaaattttaacacataaataacaatggggatagacaagcacaactaggacactctgctttattagaagttttaccagaacaggctttatttcctaagtaatgttagcatttttgactttataaggaagaactatacaaatgcctatcaagtcacttaagattagaaaaatggagaattaaaatgaataagctcactgccttacagcaacctctccatagcttgtttctctccattctcctccctgagcagctccaggttgttatgatgccagcccaaaggtgtgaaaggcagttctttggatttttcctcaactcgacggttaaataaggactctaagtgtaaaataagaaattatattcattgtcaagttttataccatctactcagagatttagaaatcaccaacttatctttttaaaatttttaagttagccaattcaaattattgatgtaaaaaaagcaaggacatgtttaaattcatagataaaaaaaattaagtctgagttagaaagtcaacattctcaacagccaaaatcagagacagaagtgtaaagagtaaatttacataagcaaccagggctctcaagaaagtaactataaatacggcttttgaaaagcaaatgaaatgaggtttacagtctttttatttatttggggatattaagaaagagaggtggttaattttccctataaaatcacaaactgaacactgcattcaacagaaatcagaatgcaaggagaacttgtgatagtgtgggtgctgagaaaagctcagctttcatttgtctgaaccaggatatgacagtctagaaagtctactcaaacaatcctttcagtgtttctttttcaatactagaacaaaaaaggctttcttcttaattggcaaaacttttacaagtcagaccaaaaaattaactgtgaagaaatcaaaacatggtaaatagtaatttatataaaattttgtaaatgatcaaaacaaaaaaaaaaaaacaggtaatactaaatgctttgcaaaaaagatactaaacaacttttgaaattgtaattgaataaatgaataaattgtaaaatgaataaattaaaaattctctagtctttcccctcttaaagcaaactgaacaaatgacaaaaagccttcaactaaacagtccagcagcctccagagtaaagccagtgtccatgacaagtgaggtacaagaacaacacatttcaattatgtaaacccttggtctataaacatctggttgaaccagatgcttgaaggtgaatttagaaataagttgtgacactatctgtcagcagctgcccttgtaccagctcaccctaccttctctcttttatgtgaaaccctcccattatctgaggcctaagctgtagcatgttatggaccaaataagtatgtcttcactccacagcaagctaagtaggggtggggttagaaaaggtttgtattcttctgtacttcctttcgtccccaaggaaatgataagcagaattagttctttatttccttcagtccacttattgtccaaatccagagagcaagcagcatcctcaattagataagatctgcctgtggctttttgatgagcttgacagtcacttgatgatatgtctatcaatacttaatactacattcatgatacagaaaagcatttccgtgatatagaaaaacctttaaatgaataaaattcaaaatctaggtagacttttaaacaattatttttcagatcagagacctctcaaactaagtccaagtttatatttttggttttcagcagtctcaaggctactacacatattgaaaaactgtgttcctatggtactaaaataatttaatgcattgtcagtactcactcagtgccaatcagtatcctgggcccacagtgtatctccatgaacaagagacacgatcccatgtatagcttttgataaaattacctttgatgaaggcgtcacttattgatagctgttgtcctccattgtcagaaatcaaatactctgcatgccagggagagaacatagagaggaggaaggaaaaggaaaggcctatgactataacaggctagcataattatacagaaaacacacccacacataaagtattactcacactaaacccatcacagccaagtcacggaaactttaggctaaaatatcagtttataacttgttctgcatacttcctactaaacttgatagacttaataactcaacagagccatgagacagcaatgacagataatctttttaacagatcatttttcccttatcaaacctgaactgctttatgaaaactgaggtctgtcacggatttgcatgacaagcctaaaaagttacactctttatctcatccatagccatatgacaaataataaattcagatagagaacacactgcataaaaaaaataaggtggggttttttgaatttcaaaatataagctataaaacaaattaatacaaaaatgataatggaagggaattaagatataactcataatgattatattagtttttaatttgagttttaatgtttcaaaaattctacccaaacacttccaaatagttgccgaaagataacttctgaacacactctgaatgtgttctttcaaaacttttagaatattaaatattacaagtgaaacttattctttactttcgcatgacctttcctctaggtctgtgaccaagcacggcccaaatgaggttctttctaccgtgcaaatttaaccacaatgcattttaagtcctttaaggtaaaggtgatccacaaaattcttttcaagtagatctcatttataaacaaaagggcttcaaagtcaatgtgtttataagccaatacactcatccttcaaaacaaaagagcagagaaaaaaaaatttagcaacttcaagtgtgccatgccaaatacaatataatcaagtatgtggaccagtgaaaacagatatactttatttctacacctccctcacagaaattaataatgccaaagcctgtttatccgactaatgtacagaggctttagaagctttactcttcagtctaaaggatatatatgtacatatatatatataatttcagaagcaatagattttccccattttattatgaaaaaactttaaacatacagaaatccctatatatcctccatcaagactgaacaactgtttaatgacttgccgtatctgatttctctgtgtgcttttctcccagaccatttgaagttacacctatcatgacactttaccactaatacttcagcatgcatctcttaaaaaataagagcattcttctctagagccataatatttacacacttaagaaaactgacaatttcttaatatcatcatattagtccatattcaagtttatctgtttccaaaatgcttgaataaatttttttccctcaaacctggatccattaaggttcatacattacattctcttcattttctcttcatctagagcagaacttctaccattttctttctcctgatactgaattttgaaagaactcaggccaaatgtcacattctggatttgatggactatctcctcatggtgctgtttaacttgctcttatatcccacagactggttccaaataggaaaaggagtatgtcaaggctgtatattgtcaccctgcttatttaacttatatgcagagtacatcatgagcaacgctgggctggaagaagcacaagctggaatcaagattgccaggagaaatatcaataacctcagatatgcagatgacaccacccttatggcagaaagtgaagaggaactaaaaagcctcttgatgaaagtgaaagaggagagtgaaaaagttggcttgaagctcaacattcagaaaatgaagatcatgaaatctggtcgcatcacttcatgggaaatagatgaggaaacagtggaaacagtgtcagactttattttggggggctccaaaatcactgcagatggtgactgcagccatgaaattaaaagaagcttactccttggaagaaaagttatgaccaacctagatggcatattcaaaagcagagacattaccttgctgactaaggtctgtctagtcaaggctttggtttttccagtggtcatgtatggatgtaagaattagactgtgaagaaggctgagcgccaaagaattgatggttttgaactgtggtgttggagaagactcttgagagttccttggactgcaaggagatccaagcagtccattctgaaggagatcagccctgggatttctttggaaggaatgatgcttaagctgaaactccagtactttggccacctcatgcgaagagttgactcattggaaaagactttgatgctgggagggattgagggcaggaagagaaggggacgacagaggatgagatggctggatggcatcacggactcgatggccgtgaggctgagtgaactccgggagttggtgatggacaaagaggcctggcgtgctgcgattcgtggggtcgcaaagagtcggacacaactgagcgactgaactgaactgatacccccatatttccctataaatgtggagttagatctaggggtttgaggaagtcatgcttttcattttcttttctaggtactacttgctaactttccaagaatagttcagaatcctgcttccaacacgtaataaaatatattctgactgcatagctctctataacaaatagtgagaaattaatcaaaccagaagatcacactgactcagttttacaagtttctgaaaatgaggtagcttatgtaatacaaaaaaccatgagcatctttttaagcatagatacttaaacaaattttaacagttcatatttcctcagtgttaaaagctagagaatgatccctaagaaaagatgtaacaattttagtaacgattaattttaatggaaagatgagaatcacccattctcatttgtatttaagagaaatgaaaaccagacgcaggggaaatctattattctttcattttctgaactagatcattcttatgactttagtttctggtaaccagtgttcctcttaattacaatgtagaaaaaaacaatttattatgtctcaacttcacaaaagagaaaaaaaaaaattcttgttatatgctaaaagctaacgagagagaagtgtgaaagtcagaaacatttactaaggggtgaaagttctcaaattacaggctctctgaagtcattactaagaaagaaggtaattattctggtatatgtgtgtgtatacacatatatgggctttcctggtggctcagacagtaaagaatccacctgcaatgtaggaaacctgggttcaatctggaatattactcagccatgaaaaaagaattgaaatctttctatttgtgaaaacataggttgacctagagagtattatgctaggtgtagtaagtcagagaaatacaaatactgtatattttcccttattgtggagtctaaaaacaaaacaaatgaataaacagaacagaaatagagttatagatacagaaatagagtcatagatacagagagcaaacaagtggttgccagagaggaggagagtggaagaagggaagaaacaggtgagggagatgaaagggtacaaacttacagttgcaaaataactaagtcatggatatgaaatgtattatgtggggaatatagtcaattaactgtgtaatatctttatatggtaatatatcatactgaactggcattcatttcaaaatgtatagaaaaatggaataactgttgatcaattatacttcaaaaacaaactcagaaaaagagataagattggtggttactagaggaagggcatgggggaaggggaactgaaggaaggcagtgaagaggtacaaactttcaataccagggacgtaatatataacacaataaatataatcaacacagctatatatcatatgtgaaaatttttaagagtaaattctaagagttctcatcataaagaaaaaagttttttctatttcttttatcttgtagtctatgtgagatgatagatgttcactaaacttatactgtgatgaagaagtgaagtcactcagtcgtgtccaactctttgcaaccccatggactgttgcctacaaggctgctctgtccatggaattttccaggcaagagtactggagtgtgttgccatttccttctccaggggatcttcccgagccagggatcaagctcgggttgcccgcattgcaggcagacactttaccgtttgagccatcagttcagctcagttcagttcagtcgctcagtcgtgtccgaatctctgcgaccccatgaatgccaggcctccctgtccatcaccaactcccagggttcactcagactcacatccatcgagtcagtgatgccatccagccatctcatcctcagtcgtccccttctcctcctgcccccaatccctcccagcatcagagtcttttccaatgagtcaactcttcgcatgaggtggccaaagtactggagcttcagcttcagtatcattccttccaaagaaatcccagggctgatctccttcagaatggactgcttggatctccttgcagtccaagggactctcaagagtcttcttcaacaccacagttcaaaagcatcaattcttcggcgctcagctttcttcatcgtccaactctcacatccatacatgaccacaggaaaaaccatagccttgactagacggacctttgttggcaaagtaatatctctgcttttcaatatgctatataggttggtcataacttttcttccaaggagtaagcatctttgtatttcatggctgcagtcaccatctgcagtgatttcggagccccccaaaaacaaagtctgacactgtttccactgtttccccatctacttcccatgaagtgataggaccagatgccatgatcttcattttctaaatgttgagctttaagccaactttttcactctctactttcactttcatcaaaaggctttttagttcctcttcactttctgccataagggtggtctatactgtacaccttaaaattatatactgctttttgtcaattctatctcaataaaactaaagggggggaaaaagtaacaatgacaacaaccaggcactctccatctccttattatcttggatttcacttcttagcagtgagtgttctttcttatcttgacagaagttaaaaaaaaaagcttcagttaatattgtatcaacttccccaaataactgacctaacttgtctttctttgcatcacaattttaaaaatattttccaagatatccttgacatttcctgcagtcttcagtacaatctggacttctgctaacctgccactttttttgaaagcactgaccctctttcagactgatcctcatatgaaggctaactctcacaatttttgtagaaaaaaattttttttcaaaggttgaggtcagaaaactgccagaggagttgtgacagtttttccaactgtcagtgcttcccctttcattttccttagagatgcaatttgagggtgcactgtcaaaatgtcaatggggccttctatttcattcttctcctaacattatgaagttgggtttcctaaagcaaatgtttgactgggctcagcagctcactttttgctattatgaatttcatgacgtcaggtcactttcttcatgatttcaaaaagcgccttaactttccaagagatgaaattatcaacaagtcaaaaatgtatttcataactctactttcagcacaatgaaattgccaccaacgatgtccaggaaacagatacctctatcatgacagatcatgccacctctgaaccacatctatcattcatatgacaaaaacccaaatcttccacatgaccagcatctacagttaaatctcacccaagtgcccagtctgcgtcaaagtcctttcatactcacccaatgttcaccaccacttctccactttctgctttgaggattctgatacagatgtgtatcatactcatgttcagtgctagtcaggtctctccttttcttaaacctaaactggcttttaattatatccaacaaagtaagcctcatcacccatttaaaaaaaaaaaaaaaagcatttcttttctgcatactgctatgttcaattttagtaatggcttaaacttatttttccttttataccaaatctcctttgaattatgattttttagtcagtagactaaaacctcaaagagaacagcttaaaagaatgattttttttttggtattagagaagaaaacttttttacaaatacagcatatatacaacaagcattttaagtaataaagatgctttggaatgtgtgaatgtttttcgccagtctagttcaagcacctggaaaggtttagtgaaacactatgctactgggtaacagcataagcaaagaggctttaaaatattaaatgaaaaaagagaaacgaatagagcagaacatccatgttataatgcaaagaaatgccaccttggaagttgcacattatgctaagggaaaagcagtctgatgctgttccctttaatgactaaaagctttaagctgggtgtggtggtactaagggaggaaacaagaaatgaaaggaactggaaccaaccaaaaagaaaacaaacatgtggagaagaggtgtgggaaaaatgagaaagggtggaccaaaacccacagcaaatcccctcagccatggggacagaggaagcaagaaggacaggccggatgagatccacggcccaactctccagcctgtgttcagattccaggtggtgactccctcctacctttttggtcagcagggtgagggggcacatgtgggtacttggagggcttcttgatatggaagttcacgttgtccagctccacgttcaggctgatggaagcggctgagtcactgtccactgtggactggaaactgctgactgatgggcgcttgctaggactggcagaatcttttagtgttggggaggggaaagaaatatagggagaggaggggagtaaaaacgggtttcatcagggtattggaggaaaggagaaaaacgggtttttttttaatatacaagcccaatgtgcaataccaaaatggatacagtattttcatgtattgatacttctgtgtagacttaataaaatttgaaccagttaaatataaaatgaatttttaaaataaagaaatatattggaggttctgcagagagaaggcctgataccatagcgaagaggcgagaaagttgtctattgcaatattattagctcggagttatttttaagctgctgcaaactaaagactatagcaaaatctgaaaacaccagtgacttaacaaattggtttcttaagaaaatactgtatctaggacaacgattgctatcagatgttctttacgtttagttgaagccataaaacttaacagtaggattgttccaactaaataaaacactgtatcatacatacacgttaatgattcataaaaactaaaacgtcagaaagcgaaactcactagtcaaattatcgtcaccttcttcagctatctgctcagtgtcactgtcatcaaacttgatgtctttaaaccaggatggctcagagtgtccttccacggagttcactgagtcactgtccggagaaggggtctcagaaaattctgtactctgaaagagtcaagacagaatccaagcaattgacccacaatggcaacaatgttgaggctgtcacactacaaataaattccagcctaatatttgtataaggctaaccactgaatatattaaataagcaaatcagtagaaactttaagttgtaagccagcattataactggcaattccactcttaactataatattcatgaatcagcaggctaaaaggcagcatattatgaccaaacatattatacagattttatagtgtttcatttcttttattcctgagagtgaaaatggcttagaatttataaccctgtgccaatgctaggacacaacttggaaaactgttagattttcagacataccaccaccagtctttgggatcattcatcttttctactgaatcattttccaactttagttcacaaaagtgttacaggatattattttatcaagttaatataaacaaaaagtttatgttaaagttttttaaaacttctaagtatgtgatttccatgttcctaatcaaactaaagaaacagaaaagaaaaagaatattcaccattttatcagttatacaatttaatattgctatagagtcaaaatcatactgtaacagtaacattaaatttcttaatgattttattacatacacttcctcttaatccataaaaaaccagacataataaaattaaaaaccactgagggtaaatgacactacaaagtcaagcttaagaaaagctgctgctgctgctaagtcgcttcagtcgtgtccgactctgtgcgaccccagagatgacagcccaccaggctcccccgtccctgggattctccaggcaagaacactggagtgggttgccatttccttctccaatgcaagctgcacaaactgaaaagtttggggtttcaaagggtttttcatcacaactaccaaccaagtaaaaatgtcagagctttcctcaaatggcagggaaaacatactagaaaagtatatcattgggtaactcaactactttttattctcattgacaaggaagacttggtaatgaagctctctgtattctcattagccgtaccactgaacactacctgcaacggcctgtacagcgcatactcatccctgaagagctggtcgtggtgactgacacaatccagccaacgtccatccaccattgcctgtccaattgctatagcctgtgccctgaatcaagaccagagaaaacgaaaacttttaagacaataattttacaagatgagacacaaactgaatttattttctattctaatcagagttgaaatttcaaacagtccttggataggtgagggataaaacgagagagatttgaagcttaattaaaagattttctcaagtaccatagtaaagaagaacctacagacaaggcagttccaacaagacctaatttcaattacacaaacatcaacaagtattcaaggcaagcatcattagttcagttcagtcactcagtcatatccaactctttgcgactccatggactgcagcacgctaggcttccctgtccatcaccaactcccagagattactctactcatgtccatagagtcagtgatgccatccaaccatctcatcctctgtcgtccccttctcctgccgccttcaatctttcccagcatcaaggtctttttcagtgagtcagttcttcacatcaggtagccaaagtattggagtttcagcttcagcatcagtccttccaatgaaaactcaggactgatttgctttaggatggactggttggatccccttgctgtccaagggactctcaagagtcttctccaacaccacagttcaaaaccatcaattcttaggcgctcagctttttttataattcaactctcacatccattgatcttagctttttcaatgttgagttttaagccagctttttcactctcttacaccttcttcaagaggctctttagctcctctctgctttctgccataagggtggtgccatctgcatatctgaggttattgatatttctcccagccatcttgattctagcttgtgcttcatccagcccggcatgtctcacaatgtactctgcatataagttaaatacggtgacaatattacagccttgacatactcctttcctgatttggaaccagtctgttgttccatgtccagttctaactgtggcttcttgacctgcatacagatttctcaggaggcaggtcaggtggtctggtattcccatctctaagaattttccagtttgttgtgacccacacagtcaaaagctttggcacagtaaataaagcagaagtagatgtttttccggaactctcttgcttttttaatgatccaatggatattggcaatttgatctctggttcctctgccttttctaaattcagcttcaacagttcatgtactgttgaagcctggcttggagaattttgagcattactttgctagcatgtgcgatgagtgccattgtgcaagcatacccctgtacttagtagatgaggataaaaaagactgttgagaacagtatgactcctgtcctcgaggagcttacagtctttgagaagacaataccaaatattatagatgtaggtataaaatgtatatatatacacacacatatatatacatgaaatagacatttcacaatttatcaaaaaatttagtccatattattgcatttcattttcacagcttcttcacaggatcatattttcatatttttctcattggagctgagaggtcaagtctcaaagagactgaataacttcacagagggcataaagttaaaaaaagatacaatccaaactggaagccagagcttcactgtttacagctgttctttctcttctacatgcttgtttcttcctatgggaggagaagtagctactctaaacaagcagaaaagccaagcgacacaccaccctgaaaggcaacaggacctgtctggtgctttcacacaaatgatttgtgaggccggctagcacactctaggtgtggctaatggacccagttttgaagacaggttgaaagtccacattagggagcaaaaacaggtgaatccactgtggccttgggttaaagctctattccccaatcctgcagagctctgagttttgggaactactgcacatttctgctttcaataaataaggtaaactgtgacccccatttggctccttacatctaattacaacacagaagggaggaggattgagtaactaacaccccaaacaacaaatgcagaaatccaacagcatcctactcacaaagaaagctgttccttttatgacatgtcattaaaaatcaattcataaatttttcttaagacccattaccttgtagcaatgtgtccatttcggattaaccagttgactaactcctttcctacaatgcaattggggtgtgttctcagccagtagcggtgatcctgaaactccattccactactgtgatggcagattttcttccataggtcttttaattgaacactgtcctgaaatcacattacgagcaagcaattacacctgagaaagatactatacacttttcagatttcttcctgtgatttttagactcatgaaaggaaactcaattcagatttctttgtcagagctaacttacatgatttaatacaaataacacatgcatggagaataatttgtactcagctcatctaattccaaacaactttttctcttagggaaaaactatcccaactaattttttttttcagtgaatggcatatattatcagtctcctgattatatgagcagaaaatttcacatccctctttggagacagaacaaataagaagggaacaatcatgttactctaaagtaactgtttctgtagctttcacttcatcagattctcacctatacccagctttcatcagggaattactccctgctcaagacttcaacactgctcagcatctacagtttctaatctaaaacttacaaagactgaattcaccaccttccaccaagtagccccaaataactttccattctcattgcccacagaatcaaacttaacatccctccaaacctctcccaaatcataaactctaattcggtccatggaaaatgccaagcttattctcacctctatacctttccccacactttaaataagattttcttccttcactgcccacccaaatccattcgatccttcaaggtccagtgcaagccttttagtttaaagcctttcctgacttctctactactagtgctcttcctttttttttttaaatagtaaagtattacttcttttactattacagacctgctcattgacctcatttttactttctgaattataaacctgaggagtgaaaccatatcttccatttctttgagtcactcttatgattgaacacagtagtttacaaagataaatttaataaactgattactacctacgtaaacatataatattaaatgtctaaaaagtattccacatgtatgagaaacatatcccaaagtttaagcagcaatctgggatataactcaaagttaagctctagaattatagaggcacctgaattctgatctttatagtggtcaagaaaatattaatgcagcatatgagtatgggctgcttgaccaatttcaggtgagcctaataaaaacttaagcaaactagtttctctatttaagtaatatgctaactggctatttcaatttcatttgcctttaaaaaaaaaaaatcaatgagacgaaacattcttcatgcccaaaacttgcaactggtcaaagatactggactggtaccagaagaattttgcgttcatcctcagtggtctctgtccgaacatacgttcggttagcctggggactgacagacgtctcatatgatggtaccattggagacccagatcgatccagtgacagattagtaatgctggctgatctggaaattgaaaacagaaagtgaaaacacagttgtaaattcttcatcaacagagagaattacagtgaaagttcatttttaaataaatgcttacttgctaatgttaggggcacttttaaaagtagttatgatggttgtgtatgacattattactgagaaagctggaagaagagtatccaggaattctctgcactattatttccaacgtctatgttagtctgtaattatttcaagttaagtttaaaaggaaatcattatgagaggattataagaaaaaattatatttgtagtgcatacagcagtaataccccaaacaaaacaggtacaaactcttcttaaaatgatgaaaactagggtgttttctttttgaactgatgaatataaagcatcagtccaaatgcagctatctctgcattcctacacataccaagaggaatactgtaatttgtcccatcttttaaaacactatcttgactttgcattcctctgctgcattcccctgcttcagtacaacaaaactcatctccaatccttctttcactctctctagaatcctgaacaacccactgaaacttcctataccaatatttattgttcacagtcaagttttcactccttatctgacagagcagcaggataactccctcttctttgaaatactttctttgcttggctactaagacaacctactctgctggcttcctctgacctcatcactcatctctccttcccagtctccttttctggttcctcttcatttccccaatcttggtccttggtccttacttcctcactttccacacttactctcttgatgtcctcacacaggttcatagttttaaatatgattcacatgataataccacccacgtttatatctctgacttgaattcctgtcctgaactctagatgtatacatccaactttttgatatctcagttggatgtctagaggtatctcaaattcaacatgtctaaaactaaactgttcctccttgtcttccccatatcaataaatggcaactctgtcttttcaactgctcaggcaggaacaagcaagaatgccctctcttaacatttattttcagaatcatactgggagcataagctagtgcaataagaaaaggtaataaaggactacagaatggaaaaaaagaattaaaactgtctttcttcacagatgaccatctatgtaaaaatctgaaaagatcaaccaaaagactccccaaattataacaaggttgcaagatgcaagattaatatacaaaagtcagtcactttcctataccagcaatgaacaaatgaaattaaaaattaaaacacactaccatttacatcagcattccccaaaacgaaatacttaagtataaatctaaatatgtataagatctgaaaaaagaaaactacaaaactttgatcaaagatatcaaggaactaagttaatggagaaaaagtcattgttcatggataagaaaactcaatattgtcatgatattagtatttctcaacctgatctatgaatttaatacaatctcagtcaaaatgctagtaagctgttctgtggataatgaaaaactgatcctaaggtttatgtgttgggcaaaaggcccaaaatagccagcgtaatatggaaggaacaaacagaggagtgacacatccagcttacagacagaccataaagctacagcaacaaagacaatgcggtgttagtgaaagaatagcaaatactatcagtgggacaaaatacagagcccagaaacacatccacataacacagtcactaatctctgacgaaggagcaaaggcagtttaatgaggcaaagatagtcatttcaagaaatgctgctagaactggacctccacatgcaaaaaaatattaacctagacacagacctttttagacctagaccattctaaaaaattaactcaaaataaatcacagatctaaatgtaaaatgcaaagccaactcctggacaataacataggagaaaatccagacggccttgggtattgagatgactttttagatacaacactgaagcatcatccatgaaaaaactgacaggctaacttgattaaaattaaaaatgatgagcataaatatgtcttttatgctctgcaaaaaagacaacatcaagaattagacgacaagccacagactgggaaaaaacaccggcaaaaaatttctttgacaaagggcagttatccaaaacatacaaagaactccaaaaactcaacaataagaaaacaactcagttaaaaagcagggcaaagacctagatagacacctcaccaaagaaggtatacagacagcaaggatgggagcatatgaaaacatgttcagcatcacgtgtcataagggaaaagcacattaaaacaatgagtcagcattatacacctatcagaatggtcaaaatccagaatacagatgacatcaaatactggcaacgacagggaccaatgcaactcccattcactgctggtacagctactgtggagagcagtttcttacaaaactcaacatactcttaactgtaggatccagtaatcacacgccttagtatttatccaaatgaatgaaaaatacatccacactaaaacttgcatatacacctttatagaaaccttattcatcgttgccaaaacatggacgcaaccaagatgtccttcagtaggtgagtggatgaataaactgttgtagttccaaacaatggactattctccaatgctaagaaatgagctatcaagccaaaagtaaaacccatggaagaaactaaaatgcatattgccaagtgaaagaaatcaatctgaaaaggctatatactgtatgattccaactatgtaacattctggaaaaggcaaaactatgatgacagtaaaaagatgtgtggttgccatgggttggggggagtaagggatcaataagtagaacacagaggattttttaaaacactgaaactattctgatccctacttcagtggtgaatatatgtcattacatatttgttcaaacccacagaacatacaacaccaagagcaaactatagacttgagtaaaaatgatgtgtcattgtacattcatcaactttaacaacatatcactctagtctcggatgattatttataatgcaggacgttgtggggaggggctatatgggaactctctgcactttccgatcaattctgctgtgaacccacactgctctacaaaatgaagtttatacgctttttttaaagtaaaagatgatgtctgcaacttactctcaaacactccagaaaaaaaaaaaagtaaatgggcaaaatgtaaattagtgaatcttaatgaagaatgtatgaaaacttattcccactctatttcttgcaactcttttgcaagtgtaaaattttctcaaaataaataaaaaattaagatctacaacagcttcccactcactgattaaataccaaaatccttacaatgaacagtaacaggttttcctgctggtacacaggactcccagttactccctgccaggcatgtttcctcttgggaactggctattccgtctgcttagtaaactctctataaaatgtccgcatagtttactcccccatatcctcaagtctttgctcagacatcaccctccctgtgaggtcttcactgagcacagtattcaaaattccaacctcctcccctactccttacgcttttgtatgctttaaacttctgtctgattcactgctgctgcagctgctgatgctaagtcgcatcagtcatgtctgactctgtgcaaccccatagacggcagcccaccaggctcctccgtccctgggattctccaagcaagaatactggagtgggttgctacttccttctgcagtgcatgaaagtgcaaagtgaaagtgaagtcgctcagtcgtgtccaacccttcctgaccacatggactgtagcccaccaggctcctctgtccatgggattctccaggcaagagtactggagtgggttgccattgccccctccagacataaacccgttcctgcattatcccatatttacagacttcaaccttaccccaggccaagtatctcataaacctaaactcccagacattaataaagtgtacaaagctaactgaggacagtagcctgtacagagtaggcactctgatttggatgaagcaatgcaaactcattcttactagaaagacaactagaatcacattagcaaatgaggtgcaccttttgagggacagcacattaataactgtatttacagctgtactacaaacacctactttgcaggcacttattaagtacttgctgaaagaataaactgaacgtatgttaaaccatggtgagtcagacgcctattcctttgggtttacaacaacttactcaccaattaactttgtaataattcaaagtattttcagggggaggtgtggatgttagtaaaattctagcaggttgaaaaggaaatgagcagttacagaacaattataagcaactatttcaaggaatttggctaagaaaatatattgagaatatagaaaactataggcaaaacacaaaggaagggggtttgtttctttttaataggtaagacctgagtttgtttaaatgcatatggtaaggagtcagcggagagaagtggaagataaggaacattaatagggtgactaataggaatgatctcttttcgtttccaaggcaaacgattcaatatcacgataatccaactctatgcccctaccactaacgctaaagaagctaaagctgaacatttctatgaagacctacaagaccttgtagaactaacacccaaaaaagatgtccttttcattaaagggggctggaatgcaaaattaggaagtcaacaaacacctggagtaacaggcaaatttggccttggagtacagaatgaagcagggcaaaggctaatagagttttgccaagagaacacactggtcataacaaacactctcttccaacaacacaagagaagactcttcacatggacatcaccagatgatcaacaccaaaattatattaattatattctttgcagccaaaggagaagctctatacagtcagcaaaaacaagaccaggagctgactctggctcaaatcatgaactccttattgccaaattcagactgaaattgaagaaagtagaaaaaaccactagaccattcagatatgacctaaatcaaaccccttatgatcatacagtggaagtgagaaacagatttaagggactagatctgatagagtatctgatgaactatggatggaggtttgtcacactgcacaggagacaggaatcaagaccatccccaagaaaaagaaatgcaaaaaagcaaaaaggctgtctgaggaggccttacaaatagctgtgaaaagaagagaagcgaaaagcaaacgagaaaaggaaagatatacccatttgaatgcagagttccaaagaatagcaaggaaagataagaaagccttcctcagagatcagtgcaaagaaatagaggaaaccaatagaatgggaaagactaaagatctcttcaagaaaatcagagatacgaagggaacatttcatgcaaagatgggctcgataaaggacagaaatggtctggacctaacagaagcagaagatattaagaagaggtggcaagaatacacagaagaaatatacaaaaaagatcttcacaacccagataatcacgatggtgtgatcactcacctagagccagacatcctggaatgcgaagtcaagtgggccttaggaagcatcactatgaacaaagctaggggaggtgatggaattccagttgagctatttcaaatcctgaaagatgatgctgtgaaagtgctgcactcaatatgacagcaaatttggaaaactcagcagtggccacaggactggaaaaggtcagttttcattccaatcccaaagaaaggcaatgccaaagaatgctcaaactactgcacaattgcacgcatctcacatgctagtaaagtaatgctcaaaattctccaagccaggcttcagcattacatgaaccatgaacttccagatgttcaagctggttttagagaaggcagaagaaccagagatcaaattgcctacatccactggaacactgaaaaagcaggggagttccagaaaaacatctatttctgctctattgactatgccaaagcctttgactgtgtagagcacaataaactggaaaattctgaaagcgatgggaataccagaccacctgacctgcctcttgagaaacctgtatgcaggtcagctggaactggacatggaacaacagactggttccaaataggaaaaggagtatgtcaaggctgtatattgtcaccctgcttatttaacttatatgcagagtacatcatgagaaacactgggctggaggaagcacaagctggaatcaagattgctgggagaaatctcaataacctcagatatgcagataacaccactcttatggcagaaagtgaagaggaactaaagagcctcttgatgaaattcaaagaggagagtgaaaacgttggcttaaagctcaacattcagaaaacgaagatcatggcatctggtcccatcacttcatgggaaatagatggggaaacagtggaaacagtgtcagactttattttctggggctccaaaatcactgcagatggtgattgcagccatgaaattaaaagacgcttactccttggaaggaaagttatgaccaacctagtcagcatattaaaaagcagagacattactttgccaacaaaggtccatctagtcaaggctatagtttttcctgtggtcgtgtatggatgtgagagttggactgtgaggaaagctgagcaccgaagaactgatgcttctgaactgtggtgttggagaagactcttgagagtcccttggactgcaaggagatccaagcagtccattctgaaggagatcagccctgggatttctttggaaggaatgatgctaaagctgaaactccagtactttggccacctcatgcaaagagttgactcattggaaaagactttgatgctgggagggattgggggcaggagaaggggacaacagaggatgagatggctggacggcatcaccgactcgatggacatgggtttgggtggactctgggagttggtgatagacagggaggcctggcatgctgcagttcatggggtcgcaaagaatccgacatgactgagcgactgaactgaattgaataaggaagaataagggatgacaagcagaatacaaatggagaagcaaggtgaagaggaaagaatgagctccaaacgtaatcaagttggtaactgatgctaagagttgagtcgtccacttttgtcatctcccctttttgctctgtagctgcaagtgaagtcatttcctaataagtcagaagaaagtagggttgaagacagcagaaaagagtagaaaagggccactgtgagaacgcaagtgacagctgactagctaaaaggaaacaaaagtttaattcggctcttagagctaagaaaatgcacacaagtcaatcctatccattttgtgtttgttcttctcaatactgtaaaaaagaaaaaacagacataacaggcacagaacacagcgttttcatttggcagttcacctatttcgagcaggagatttcccagcatcctcttgaacagatacaagtcttgttgaaagagcagtgtttgaggagtctggatgaattaaactagaaagaaaataggaatatactgagatgatttgagagtcataggcaaatccaatttcaacagagtgctataacatttaaaagcaggttgttttctgcaataatgagcttatgggtcattcttattttcttctttcagttgaggtagaaataggataaattttgtcttcggtataacaacaccaaaagaccaacagaggaagtttgttaaatgagggtgtatgtgtgagaagtgtgtgtgtgtgtgtgtgtgtgtgtgcgcgtgtgtgcgtgctcagtcatgtctgactctttgagaccctacagactacagcccaccaggctcttctgtccatgaaattttccaggcaagaatactggagtgggttgccatttcctacttccgagaatcttcccaatccaggagtcaaacgtgcgtctcttgcatctcctggattacaggtggattcttttatcaccacaccaccttggaagcctagaatctttgcaaccccctgggctgtagcccaccaggctcctctgtccatggaatttcccaggcaagaatactggagtgggttgtcatttcctcttaaaggggattttcccagcccaaggatcaaagccacatttcctgcatctcctgcattgcaagcagatgtattctttgccactgagccacagggaagccctagttattatgtataacaggtggcaataaaacaataaaattggctgaatgagcgacttatagaactcttcacatcacatatacaaaacagaagtgctttggggtagaaatcctgagttcaaatattttattcttagtccccataactaagtggaatagaactgcagatacgtaagtgactgtacctttgccaggcaaaatcatcctctaaaaatatgttgcggctggcttttctactccccacaggtgtacggggttcactcggatcaagtacagacacagaggaagcagagtctgaaagagcattcaagtcttcaccaatggaattactatctgtggaatgagcataacttaaggctatttttctacagtatgtacaggctcggaggtcccctaggaggaaaaaaaaaaaagaagaagaaaacttactaaacgataactaacatatctacctaccagaactattaaacccttggcttaatagttaatctaataacagggaaccatcttcaagtaaagactaccaaacaagaccttttttcaaaagtgaagtaactttgttagttctgttatatattttaaaaccaaagggggtgggagggaggtttaagagggagggaatatatgtctacatataactgattcacttcactgtacagtaggaactaatataacattctaaaacaactgtactccaattaaaaaatgaaagaaaagcaacaagaagagcaaatatgtgcgtaaataagcatttaccatataaaataatgaaaaaatttttaaataaaaaccaaaattatgataaatccatccagctacccaaattactgcaaatatttataacaacttaagaaaatatgattcaatgtactagaaaactctgctaaaagagtatttctcaaggttctagaagtgaagtaaggcaatctatcaaagacaggagtttcaggggaaaaatttttagttgaatacataaaccaacacaaatagaaggaacactttttacctcggtaacaaggaaggaggaaaatgttatttagttctttatgtgaagtcataaagattgacctccacaagggggcacagtttcaaaaactgtttaaaaacaaacaaaactggcttacaaacaataagaaatatgggtggaggaactataaaggaaattctcgtggtaaaagttaggatggaaatgaaatattcttgggaagacaataaggttatttaataattttaagtgttttttttttttcctggaagcagtcctacccaaatataagtttcatttctaccctgttcgtctgtaacaattttttgtgtgatttgataacattttagcatactaaaaaaaggaggtaagataattaaactttactaataacatgttacatagcaattctaccttctttttaccattaacactagacaactgaagtgacatggaacaaaagacttctagaagtcaactatactgggtttttaccataattactacgaagggcaatatatggtcttattttttattttaagacaactattttatagtactccattttattaaattatgcatgtattttaagcaaaattaaatatcacttgttgggttactcatttctaacacaactcagacgaatctaaagaaaaatgtctccaatcatgaaccaccaccaaccccaaacctcttccccccaccaaaaaaagctgaactctagcccaggataaatgagagtggaggacataccaccactagctgaccaaggttgcatttcagaaaagagataaaattacttcctgcagaaaagtatttaagttgccacaacaaaggcttggttcttacactgtaaagaaaatctcccttaatcagtcagctattacaatgaaaatgatcaggtaaattaagggagccaagcttgatcagaaaagttttcatttcatggagaatcctcaccagcaagggcctatagagcagtaaaaaaaaaaaaaaaaaaaaaaaaaattacatgaggtggtgaaaaggctgacaagacacagcccttcagttcattggagacaagacacatacaattcaaaagttgtaaggcggacacaaagacaacactgctactaccattaacaataataacatccactggtctgtttctaggtgcctaagcattctaggtattcagggtcacaatatatgtttgtgttcagaatctatcatcccaaccgcaatggtcaactttatgtgtcaacttgccaagactgatgagtcagtccaacaatagtccagttgctgctgtgaagttttttttaagatgtgattcacatttacaatctgtgactttaagtagattaccctccataatgtggatgcatctcctccaataacttgaaggcctgcagaatgctctaaaggaagggatccaaaggcttagagagtctgctaagagcagatttaccaggtaagatctgctcacttcccccaggaggacccagggcacatacctttcaccatgactatgagaaaaaaagatctgtgaggggagcaccagcatcccctgtagagttttgtagtcacctttctctgtaggaattatcatggaactgttggtgctgaactggaaaacctaaatgcactgggaccactggatgccaggttggcagaggcagagtgggggcatttaatctcaaaagacaaggttagcatgaacggacatcagagtcaaagcggtaaccagaatagtataacacatatagagatctgtgacacctctgaccgtggtgttcctaaagcaaatgggcagtcttctaaatccttactgggtttgtataagaaaaagcattctagatcgagacaacaaaagtctatcttgaatcaaaatgagtcatgacccctcaacaaattctcaggcccagagttctctgaatggacgctgggtcaccttgaggcaggaatccactacactgccaaaaaatatatactgttaatcttcctacgaggtctcctctgaggaccaatagccttttaccagagtgaccgtgcattgagaaaaaggtaagagtcaaacttctcggggattactggactttggctctgaactaacactaataccaagaacccaaaacattactatgatttcaagtcagcaggggctaacagacgtcatgatcaatagaatttcagctcaggtccatcttacagtgggttcaacaggtccgcaaagccagtagtagttatatctcagttctaaaatatgtaactggaatagacattctcagcaaatggcaaaacccctacatttgttccctgacctgtggagtaagggcaattatggtagttctggcctccagacaacaaatttctgtttattctaagccactcagtttgtggtattttgttaagagagccctaggcaactgaggtaccaaccacattaaaaagacaagattttacccaaagagtaatgggagctctgaaagggtattaggcaggggaaacaccctgacatgatcaaactagcatttaacaggacactgacttgagtaagaaaaaacaatctgaggtagggaaaaattaaaggtaaaaaaaactttaaaaggctgtagccataatttggatgaaagataactggggtctgaactctgaagcagtttaggtttaaaaagaaattttcagtgaataaggccacaagaaagatttacatgataataaaaataacatgagagagatactgagaatgttctctttttggtaacttctgcacaccttccactccctaatcactacacacaccattgcttagttttcttctgcttcaataaataattttaaatttctatattactaaagttcaggaaagaatatgagtaaatgtaatttgctagagcacagtgttaaggaatatatatctgtatatagtttgtatatataaaatacaaaatttatattttgtaaaataaaaactctcacagtaacataaaccactctaaccatcactctaaccatcctgcttaataaacattaatggtgctgtggattttccactaccgtctatgatacactgtcttttactcttgttatttatgaacatctccatctactttattacttgactacaaagtcctttaaagcaaagtcgtgtctccctcatgtttgttctccccatgtctcatacataaagtccaaaataaaaaatgacttaacatgagtcccctattgcaactattttattgctatgacctttaaaaactgtagaatcgttaataaagctcatttacctgtataacccataaattttccagggatttcttgattgcagcaacgactgcagaaaatctgcccacacagtcggcagtggtgtctacgcctaaaagtggtaaatttctcattacagtcatagcactctttacactggctatctggcatccagtattgcttcaggtcactatcctgcaacaataaaaatgtgtgaaggtgtcttgaaaatactgatttatcaaaatgcaaaggcaaatacaatgctagtcaaaatcctagaaaatttcttttgcagctatttcttctttaacaagctatttgtaaaatttcttctttaacaagctatttgtaaaattcacatgagaatgcaaaagttcaagagaaccaaccaaggcaatcttaaagaagaataagctgaaagacttataatgcctgtcaagatttattctaaacctacagtaattttagatatagtgtaaggaaaaatggagctgtggaagaaagaaaagagccctggcacaccctcatacatatatgtatacttatgacaaggtctgtaatgcaatcagtgaaggatggtctttaaaaaaagaaaatggtactgggtccaactggacatcaacagggaaaaaaatgaatcttaatccatataccttcatatcaataataaagcttctcgaagaaaccatggaagatagtctcccatggttcattttttactgtccctgggttagaaaaacactttttaaatagagcacagaaagtacaacccataaaaagaaaaagttttgataaattaaaataaggaacttatgagtaaaaatctgctgtccacagttggagtaagcattaactgaactttctttcaagtggcattgtaccattttcagtgagcactgcaggatccccatataagtgcttagtaagtaatcttctaaagaatctagacaatacctggctcttcccctccatgatttccttgaggcgttttaatactgtgctgaggcttcggagttggacagctgtgcgagggtcatgacctccaaaagtaggttctgccttccttctggtgtctgagttaggattacaaaacaaaaaactactttaatagtatcaatgcaaagtgcttcttacttttagcatacacttacattcgccagccagtgacatagactgagagttaaaattagtctttataagggtaagaggctgttgaaagtgtaaacactgcttcacaagcaaatgaggaccgagacagcaccgtttgagaccactgatgattttgaggcctggatgggagcatcacttaacatggcacaaaactcagtgatttcttgggcccttcagtcccaagtcagaataaatttccgctaggaatttagcagaaggaaaagcaatgccagtgagttatcctagcctagtctccacagtcgtcaggtcagcaacagggctgaacagttcggctactcctacagatcacaaaaccaaaggcttgtgttacagatcattaggaaagaatttaatagccaatctcagagtctgacagacttcagaacacccaggatggtaatttatgcacagacttcccttcaccaatgttcaagaagagttctttttaccaaagaactgctagagctccagccctacccttccctgccacctcccctcccctatagctccaagcaagaaggaatcacttgctcttgaaacagcaatactgaagccagtcctgtcaataaaaaaacaggcctacattccagttttgtggccagaatgggctatgcccaccaaagctgtcatgttatttccttgttttagagcaagattacaactaaggtttctacctatccctggctccagcagtttttaaacctaaggatgaagcagagttgacctgacaagatggatgaacactgctattagcttaatctcattaacctcataacctatggcaaggccctctctaaatccttcccaaactcactatttgctacatttgctttagatgttctttgttttggatgagtggcaaagaaaagactacaaacaaatgagaagttaatatttaaatctaaactgatgaagaacttccatcgatattaattatagtgaagtgaagttgctcagtcgtgtccaactctttgcgaccccatggacacgaggctcctccatccatgggattttctaggcaagagtgctggagtgggttgccgtttccttctccatatattaattatggaaatatattatttatggaaatatattatttaaatggcacttacgttacaaaactgaaaactttatctttctataaataataccttaatctcagcaaatacgttattactacaataaaaatgtacatgtattagaatgacaaaactgttcttgagtctttgtgataaaccaactctccatgacttataactgcaaaaggagagacagatgaagctgtcagaacagtaaagctgtggtcccatgcacgggaaataattaactgcaaagccccttgcatatagccacttaggagtataagagaatacaaagagcatcatccaaggaaaaaccaggagcaaggctattcccagaaacaacagatgatggcttcaacgtggatgaggatgaaagaaaaaggagagaaaatctggttcagcactctgccctcaatcatctcagctacttctcttgtaaaatgaatattcttaatagaaaatcaaatgacttcccagggtcacagagctggtaaattgtggaatcacagtattttaataggaaaaggaactagactggtcaaacagtcccaggctcatcaaactcaaatgcctcaagcagctaaggaagaatcaaagaatcaagtggaatgagaaaagactgtaaggaatgcagcaaactggacattacaagttctacctagcagtatttaaatgcaagcttatcaaaataacaagacaaagtttggtaagctgtcagtttgtaacccctaaaagactagattctagtctaactcctcaatttcataaacgaagaaatcctatgcttaattcaatataggatataattaagagtacccttaacaaaaacaggagtgacactctggaccaggttcaagagctaaggagtttccttccatccatctggagtaaggaacttacttctccctctcccccttccttccttctgattcttcctaccaaacagctgacataacccaggctagggccctctgccctgggaaacctgcagaggtgatgcaggcagctctgctccagtcctctgggaaaagctctccttctgctcagcttcaccgcctcctctgacctactggtagcaggttctgagacaagtcccaactagccattaataaaatatgcttctgccgaccaccattacctgtgcctgcctacttgtcattcgaagaccctgggggggagactggccagacaacacaagagctgacgtttgcagacacctgattttcaatgctgtacccctttccctctcttatgccacctctcattgcccttcccctaccaccttgagtcaggcaaaccactgcactgagttgaataatctaacagaaataaaacatacaacaactcactttagctagtgtcttgatgcaggcactgatcccaggctgtactcaacagaagagcatgaaaatgaaggagatgacggtatagcagaacaggatgagaacaaacacgggagaggagctcagtttatctagccacactgacagtttgcaccccaacaaggacagaaagccaagagcaagtggcagcccactgatggaaacgagaggcttctgcaaccagcggcatgcacgtcacattacactggccaccccaaaaacagatgtggcagtcacaaggttcagactaacctgagttctcctgggggtgttgcaaactgtcctctgctggaacccaagcaagtaaataatcaaaaaaaaaaaaaaaaaaaccagtcaagagatccctgccttgcccaaattaaagttcagtgaaatcagatctctgccttgcccaaattaaagttcagtgaaatgtttaagaactcttgtttgctaggtcacttcagtcatgtccaactctttgcaaccctatggactgtagcccaccaggattctctggagatccctctgttgctgggattctccaggcaagaatactgcagtgagttgccttgtcctcctccaagggatcttcccaacccagggatctaccccatatttcttatgtctcctacactggtaggcaggttctttaccactagcaccacttggaaagcccaaattaaagtttaatgaaatgttttaagaacttctgtttaggtatcaacaaattatttcactatccaggtaagtttcattaattctcaagagtacctgactattccaaatagcaaaaaagttaagtcaataaacaacctgggaaacacaatgactgggaaaagtctaatactcagagaggaatgaaatgcgaacagtatcatacctaacactgaagatcgacgctggaactcctcattaagccgctttttataaggtgtaggtgatctcacagattgtgtccttgaagggagctgagggctggtccaacttccactcagaggcggtggctctccctggcccccttctcctctctctgtagcaaaggaaaacttggaattattgcaaaaactaagacgcaagagctcagcaaagaaaaggaaatagatgagatttttcagggaagaatgtatacttgtatcacatactaagtaaaagggttagaaaaaaaattcaaaacaggtggcaaaattacaggccaataattacatccttggtatatgtgaccttcggtgtgttttacttttcactagaaatttcttgagcatgttaatggaaatagactgcaagctccacatgaaggctgggatcttttgttattctatttcatttatgggatagattccctggtggctcagacagtaaagcgtctgcctgcaatgcaagagaccggggttcgatccctgagtcaggaagatcccctggagaaggaaatggcaacccactccagtatccttgcctggaaaatcccatggatggaggagcctggtgggctacagtccatggggtcgcacagagtcagacaagactgagtgacttcacttcactctccttgactattaacagtgcccagtggacagcaggtgctcaataaacatttgcttaataaaaagactactgtaaatgtaatgtatcctagacaggatcctggaacacaaaaaggacattaggtagaaactggagaagtatgaataaaatacatattttagttagtaatattttgtcaataatggctcactgattataataaacgtactctaccaatgtaagatgttagtaacagggaaaacaaggtgtagggatatatgagaacgtcctgtattgttttcctaatttttacagaaattcagaattattgaaaataagactgttgaggtttctttaaaaaaaaaagaaacagattactgttttcaaaatgatgggactaatgggagattttacagagctttaaacatgcctgctaataaaagtcagttaacactattaaaatttccactgagttaaactattatcccataaatccctttcaacgagagggattactttccaacacatttcaaacaatattgtcaaatataaagcaaaagatgtagaccatgttttttaactcttctaatgagtaaaaaacatattacttaaaaaaagctcattttaaaaacatattttcatttgatatcattaaatgtattaaacaaattaataagaagcctgctgacagcttttaatttttgaaaaatatgaacccttcctcccatgtgctcattttttagtttcactgctttcatcaaaatcttttggctattaacctctaaaagagcaaagtccatcctatggacttaagaatacagatatattaacaaaggaaaaaaaaaatgatgatgctaactttaacctcattttaacatttagttttcaattccaactttccattccaataattactaagattaaagagaaaattctagctttttttcttatgcaattaaacccaaggacctatgatgaaggctatttcctagttaatattcactttcttgtaaagacacagcataacaagagaatttcagagaatcaagatggcaggatgtctgatctttaacaggtcttacctttgttaaatcgaaagagattgacaaaagaactatacgctgatttaaaaggaggctcgtcctgatcaggagtcagaggcttaaagtgtgtgagatgagagggactggtaggagaccgaggcaagtcattagcagagtccagtgttggggaagtcttatcatctgtggccatttcatgagtctaataaacaaaaggagtaagcagaagtaagttcctcaggaagcccaaacagcacccaaacgtatagaaatcagacttcaaaacctcacacctaagaaaaccagagtacttaagtctacttcagcatacgttccaaatcaatactggaaaacactgcagtctagatgataaggaagagtttcaattatttaaaactaggaacgtttacagtcaatctcattttcaaaattaatatatatttttaggtatttgtatttatgtatatgtatttgtagtttcaaataaaaaaaaaaaacaccccaaagtattaaaaatttgaaagcaaggaaaaaatgtgaacaggcaaaaaggaaaaaaagatttttcactttatttatatgtttttcattctaagattttttttcttgaaaaagaaacagctctttaaagttggggtgggtggtaaacttgttttacaaaagcatacaaattcttcaaagttttattttact

SEQ ID NO: 189 - DNA, 9066 bp, Hippotragus leucophaeus
  source 1..9066: mol_type = genomic DNA
gctcgtgggcccaccccctcgctcctccaatttctttggcttcttgtgctgatggggacatctcagcctccaagccagctgtgaacctccttgtccctggactgtcctccccaggctctgtaaattgctgccacaccctcctgctagctcaggggggtgttccttcaccctcacagtatttattatcctgcaccacctccactactccccatgcatatgtacacgcacacacacacacacacacacatcacaaataatacattgaaagtgcctcatctgaataaaatgaacttttttccccactgggatagctataagtggtatacctccttcctttatctctccactccttaagttacatagattcttccagaaacaaggaaataacagcatcaagttctgagtctttatttcaggcaatggtagtctctgagggaagaccagagaaaagacaggccttgctctccacgtgggtaaatcatgacatcacataaaagcactcagacctgctgcccactgaggaggggtttgctctcaccaatggggcaagagcggaagacccagggcagacgtagccactgggttctaccgtgtggcagctggggaagggggactgctgagccttgcttcataagtcttcgcctgatattgggagaaaaacagggatactggttagtggtggtcaatggcaacctctttgtgcttctccaaaaaaaaagactaaaccttaacccaggttgacttggccttgatcctggctccctcctcttctcatcaacagggtttatcctctcttatgtttatggtaagctctgaccatttccctctcaccctacaaacttccctgctttgaggacctcagccctccaggcctagggatttgcctttctggcaggtggagaactcagttcaccagcctcctccactattgatattattcataacaacagtcattgagatcatcatttattccacttttgtttcagaaccaggtgttttactcacattgtctagagccctgaaaacagccccacaggacaggtattacgtttcctacttttcagaggctcagaagggttaatcgacttccccagggtcccaccagcaagactgcagcctagacctgttgaacttctaagtctgggctctttcctggactctacagtttcccaaaggggttagtggtttcttcccatgaggaagagtggtggtggtaataaggggtaagggagtgggagcaggatggcggggatctcacctgtatatcagagatgcaagcaacaaagctgtcagcaccagcaagatgcccacgaacagaggagcctgcctgaggcctgcttcttgccctatgggtggaatcccagatacggctacattcagtgtctgcttcctctagtaggtaacctctaccatctccccgtgtcttcatcctaccaactacctaccaggcatgacaagctgggtgctgaccatcgccaggctattggcatcagccaaagacacattgaggcagtaggtccctgagccacccttcagtacctggtgcaaaaccagctggcaggctgggctggggggcacaggctgacacagccgctgggcaggcggctgacaccctggcgatgaaatgtccatgcaggcttccttgggtagcctggggggagatgtcagcttacgtcagggaatctgggaaaggacactagacaccagagaacaggcaggggtcaccccaggagttctcagagcaaccgtgggacactcacccgccttggcaagacacagtcagctcaaatgcatctccttcgctggatgacacagcctgtaggatctcagcactctcaataccctctgcaaagttgcaagattttaagtctgagactcctctacttatcctcccccaaggcccatggccaggaaagtcctcgggctgcctccccaatcccattctcctgccttcatatgaaacccctgggatttgggtattctccttgtccaggtgagtaattccttccaaggtgcgcttccactgggcaaccctaagcagcacatgcctccctccaccagctcacagacatgtaggcaagactcacggacaatgtccagggtgagagaaaaggagccatagcgatacagaacacagtccaggggggcttggcgcttcaccaggactaaggtgtcatctggcagggggctcagggagcctggcaggagaggattaaagaggcaaagtcaagaagcaaatgactaacctgaaaacaaaggcccaacaggcatttttccaggtagagtcagagctactggatctaggcttagaatcagacaagagctaagaactctcatttttttggataaagaaacagacccaagagaaatgactgccccagagtcacagttagggttagagtcggaattttagaaatcccaaatgtttatcacaccgtatactgttccaggtcctgggtcagacatctgacgtgttaagtcattatagtgtcactatctcactcctccctttttagtgttccaaccacaattccaggtaaacctactttgagatgggaatccaggggtgggaagtggtgtcagaaagatttctgtgcgtttacacttaatcagaaaatgaggtataagtattatctaatgatcacatggggctttctaggtggctcaggggtaaccaatgcgggtttaatccctgggcagggaaaatccccgggagaagggaatggccacccactccagtattcttgcctggagaattccatggacagaggagcctggtgggccacagtccatgaggtcgcaaagagtcagacacgactgagcactgccaccaaatgaccacagactgctccctgaacttctcttcagggagggagaagcaataagccctctctccatggcctaggagaaggccttgggttcctgaactctggatctattctgtgccattaagagggacttagggggttttaaaaccagtgaagattctgagcaaactccattgctaagctaaggattgggtaccatctgggtcctgagcaattctttcaggtcttcagagcagtgacaaatgccccacctctatgaactcattcgtggtggccctcttacctgcagtaccttctgtaggcatgaatgggctggtatttgaacccgcaggctcaggagtggacacctctccagctgtggtctccaccagctctggagttgttccccgtgtaaccgtggctccagagggctctgtagttgacacttcaggtgtcctacctgtagcctttgcagttggcttctccgctggtgtggtacttaagactttggaggttgccacctgctcaggtgtggtacctataccctctgtggttggcacccacccaactgtggtgccaggggcctctgcagttggcacctggccaggtgtggtgcctatgacttctgtagtaggcacttggccagctgtgcttccaggggcctctgcagttgtcacatggctatctgtggtgcctggaactggagaggagccacaggaggtgagaggaatggcagcctgcagcaccacctgtgcagtgactgggccagactctaggtaagtgtgagtggccatgagtgcccgagagatcagggtccctgtactgtcaccaaagtcccaggtgtaggaaaggtcagccccagccaaatagccactgggatcatggagctggagggcaaaggtcagaggctgctttctcaggaagcgcttgttccttccatccaaggcctgcagctgagacacactcacggagaagggcacctggtctgggattggagtcagagaaagtcagaaccataagttcttctttctttcagcttcttctttcacagctatatttttcaaccaacccaagctgcctggcccttcacgggctccaagccccacatccctctgcccacatcttcctggttctgcccctgcaaggttacacaccaattcctcgttcccctatcctgtccagcccagcctccccaccttctcctgccctgcagctggccttgtcctctcctcagtccttaccagtaatggtgaaggttgaactggagtgagcgaggggcacgtagctctgggacccccggcggtggtagacagtcacttccatcttatgtgtgcccagcacggccttgtctgtcccaatgctcaatccagacactgggccccccagaacttgccagtactggtctgaggtttttggaaagaagagtaggaaagggggttactggtcaaaggagactggggcagggttagagacggaaccagagaaggaaggtcaggagatgtatcaagaatagttatttcagagagtgtaagcttgaatatgttgggcaggaaaggagtccttatgagagggtccatgggatgggactgtaattggagcagggctcccagaaagaagtataatagaattgactaggtgctgtggaagaggaaggagtcatgggggaagtgaagattagggaaactcacaaaatttagggatgagaccaaaagaaaggtaggaaggagtgaatttaagtgtgaatgacaggccagagaagggagactcttaccccaggtcttccagacataaacaaagcatcttttctgagataaagggccagaagggcaggcccccccatcggggaagatgcaggtatcatcaggttcttggggatataccagctgtcctccccacacctggctccctgaaaagaagacaccaagtctccctcaatccctggcattccttactgtacaccaaaacctttaacatgactcccagagaggggctccaggaatactgcctagctaccaatatacattctccttggtataacctacttggagtggtagaaaggagaatggaaactataaaagattcctgtgtgtatacttaaggggtttcccaggtggctcagtggtaaagaatacacctgccgatgcaggaaacacaggagatgaggattcaatccctgtgttgaaagatcctctggaggaagaagcggcaacctgctccagtattcttgcctgggcaatcccatgggcagaggagctttcacggctacagtccataggggtcggaaagagtcagacacgactgaaccactgagcacacacatgtatattcttacactggagacaaattggtaggccatgtatcaaaatgtctaggatgatgtgctctagctagtgggataaaagtaaaaataacaacatcaactaatactgtaggctaggacctgggtttgatccctaagttgggaagatcccctggaggaatgcatggcaacccactccagtattcttgcctgaagaatccacatggacagaggagtctggtgggctacagtccatggggttgcaaagcgtctaaactaagcctaagcacagcatagggcaggctttatgctaaaatctgtatatattatcacactttaattcttacaacaaccttttaaagtgttatcatccccattctatagataagggaatggaagcacaaaacaattcagtgacttgtccagggtcacatactcgtaaccagtttaaatccaagtttatccaacttctatgtccactgggtcttctgtgccccatttggggaactataattgtttttctttttgctttatctgtgttttctaatttttctgcagtgaatatgtgttacatatataatttgtaaaaaaaaaaaaaacaggaagaagaggacaagaagaaggattccttgagttcattggagataccggggataccagggattctgaaccttgggaaggaggtggagaggtactcaccattgatgatggtggtgttggcccagacgacctgcccatctggcagcaccttttggtttttaggaaagtgtaaggcaatagagaaggaggcatttgccccaatcagtgtaggcccatcattgctgaccttcagggatacgtggccacctgaaaagggcagctgcattagctccttggcttctcctccccgtatgccttttcctgccctatcttcccaagtacattcaaccctgttcccttcctcaccccatttccaccatatcctccctggaaattgccaacttcctacctctccagcagtcaggcccctggctttctgtccactctggatacagctgtctgttccatgctttaattctgagctgccttgagacaccaagccagtccctgtctctgggtcctaaaaaggaagatatactatgagggccctcaaatcattactcactcctttctcaggggacaacactgtctgtgacacatcattcattctcacattcaaagtgcattaaaaaaatatatttatttaactgcactaggacttagttgcagcatgagggatctgcgattaactgtggcatatggggtcaggtagttgtggcatgcaaactcttagttgtgacctgtgggatctagttccctgacctgagattgaaccctggtcccctgcattgggagcacagagccttagccacttgatggacaacaaaggaagtcccttaaagtgcattttaatctactgaatacccaccacgtaccaggcactgggctaggtgcaaagaacttaagaaatgaaaaagaggggggaaaaaaaagaaagaaatgaaaaagaaatggttcttaaggggttcaggttaaagtatatgaaacagacatatacataaattgctataatccaaggcattgcttaatatgagccataatagacatgcacaatgtataacaaaattatagattttaaacaggtaaattgcactctagtcgactggggaacactcagtaaatagttggcctggggcataaagcattctaggcagaaggcccagcatgagcaggtgcatggaagtatggaagcacatggcatgataggagaccactagcaatgtggctgatgtacatcgtgagagatgaagccaaggagatggagtgggggctttgagtgccaggcaaatagtgtggactttatcctgtaggcaagggcacctcagatgattttgtttgttgtattgatatatggcacataccataatatttacccttcaaaagctttttgaatatgatcagatttgtgttttagaaggatcaccttggcaagcagtgaggaggatggactagaagcaagtagaaattgggagtggggacaaacaaaatgattataactgaccaagaaagaggtctgaaaaaaagtgacatgatggctctgcatgtgcctccccaaggtccaacagctatcagcattttgtcacatttgctttatctatcctttatttttgttgtttgtttgttttttggctgaagcattcaaaagcaaatcccagacatcatgttattttaaaaccctacaaattcagtaggtttctgtaaaaaaaaaaaaaaaaaaagaatattttcttaaataaacacaatgttaattcacactagacaaaattatcaaactcagtccatgcaaaatttcatgaaatatataaaaatattttcttatgatttaaaaaatctggatccaaaaagtaagcacaatagtttaagagccttgggtggacacacatgaacagaatacttccagaatacaataatgaacatagtaaaagaaaaagacttgaaaccacaccgtgaatgagggaagtcagatcaaggagaagttccaagaagtctgtgagaccagggatctagagaaagggggcaccagggtacaatgtagatattgctgcacatcacagactgtcctcactccatctctaacatgtagccagaaacctggttgattctcctgggggacgatctagaatcatcccgctgaatatcttaccacaagaacaagagaatcgtaagatgccccattctttctccactcccaatcctccctcctcagagcagcacgggacattccagaccctctcaccacccccacccccaccccttgctcctgtcacgaggccccaatccccagagccctttcatgtgatgctcagctgagacccctctgcctgtctcttccagccccagaacaaaagcctgggctgtgttcacccatgcccatcccaaaaaggggatgaggtgcctctttacccttctatccaaataccacattctctttctcctcactttaaataccctatcccaagtgcttaagacgaagcctaaatgagtttccactcattttactaccttggcacccatgttccagctcactattcagagcatctcaaaattagggccacagagacatactgttctctcacccgtccaggtagatggggttgttttcaggttcagtcccaagtgcctgaatacatatgcacccaaatcttcatgtggggagggagctcagttgcccatgtcctcactaaatcaaatgggtgagaaacacctgaagcattgctgctatcttccattttagggagagaaaaaccagagcaggtgtgtaaccctaaattcacacttgttcatgtccacacatcccacactcaccttctgtggcccctacagccagaagaacacccatcagagccacatggagaaggtattttctcagcaccagatccatcctgttcttccttccagcaaccaaagactggggcattggacaagcccctgtataagaagggggtgctcatttgcatagcccttcctcccctccctccaggcaaatcctgggaggagcagaaggacctgagagacagaactgaggagggatcctggtccctggacatcatgctactcattgacggtttctggcttcaaagggtcagtctcatcttaaagcactccatctcccctcgcggggaaaaaaatgactgaagggcagctacaaaacgtaacacgtacctgacacacaaggttcatcttcggagagtggatcaatctattgtgagtcaaaccaggaacctctcaaaataattgtagaagcagtgaccctggatccaaaaacagacagtattggggtaggctgagagaagcgggacaacgactcttcggagccccaggaaacccttacaatgagatttccagtttcctgctttcagaggaggctccagggcgaggtgg

SEQ ID NO: 190 - DNA, 76625 bp, Hippotragus leucophaeus
  source 1..76625: mol_type = genomic DNA
tggtaacccactctagggttcctgcctggagaatcccagggacggcagagcctggtgggctgccgtctgtggggtcgcacaaagtcggacacgactgaagcgacctagcagcagcagcagcagcagcagcagcagtagcagtgagaacctgcgcgcctgaagcttcccacctctgcctcacagccacaggtccaagcggcccacagaaagccgtcggcactgagagagggaagccgctagggggcagcagaggctcgcagatatctcgctacaggcgctagtctttcaagtatttttttttttttaattttaacgaattgctctaatacttggaaatttaaataagagagattttgtaatctgaactcgactgttcaagagcagagaccctgttcactaccccacttaactaccctttctgacggcccaccccccacctcgccccagtcatccagtcattctcaagtatcccagagctttccctcactccaggaacaccaatgccaggctccccgagtgaggagcggccggggccggatggacagtggccgagtcaggacgctcagcacggatctggcccccggggaagccagaccaagtgggcagtcactgcaagctgggagcccgcccctcagatcctcgcttagggcctcaggacagacactgacctgacgccctgaaaacacctgcagaaaatggctttgggggaggagacttggcgagcggcaccaaactataccttatagtggcctgatcccagagcagtttttagatgtcatccctgtgtctcaaaacgaaaacaacccattcaggaaaggacagtggagaccgggtttgggccaaaagaggcgagtggggagctttgtgtcggccccctgggcaggtacgtaggggctgggggcggcgcgctcgccctgtctggcgggggtgcgccccgaagagacaggaggaagcgggaggtggagggcggggaggaggtcccgcccccacctcgcgctcctttacgggaagtgatgtggggccggacggaaaatacccgccaaggacccgaaaaggccggcagcgggtggacgcggcgcgcgcagagacagagcggcgtgggggccgcgggcggagcaggtgaggcggaggcgcgggctgggaggcgcgctcgggctcggggcgccggcccccgcgcggggcagcgcgacgcggcgggcgcacccagggtctggccctgcggccgggtgttggggttgcagctcctctccgctctctgggaggcagagcccactcgcaggccctcagcgccaactctacgatgacaatcgcgggggtcggggtcagcttgggcgaggggccgattcggtggagtcccaggttgggatggggctgaggtcacctcccggcgcatccaggtgctaggggccgcatggaggtggcggggagggaggaaggaaacttctcaggcaggagaggaggctcctgcacggcccctctaattctttccttccttcggttttgtcagttgaatgatttataaagtcttgacacctttgttgggcggggtctggcggcaaactgggtgggacagaaaaccctaccaggcagtcaggcccttctgtcttgactggcggtaaagccgacgtgatgacaggtttgggtaactcttgccaaagcttttctctctgtcccaatagatcatggattaagcaaagtcaggcctgaagtgaaggaaatcttgtgaacccatgactttgccttcccatcattttggctcctgcgggccacctgcatggcctcagcatcatgtgttagatcctgtctcacaggtcttctgtgggctaacagctattttcccctacttgagggattcttgactgtgggattggcttatcagtcagaggttgggggtatcctcttatgctgtataaagtttctataattatcggtggcttagtttgttggtgctccactgttcctgttttattgatttatttatgccttcttagaaacttgttttagggggaaaacacagtctggaagacagaatttttgcagatggttacaagtaaagaaaggttaatgtagtgcccgaaaaacttgcctgaggatctgtattttatgttagttttcattcctactttctttcctttattctttcttccttactcccttccttccttaatttccatgacctgccttgattttagtaattttgatgaagtataactaattttttcttttcttgctgcgcttttggtgtcaaatctaagaaagcattgctcaatccaaagtcctgaagatttatgcctatgttttcttctaagagttgttagttttagctcttacatttccatctttggcttgcttttaagttaattttgtacatggtgtgagctaggagtgttaacagatttttgcatgtgggcatcaggttgtcccagcaccatttgttgaaaagattattttttccccctttgaataccattggtgcctgtgttgagaataagttgacagtaaacgtgagggtttatttctagactctcagtcctactccattgagctgcatgtctatccttatgctagcatcatactctcctctattaactatgtaagtacaccgttttgagatggggaagtgtgagtcctcctactttgtttttcttttttgagaccgttctggctattctgggtcccttgaatttccatatgtaatttaggatcagcatctcaattgctgttgcctgattttacaacagatgcaaggatgttgaagtgggcaacagtctctaggaaccagactcttcattttcctcttccaaacctgcttttccctctgtctcccctatctcctcagttaatggcaacttccttattacaggtgctcagactaaccaccctgggtcacccctgactcttctccttgtctcataccccacatctggtctctcagcagagttcattagttctgctctgaaactgcatctaggataggaaccattttgtaacattttcactgctgctccaccaggttcccttcctttgtcaacctggattcctcaaaagtctcctgcaggcccagcctgcttccaccgtcaccgctctatggtctgttcttgacaaagttgccgaagccatttatgtcactcagtcagtcctgtgctcaaaactcactggtggcttgttataccagagggacacctctgtcgcctgcagtcccttacggggtgtgtggcttcatcttccatctctcccctcttttctcactcgccttcagctacacctcaggacctttgctgtttcctctgtctggaatgttcttccttcaaaagtctgcactgcttacttactcatttcattcaaatcaagtcatttctttagagatgctttcttgtcccatcccatttaaatgagtgtcccccacccccaccccaacattttcttcctctttaccttatttttctttagagtatctgtagcgttctttgtcattgcacacccacacatctgtctcctactggtagagtacaagctccatgaaggtcaggaatttgtcttatttgctgcggtggaggtagcacctggaatggtttctggcacatattaaaccctaaaaaaaaaaaaaaaaacaaaacccacatgttgagtgaatgaaaaggaaatgagaagctgagaaatggggatcactctgctatgtttttctcactcttccttcccatttgcagtgtccatagctacaccagctcctccttctctccttttctatctacttttttccctggagagaatggccttactcttcttggaaagggaacggtcaaacaaaggaagagaaaggtcaaagcagaaaggtgaggactttgggtccttcccgaccgagggcaggacctgggcagactgggaggaggccttcagcacctgtctctagtgatttggtttcttgtgctgatctagggacagtgaaattccttggaaatttgagaaaatggagtttcatttcctgatgaatatcttgcagagcagtgaatttaatttttctgtggcttctgactgagatttccaattatgaggctcattttgacttttgattgcatgatgacttcagactgtcaactgatgatgcgtatgtggccttattcccatggtgagattgcggtatcctgcaggcagagcgcggcttcaccccctttgtgatcctggtactgcacgctatcacagacagaagaagtgttcaataaactcttgctgaatgtgcccataagttaatgaataaacttggatttgttttcatcattagaaacctctagtctatatgtttaatttttctcagtttgtagatgttaagtatcttgttttagtccacctcatcctgctgctgctgataaagcagtattggctagagttgagagaggtttcctgctgacctttctcattgagaattgaattaactggcctggagagtatagtaatcactgtggtattttaaaaattgaactagcttcccattgttaaacttatcttggaatatgccccatatctatatattcactacaaactatgagaaaggattatttttacacccatggcatgtatatgtgtgtggatgtaaataatgcgagccctagttaacttgatgggtgggggaatccctttcaaaatgtatacatatgtcaaatcaccgtgatgtatactttaaatatcttacaatgttatatctcaattatacctcagtaaagctggctgacgggcttccttgatggctcagtggtaaagaatccgcctgccaatgcaggagatgcgggttcgatccctggtccaggaggatcctgcatgctgccaagaaactaaacccgtgtgacataattattgagcctgtgctttggagccaaaaataaataagaaaataaaattatatattttaaaaagtggcccacaataaaaaaaaaaacgaattgtgagcctctatgcagcaagattgtcttgttattgttagaacaagactgccttctgaagagagggatttttccctttcactgccttcgctttacattatgctgtgtgcaggtttcgcttgatcatatttattcctctgcctcatagtcaggaagttccagtttatggtctggtttcccttaagctgattatctggggagcagacatgagcactgagttggaggaagagataaaaggtttgcaattaactttgtgtccagaaggtgagaggtgtggagctgtgagcatccgtcttgtccatccgtcttgttttggcctcctgtctggcaggcagtataccacattcttttccctgtgtgattgaggtctactaacattgatattctactcactgcttaataaaatttgatgcctcacctactcaaaacaaatgttgcaagtcattcttccttgcctgcttttgttttgttttattttttgcctctgtgtatgtgacccatgagaaggcctcgtatttagttcttcagccacacttggaaccacccacctgtatgaaatcagacttttgaaagctgagattacactttgaatgtggagtcagaggtagtgtgccagattaaaaaaaaatgtggatgaacaacaaataatatttcactataagtatgtcccatgcaatatttgggacatacttatactaaaaaattagttgttttttttcctatgagtggcagagttaactggtgtcttggatttaatgtggtaactctggtctgataaatttatgttttggggcaggaaatgcattgatcatgataatgtccacagaacaactaagctatggctcattttgctaattgcacatgtgtccatcttaggaaggagagggcgtgtaaactcaaggattattagaattggaggacagtgggagaagattccattttcctctagtgttttgtggtgaaggaaatttttctccagagatgttgtcattttccaagatcacacagttagtggtagggccagaactggaactctgggtccagtggttagtctggtgcacagaatttctccttgagaggtcacatgtagttgcttatgttttcatgctgatctttagtcactgctgttgcctccctcccatatcgctgcactgtcctgctgcccttctggcccttggatctgctgtgtggcaggcaaagccaccctcaaggacacacttgacttctctctgagaaccgcagggctgttgaaagccaccattggttgtatgcctgtggtgatgccagaaatcccatctttccatgtgtttttattccttctaaggtctggttattattctcatcccctgtgagtgtttactctaagatgctttgattcaggaggacttggctgagaataattccacaaccaccaggtattgtctcactgaagggtgcctgctttgagtggcctagtcctttgacactctgtatcttcttataatttggtagaacagatatggaagataacatggtaaggatcgatacaatagataggtgtatgtaacttcctctttagagacgtgttcttttaaaacacagtttgcttactgttttacagttatctctacttatttaagaaagtggccttagaaaaaagcatccttcctctgactgctgtgagaataccatatttcagagccactaatcctgttttttcatagcctgttgattaattcatataaagccttaccagctgccaggtcaaagcataataataaaattggttgccaagagacagaaaaatctgttcattcttattaactgcttctcatctgtcttgctctgatcccaccacgtgggcagctggttgagtcttatctgcatatggctggttacttatcgcctgtgtatttgtattacttgacacaaaaacagtgcctcaatcagctaacggaaggtttggtaaggttttattattattattattattgctgtattagttcgaatacgggaaggaatgagacacacagaaataggtcttgacttaaatgtccatttgagatacctgagaattttaaaatataatccaagggtgcggtcaggatttcctttgtttcctgcagtgtgattgattttcataatgaatctcactgttgcaagggagcaaccccagggatgagtaaagaggtctagcagccttgaaaagataaggtgtcgtccttcccatcggatgctagagaccaaacatggccagatcagctgctggccattccaagctggacttccttcgtcaggggcaaggtcagctcttcatcacccagctccgcttaggccgcagagcgggttgtggtatttccttggggggtgactcagccctgtgttccagaattcctgcttcagtgtggaggaaccaactccgccaggaactagtggattggtttttagtttctaactttgccaataattaactaagtggtattacactagtggttcttaattaggcagttttcaactccttcttcctcaagggggcattgagcaacatctggagctgtggctggttgccatatctggggagttgctggtatttagtgggcagagacctgggatgcctctaaacaccccaaagtgcacaggacagcccctcaatacaaagaatcatgctgcccaccatgtcagtgggtcaaggcagagaaaccctgcatttgatatgttgtgggacctctctggcctgcagtttcctaagtccacgttctctccatcatgtaaagtgaactaagcctaactccacttctgtggtctttctaacctctcccttacccccaattctgaatgagtcatcagatatggggtagggcccaggcatctctatttgtctgtattttatatctatatgcatatatttggcagacatctgtgtgtatgtattttacatctccactggggattctgacgggcagttaggatggagggccctgcccttagggatcccaggctgaggtcctcaccaaggtgcccggtgggccatgtgaggggagtagacagtgtggggacagtctgccagtcggaagcaagagccaggcggcagggcctggctgctgtatgactgagcacaggtggaaggctggcagcaagtcctcagggagggctgtgactgagggcttggcccctgaattcctcagagacggggccccagcccctcagcacagcgggctctcaggtgcccaggagtttctactctgcagagccccagctgatcattatgcccttgtactagaggtgcccccgatcccagagtttcccaaggaaatagcaagactggacaatttcttcatggaaaccccatttcctgcttatctagagcctttctgggagattcaaagtcaatggcagaaaccccaaccctgagtcagcagcccctcttgccacccagataaggaaacctcacttgttacacttaacagcatcatgtaacttaagggctggtgggcaccttagaaaccagggagctcagcctctcctccatctgacaggttcagaactgtgcccctggtcacatgacaaactgatggcagagagggttctagaagacaagtctgctggttctttctatgcccctgtgctaatgtttcttaattgtaaccagcagtgtctctcccttggactcctgtgaaatatcacagaaagtgaaacaaatatattaatgattttcatctatgttaaagcagtccagaaatgtctgagcatctgctatggctatgtactagctgccagttaaaggccaccattgtttcctgcctggactgctgtttttctggtctcattctagctacccccgccttcccgtaacccattcctcatgcaaagccggtgatatttttaaaagtgtaaatcacatcatatccttcttctgtttgaaattccccagtcacttaccactgtggttggtgtaagatccacacgttctaaccgtgatctgtaagtgtctccatgatctgagccctgttggcctccttgtcctcagctcatccctgtgcctccttcttttctattccttaaaaacgccaacctcttgccttcctcagagcatctgcacttgcccacaattcttttctctagattctcaccagggtggtcccttggcagcagagtaatccctgatcactctgttggaagtagtctttagtcagcctctatcctattatactttatggtcttcacaggactgctgactgtttgaaattattttatctctgtattaacgttatctatctctttctgctaattgttctccctgtgacagcagggactttgtgtcctgaaattctggatacttgtcacctagaataatgcctggcacagggagacgctagggtgatagtgaatgaatggtagagcaggtaactagggagttggtgtgagagaagattgcatggcctgtgttaattcctattttttcctacattggacttcatgttttgttgttgtttttacactttttactatttattttttaattggaggatgattactttacagtatagtgatggtttctgccatacatcaacatgaatcagccacaggcatacacatgtcccctccctcttaaacccccctcctccctccctccccatcccgctcctctaggttgtcacggagcaccggctttgggttccctgcatcacacagcaaattcccactggctatctattttacgtatggtaatatacatgtttcagtactactttctcaggtcttcctaccttctccctcccctgctgtgaccaaattgtttttaaactttttattttgtattggggtatagctgatttacaatgttgtgatagtttcaggtgaacatagaagggcgtatgtatccattctcccccaaacttccctcccatccaggctgccacataacactgagcagagttccatgtgctatacagtaagtccttgctgattatccattttaaatatagcaatgtgtacatgtccgtcccaaactcgccatctaacccttctccccatccttcccctggcaaccataagttcattctctgagagtctctttctgttttgtaagttcgtttgtatcatttcttttcagattccacatataagggatgtcatatattttccttctctgtctgacttcactgaatatgacaatctctaggtctatccatgttgctgcaaatggcattatttcattctttttagtggctgagtaatattccattatatatatgtaccacatcatctttatccattccagtgccgatggatgtttaaattgcttccatgtcttgcctgttgtaaacagtgctgcagtgaacaccggggtgcatgtaaccttttgaatcatgtttttctccagatatatgctcaggaatggatgctctattttcttaatgaagctccctactgttctgcatacttgctgtaccagtttacatacccaccaacaatataggaggattcccttctctccataccctctccagtttattgcttgtgaatttttgataacagccattctagcggtgtgtggtcatatctcattgtagttttgatttgtatttctctaataactagagatgttgaacatctttttgtgtgcctcttggccatttgtatgtcttatttggaagagtgtctattcaggttttctgctgagtttttgattgggttgtttattttgtgctgttaagcattggactttattttttaaaattaaaacctagatgtcagtttgatacatgagaaaaatagaagtgttaagcagactagtttcttttttttttaagacgaaggtattcagatcctctagcatgaactctgtgggaaacaaataaaatcgtacaaagctacttggtgagcacagactctggcatcggggcttagaaatcaaaagatccaggctttagtcctggaaggggcctgaaagatcaccttggggatagttgctcagaactggctgcccgtgaaaatcacatgtgctgtgctgtgcttagttgctcagatgggtccaactcgttgcgaccccatggactgcagcctgccaggctcctctatccatggggattctctaggcaagaatactggagtgggttgctctgccctcctccaggggatcttcccaatccatggattgaacccaggtctcctgcattgcaggcagattccttaccatctgagccaccagggaagcccaagaatactggagtgggtagcctctcccttccccaggggatctttcccacccaggaatcaaactggggtctcctgcattgcaggtggattctttaccagctgagctaccagggaagtccaaaaatcacatagggagcttttatttaaaacatatgcaaaaccacatgtttttcagtctcttcttaggagattctaatttgttaggcttggctttagggctagggaattcatgttttatctaaaatgctgctgtagtgatggatggtgcaccaccaggtttgggaaccagtgacggagcccacctctctcccccggtgagtaccctgaggctcaaagagatcaggtgtctcactcaggggtacccacatgagcggctgggagagggcactcaagtctcccagccttctttctgcaccattcaaaaatgtagtgagaaattctcagggacagaggtggggctgcctcggaaattgtggttttattatttttttctttattgacatgtaactaaccagtctcgtgtcaaacaggaaatgcatctagcgttgctgtccttttttattacaaggtgtcagatcagtttgagtttaatagagagatgaccaaagtgtggttccgagaccaccaccaccaccaccacccaagaacttgttagaaatacagattctcagttcagcccagaactgctgattctgtactccagagatggcccagtgggctgtgttttcaagccatccaggagattctcatgcccactgaagcttgtactttttacaacccaatcagtggttaaagctgctggcctcggcctttaagttggtgactcattaacatggaggccttaacttaagctagccatctgctttccttggtaacagttgctcaaaatagggacttttgttataaatcttcattagtccgctacacaaggtggggtgaattaatacttgttgaacacctgctgcatgtgaagctgtgtgttggaagctattacttgtctcatgtaattctcacatcattctcaaccatcctgctgggtaggtattattatccctattttacagatttggaatctgaggctggtagaggttaaacgagagttatttgcccagctatgggtgtgcgttttgctgtctccctagagcagttgctctccaacctttgtatgcacaattgggagtcctttggagaatcttgtcgttagttcagattccctctctgccttcccagagggcttcatccaggggcctgatggaacccaggactttgggttgtcatcaggtactctaggtgattctgctcccagtgggcatcagaccatacttggaggaagttctctcctggatccattcagtcttgcttccgtagttggaccagatgtctctcaaggctcctcagagtttctgtggttcgccagtgttttgtgctcacagaccttgggcaatggatggggaagaaatacgagcgtggaggaaggagcttgggagctcgtacagagaaagatctttttttttgacatgtacacgctgctttatttacttatccttggctgcacgggggcttcgctgccgcatgtgggctctctctagttgtagagggcggggagcactgtctagttgcagtgcgtgggcttcactgtagtggcttctcggtgcggagcacaggctctaggagcacaggcttcagcaggtgaagatctcgagctcagcagtcgccacttgctggctcgtgggcacttggactcagtagttgtggcacaccaggttaattaatgctccgaggcatgtggaatcttctcgagccagtgtcctctgcactggcacgtggattcttattcactgggcccccagggaagcccccagagaaggttcttatttgcctagctgttcctgctctctctgctgcctcggtgtttgcaggccatgttttggctttgagtaacttctgatcctttcagttatctaccccaaaattgtgcaacttttcatgtaacaacttcacctatgtgtggtgaactgccccaaagtgagccatttcctccaggctgaaatgagtatctgttgagtactgaattgcttcagcttttgaggcaagaaatggcatttcatctgtttgatgatacgctcccttatttttcaggcatagaatggacatatttagtgaatgaactgtcagtccatcaggagacaatgacttggtgccattatgaagggaaaaagtgagatgcaaatttaaaaataatttcaggtatgatgcctgatgtcctttttttttttttttttttgtgagttggaatggtgatttctcctccagaagtttacctaagtaccccaggatccccttagtgaaaacaatgcatatatccagagctggtggaaacctctcaggcctttgcccagtggataagtcagcactggtgaaatactacatttctttaataaggcctagtccctgaaacaaattattaggaaaaggttggaaggaaatttgggaaagcaaacatttcagcttcctggaatccactgtgtataaggtaaattatttttctggtaaaataatcaaggtacaggttaagtttctaaggataatttattttgctgctgatatcagagttggaaataccaataggtaactgcgtacactagctagagctaccgtttattgcaagcttactgtgtgtcaggagtcatatgaacattctctcatttactcttcagtagactttcaaagtaaatattatccttcattttacagctgatgaaacagtctcaaaaggattgattaattggaccagtgttgaaactggggtttccaggtatgcagggctttgctaaaacgcaggcctgggtgaactaggatagttagttaccctgagtgtcacccagctcactgacctacagctgatggctaggaagtaagcccaaaggattctgaattgtctgatagatggtatatatatggaagtgtgctgattcgcctcacaaagagaccttcttaacactttgtattacatatttttctccattgcatacataattctgattttggttgtttggtttccagatgccttatcagttagaaggtatgcacattggttgggggaggagtgactctggaaaggcactctgattactgtggtgaggacgctggctgactgacagagaaggtaaaggcagggaaaatgaaatataaactaataaaagacaaaatcaatacagtgtcaggaggctttaatatagtggcaaacataccttaaaagacagcagctattatggaacatgtactcggtgccgaacactgtcttaagcactttatagtgtaacatgactcatttttacaaaataatcctattgttccaccaatgaggaaacaggcacagagaggtcaggtaacttggtgaattaccaatgcgtagtaaagctgggattcagatccaggcagcctgagtccagggcttggatcctcagcatcctgtttccatgtaggccttagatcctgagagtgtagcgcacattagtggtgtttattgtggtggcctgaatcatctaactgctactgctaagtcgcttcagttgtgtccaactctgtgcgaccgcatagacggcagcccaccaggctcccctgtccctgggattctccaggcaagaacactggagtgggttgccatttccttctccaatgcatgaaagtgaaaagtgaaagtgaagtcgctcagtcgagtcgagtccgactcttagcaaccccatggactgcagcctaccaggcttctccgtccatgggattttccaggcaagagtactggagtggggtgccattgccttctctgtgaatcatccaaaggaggggaaaataaaactttaaggttgggcattacatgtctttttgtattaattaattaaaaaaaaaattatcagggcatagttctgcaaggactgttagtagaagttatcagaatctccgcccgtggctcatttcctgctccccagagtcaagtgctttcagttcttgcaatgagttgacacttgctggttgctgtgtcctctgtctctaatgacatacttgtacttctgtatgattgattttcagttttaggcatcttctactgatgcattactatggaaaaagaaaattttagtttgtttttccacccaccccgaccacacacgcataagatttccatcttctccttctcccagcagttacgttatagttgtagctataacgttgtagctagctcagtatgtcatgggcttctgtttatgtttaggcttccctcctgggttgggcggtctccttagaagacaacttgaaccacgtgcctgtggagtaagcctgccttttggaagtctagcatggaggtgtggggtggaagtgtcttcatatttattaatactatgcaacttctcagtgcctctcctgtctccactaaagttggtttgactcagacaccccatgcgagtttgattcttggagttttactctctccggagaatagacgtttgacttctttggagctggaggaatcacaaggctggggcttggggtgtaagcagacttccattattttagcctcactttatgctctcccctcctccagaggtactggggctctgactgcctaagccctttctggagattctgtgatgagttgctccttgtgtttctctactggcagataaggagtctggtttcctgagtctgctaatcaattacctcttgttaatctactttcttttttttcttattttttttcccagcacatcactgcatatatatttaaaccaatccatctttcaggaaacagaaacaccacaaagcgtgcagttagcaaaggtaacttctataagtcaatataaaatgttacagtttaaagctcttgtatttatttttaaaatttttattggaatgtagttgctttataaggctttagtttgagaggtcatagaactaaatgtatttagtgtgctatctgtatcctgaagcctgaaagacactggagaaagctttcaatgcaaaggggtcataaaaaggcggtgttgcacgaaggggaagactgatatagttctatgaaaaagggggttgtcgaagttttacttgctactcatagtgtagttctaggatcaggaacatcattgttacctgggtatcacttgggtgctatttagaaatgcagaaatcctgggctctacctgggcctgttgaatcagaattagcattttaacaaaaaaatccctgggagactcctagggattgaagattgagaagtgctaatatcaaactttcctcaacttctactgtaatttagaataagctaactgtaatgaattttcatgtgggatttaaacattttggtactttcccttactaaattattctccaaattctagagcagtggtccccaacctttttggcattaggtactggtttggtggaagactcttcttccatggaatggggtaggggagggaaatggtttcaggatgattcaaacacattacatttattgtgcactttatttctaatctaatgctgttgctgatgtgacaggaggtattggtctgtggcccggaggttttcttttaccagatgatgtcagactggttatgttcaggctttttcagttgctcacagttctgcaggttggtgagaggttttatagattgcatcagtggagtcttcagtcacacttggagtggtcaaatgagagggtggctaccccgtgaggtgaagggtacatcattcgtttttatgcccaacatctatcccagtgacaggcctgtgtttaactagagacttgtggaatgagtgagtcaaataagacagttcctgtcttcgaagtattcaccagccagcaaggagtcaactggataattatcatacagggttgacctgccctaggaaagaggaagcacagagaaggggcatctgaggcagcattcctggcagagggaactgaagggctaagtctcttggtgaacagagcctgtgggtttagagcagctgctctcaggtgagtgtatcaaagtcacctggcggccttgttaaaccacagacttctgccctcatccttagaacttctgattctgtaggcttggggtgggcccatggatgtatgtttctagcagcttccaaagtggtgctgatgacactgcttttccattttgaaaatcactggttttagagaattccagctagctctggtggctggagtcaggagactgggaacagtagatgacagggaaggcagaggcctatggtgtggggatgttactgcaaagattgtggggagccactgactggatttacagaggagagtgatggacacccacttacgttgtagaaagatcactttgggtgcagtgtggaggatgagtcaatggagaggccaggttgagggccagaaatcaattgtgtggttgactatagtcatccagatgagaaatgataaacacttggaataaagattagaggaggaaggattccagtggtcaatggaagtgggaggggagggagggaggagtcattgaagacaatcagatgtctgtctggctgtgctttgggattgttactcaagacacaggaggagaagtgggtgtgaagcagggtctacagagaagagctcaggaggtacgtggagggccggacatgctgaatttaagatgccagcgaggtatctgggtggactgccaggaagagagttttccttatgggtctggagtccagagagagatgtgtgggaagtcccttcacttcctcagcttacactgatctcctgtagtgtttgcttgaatcaggccttgtaaatacaagaaagcaatattaataaaatattgctaattgtaaataaataagcaatattaatgtaagggttttcccagtagctcaatggttaaaaaaaaaaaatctgcctgcaatgcaggagacgtggcaggagccatgggttcaatccctgggttggaaagactccccctggaggaggaaatggatacccattccagtatccttgcctagaaaatctcatggacggaggagcctggcaggctacagtctatggagtctcaaagagttggacatgactgagcaactaaacactcacacacaatattaatagaacccttaaggacctttagaatgcaatacttttaaatatgttttatcaagaaaacaaatattctacttgtttggttgaggggaaaagaaaaagttgaagtgtaagtcttctaacactggaagaggttaatacagctgccttctgtctgagagaccaggagactgggttttagtaaaagcttgaaaggggcaaaatcacttgactggtttgcgggccatatgacaaacagctgagactaattagctggattgtgggtttttccagagatgactgattttgaaagttgatgaacctaactgcttttcaaaagactcttttgaaaaacttttgtaagtagactgttctgattttaacctttctctttgtaatagacaaaagtatctttttagaagaggacatgtgattacaagttgcctaattgttgaagtgttggaaactccagtctctaaagttttgggaaaatcaaccaggatttatactttgtcaaggtatggttatgcctttttgtgtgtgtgtgtggtggtggggaggtagaggctttgagtgctgaggtgccagttttcaggtacttaaaatagtgcaatttaacataaaataccactgcatacattaatttttttaaaacaaagacttcaagatgtctgctaaatttcttaggtttagtttgaaaagtgcattttcagttaccagagagtgggtatgaatactgactacattcttcctttcttttctgtactttaacaaagtaacagaggcttttattctcaggtaatatgttgaataagagagctgattacggaattgaatagctctaagagtcttgctcatcttctgagcattttatccccaaaaattcaattgggattttgtttttaatgctgttaatagctctgtgctatgtatggtaagttacttcaattgtgtctgactctttgtgaccctatggatcatagcccaccaggctcctctgtccatgggattctccaggcaagaatactggagtgggttgttatttccttctccaggggatcttcccgacccagggattgaagctgcacctcctgagttggcaggcaggttctttacccctagcgccacctgggaagccctgatagcttcccagctgatagttctagtggagattactaagtctgtgtgttagtgtaaggtgtgtttcttccatcacttaaatttgtcttctaattattaattttgtgatgtttggaaacagtatcgtaattatgtaaggaaaggcccatctattttattattattattttaaagatccatctgttttagagatgcattggagaaggaaatggcaacccaccccagtgttcttgcctggagaatcccggggatgggggagcctggtgggctgccgtctgtggggttgcacagagttggacacgactgaagtgacttagcagcagcagcagcagtgatagtacgcaggaatgaaagatctgggcaatgaatatgatggggtgttttatcatacagttctctccacttttacgtgtgtgttagtttgctggggctgccataacaaagtatcacagtctgtgtaggttaaataatagaaacttcttgtctcagtcctggcggctagaagtctgagaatcaaggtgttagggctgtgaaggaaggatctattccaggctgctctcctcctccctctgtctcctcttgtcacctttcctttctgagtgtctgtgttcagaaatcttcataaagacactggttatattggattagggctcaccctagtgacctctttttcatttgataagctttctaaggaccctatcttcaagtcaggtcaaattctgaagttaggacttcaggtcaaattctgagttaggacttcaagcatatgaattttgggggaacacaattcaactcataacagatacatttgaaaaatttcattatattgcaatttaattgcctccaagtcatgcagcaaatatttgttaagccaagtgcctagactgtgtttggtgttgagtatgtgaggataaataagacttgatctcgatccactgacattggtttaatcatatgtgtggatatggcttcatgagtgtgttcatttatctctttcattgagttttggccactttcagagttgggtgtccctgaagacacgatcagtgttttgacacacgggcacctggaagggctctgttgctcctgaatgccctcaagataggcaaaagtagaaggcccttagcattcatctagtctgacctcctcatttcacagagggagaaactggggcttcaaagtgcaaaagacatttggctgattagtgccagaaccacagcagcttctgctccagtacatcattttgttttcttggtcacaagttcatgctttcatgtaggagtgaacccaaagtctctttagaaatcagatgagaaagagccttgatctaaagctgacaatctctgttgagattcttggattttaagtaccgcccccccccccaaaaaaaaagactgagaggatttcatccacagaatgtccagtttgtacttaatacatccctaaggagattgctcccaccttggttaggctctgtctcttaccacattctctgtattcttttcagacacactgttcagtgacccagcagccattagaatacaaacaacattttttcttctttcttgctgctgctgctgccacccacaagacaggaactgcggcagaaagagagcgctgatgaaacattgccggccagcagggtggcaccatggcaaccaggacctgcccatgtctggcaggtctgggagcccagggctgcctctgctgccgtttcagcatctccctgtccagtctctcagaacctgagtgctcacagaggacatgctccacactttgctctgtttctcttttctcttttgctactcttcccttcttcctccctctgcacttggttgatttatagtttgagccagggtgcaccacatgtgatagctgctggaacaggcccattaaaaacaaaagctgatttctgcagaagccgtccttgtttagggctgtccttgcaagaaggcaccttcctgctttttttggcgctcccgttgttgctggcatggctggggccctgccgccttggcagagtagaggctgggtttggtgggggttggagggtagggaggtggttatgagacactgcttgggaggagagcttgccttgctgctgtttttctgaaggcaggagccactttgttcaaacatagatgcaaattgcccaagaactgagagcagtcgatttttttttttttttttttgcctatctgtttccttgctttcgcccatttcattttctattaggcttttcctctccctgctgtaacctgtaaggggattctttagctccaagtgctggatttatcacactgtaaatgttaagtggatcctctattttcacaagaaggaggaagtccagacagctttaagctgataccactcttcggtggtgactgatgcaggccgtggactattgtttgaaaacctttctagtatcatttttgggtctctcttgctgagccttacactttggctctcttccttctaaaatgccttatctctctcatggccgcaggaaatcaactttgttgatgaatataaaatccatcttgttaacccttatttttctttcaagccctaatattctgttttcaaaatgccaaataaacacatttccctggatatccctgtgacatgagggacatataattggtcatattccatacaggattacatagtagttaagagtgtgtctgggttcaaaccttggctttgccttttattgactgtgtgaccttggagaacttacttaacctttgtgagtcagttttcttatctgtagattagagttcatagggttgtttcgaggctctagtgagttaatatattaaagggcttagaaaagtactcagtaagtgtttgttataatcatttcaaaccagcttttcctctcttgcttgtgtgcttgtgtgtgggtgctcaattgtgtctgactctgtgacctcatggactctagcccaccagacttctctgtccatgggattttccaggcaagattaccggagtgggttgccatttcctccgccagggaatcttcccaacccagggatcgaacctgcatctcctgcactggcaggtaaattctttaccactaagtcacctgggaagccctttcctctcttagttaatgatagtatcttccattcagttaataaactgaaagttttgattatctttaactcctgtaccagtcagttaagggggtatcctgattttctacctcctaaatctatcttgaattaatcccttcctctgcatcccactgtcaccaacacaagtcactcaccatctctcagcacagcttcctggtcctctgtgtattcccagaaagatcattttcaggcacagacctcgtgttcctctccttcataaaagcctgcagtactttgcattgcccagaggataacacacagactgtctagtgtcatataagagtcctttcaggcccaggtccccaaccctctcccatcatttcagcctgtctggacacctcctctcccatcccggtatagtccactaatagcatgcatctgctgaggttccctaaatgcatcataatcttttccctcttagacctttgcaaatatagatgctcttccctgcctcccaccttcccagtctgtttcctgttcccttctcacggctccaagccttgtctgtgttttctacttcagatgtcagacagcccttacctagttctgtcaaaactcagttaacacctttcagatcggcattgataatattgtttgttgatggtttctgttatctttaaaggataaggcttatttgacctgtgaggtgaagttctttaccacatcatctgtgaactgtgtaatttcgttctttcgcgtttgtcccttttccctctgggtgctgatgtaagtccgtggctggggtacccttctgtgaggtgactgggtgggctcccccgcttccctggccccctctgcccccggtgtcccagctgcgcagtgctgtgtgcatgtttctgtaacagtcctcgttccactgcatcttcgctgttcacgttctcgtgtggcatttctgctggacttgcttttctgtggcctcgtcctaggtgcttagcacagtgacacgtgcaggggctgttctcagtgctcaggtacgtgcatggtgtttgaactgatgtgctcatcagctgccacctggatttctgtcattcatcctagcttctctctcctcagtgtctacaggctttgctggtgtatcgttagatcattggtgtaggacattgcacttgtcagatttcatttaaaattcgtaacaacttttggattgacatttgtttatcattttgcatttagtttcagtgaaatggcaatccactctagtactcttgcctggaaaatcccatggacagaggagcctggtaggctacagtccatgtccatggggtcacaaagagtcggacacgactgagcgacttcatttacttcacttaaggacattgggtttatgtataattcttgggaagtacctctgtctgtcacagcccatcccccttgtcatcctgtgctttataatgtttgcaattttgcactggactcttgagccaggtttttcctctaaagccactaaaaagtgctgttaaaaaaattagattcctgggacttccattgtggcccagcggttaagactctgtgctcctaatgcaggggacatgggttccctcaagagtcggacacaaatgagggactgaactgaactgaactgaagatcccacatgctacatggcgcggccaaaaaataaatatattcatttccatctagtctagtttttgtagttctgaaaagtgtttaaaaactaaaaatgagtgtttatagaactcacagaatgaaaatagactgttttctttttaaactttttaaatggtgttttaacacgtaattgctggcaatgcccctgcggctctttggagtcaggtataaactacagttctgtatattcttgtgatttttaatttacttttcttagcacaaaggacttgaagtttgtttgagagctgcttgctgatttctatttcttttaattgccttttttcatttctagatcatgcctcatctaataatattggtaaaatagctgtattttagagagttaaatacagactttagtataattgtatagaccaagtgagaaaaaaatcttggcaaagttttttcaaaaattcatcataaataattagccagagtatagaaatgtagcttcagctgctttaattttaaaatgaagacatcactttttaaaaaatggtaagatcacattaaaatgttattggtttatagttgatttacaattttgtgttagtttcaggtatacagcaaaatgattcagttatacatatatcctctctttttcagattcttttctcatattgattatcacaaaatattgagtagagttccctgtgctgtacagtaggtccttgttggtgatctctcttatatatatagtagtatgtgtttgttaatctcaagttcctgatttatcctccctccccctttggtcaccgtgtttgttttcggtatctgtaagtctgtttctgttttgtacgtaagttgatttttatcatttttgaaaatcagattccacatatgagtgatatcatatatttgtctttctctgtctgacttactccacttagtacgataatctctaggtccatccatgctacaaatggcattattttgttcttttttaatggctgagtgatactctattgtgtttctaccacgtctttactcattcctctggtgatggacatttaggttgcttccatgtcctggctactgtaaatagtgctgcactgaatatagggatgcgtttattttttcaaattatgattgttttccaggtagatgcccaggagtgggattgctgagtcatatggtagttctgtttttaagtttttaaggagcctccatactgttctccatagtggctacaccaatttacaccaacagtgtagcagggttcctttttttccacactctctccaccatttactgtttatagatttttttttgatagataatgactattctgactggtgtgagatgataactcactgtagttttgatttgtatttctctgataattagtgacgttgagcacatttttatgtgctttttggccatgtgtatgaaggtcagctggagaaggaaacggcagcccactccagtattcttgcctagaaactcctgtggacagaggagcctggtgggctgctgtccatggggtcgcacagagtcagacacgactgaagcaccttagcatgcatgcatgcattggagaaggaaatggcaacccactccagtattcttgcctggagaatcccagggacaggggagcctggtgggctgctgtctgtggggttgcacagagttgtacacaactgacgcgacttagcagcagcagcagcagggaggtcaggggcttctctggtggcttagcggtaaagaatctgcctgcagtgtaggggatgcaggaaccatgggttcaatccctggactgggaagatccccttgtgaaggaaatgggaacccactccagtattcttgcctggaaaatcccatggacagaggagcctggcaggctacagtctatggggtcgcagagagtcggatacaactgagcaactaaatcaccacatgaagatcacagtttttgactagcagagggagatgacagattgggtgaagtctagggcataccaagagatttatgataaggcaagaaagatgaggaacctgtttcatgttcactgtcacaggaatacattgactttttttttaagctataaccttttggtgagtcacacagttatgtgtgtgggaggcaatgaggtgggacaatggggagagtatggatgagggtctttggatcttttagtttttctgttctctcctgttctacactgtagagtgcttgcctcccagggaatcccagctttaatgtactgtttgctgctgctgctgctaagtcgcttcagttgtgtccgaccctgtgcgaccccatagacagcagcccaccaggctcccccatccctgagattctccaggcaagaacgctggagtgggttgccatttccttctccaatgcatgaaagtgaaaagtgaaagtgaagtcactcagtcgtgcccgactcttagcaaccccatggactgcagcctaccaggctcctcagtccatgggattttccaggcaagagtactggagtggggtgccattgtactgtttacgactgcagattacttcaagaacttatccatttccagacaccaaaccttttgtatgctttctctcagaactcacctcccccacatctagattaggtgttaatctcatatgctccttttactacgccagccataggtactaaccatgcttggagtcttgcttcagtggtcagtattgtccgttagatggtaaatttggtggggggatgcagacgctgtatctgtcttatttgcatttctaccaccttgcacagtgatgggtgtgggcactcaactgttaaatgaatgaacaaaacaaacatgtgatcaccttttactaagacagaacctgtccagtcttttatagacgtataacttccctttgatgcagcattccatgaactagatttgttcctcctgctttaaacaaaagggaatagctacattttcccctctgtcttcagactgtacaaattagatgatcctcatggctggtctggtttaggtctggaaccaaggttttgaggcatggactggctcctttggctgattgtgctgaattgcaaaatatatataagctccactttttatctctcttaagatgcttaccattttttaaatgtgttaccctcaatgcttagtgttataatgggctgtgtatgtgcttgaaccccagtacttaaaagtccaacatagtattgaaaagaaaattcaaaagctagctaatgattttctgatgttactctaggtaataaaagactatttcagttgaaaaattttctgtgataattacttctgtctctaagtgactgcatcttgagtaaccttttttcttttggccccaaactagagcaacttatgtaaaatgtgatgtgttatatttgaaggttggtttttcatggggtcgcaaagagttggacatgactgagcgactgaactgaactttgagtaactcatctcaattacatggaacttaatagacaattcattttttattcatccaaatatttattaatgactctgagaattatagcatcctttcctcaagaatggacttggaagaagcaatgacattgaaagagaagtcctgggtacaggttatcaataagaagttaggaaagttagagagaaaactaaaagtaaagaaaaataaagatcaaaggcagaataattgtaaaagcttataaattaacaaattaaaggagaaaaaaaatcacatttttctcaatagatttagaagcaaaatttgataaaattgatgtacatccgtaatacttattcttagaaaacaaagaataggtggagcacttccttatcctgataagagtgtctgccaaaaacctacagcaaatgttattcttaacagtgaaacattagaatcaagatatttattcagtacttttggaggtcctaactagcacagtaagacaaggaatataaataaaatgtataaagattagaaaagaaaaaaaaagatgtatttattttcagctatgtataacaaatcattagaatagtgtgactaataaatagatggtaatgtacatgtaagtatatatatttaaaagatatcacttataatagtaacaaaaatataaagcatcagtaagtctaaaactgtacaaggtctttatgaagggaatttactttgacatttgtaaagacattaaagaaggcatcaataaatgtagagatcatacatatacatggatagaaagattcaatatcatgaatatgtaagtcttctcagtttgatcgaacatcctcacattctgaggaacttagatggaagcatgaaaggtcaagaatgtcctcagtgaggcagtgggatctggtcctctcgggtatgcctttataactcaggtatgctgctgctgctgctaagtcgcttcagtagtgtccgactctgtgcgaccccatagacggcagcccaccaggctctgctgtccctggaattctccagacaagaacactggagtgggctgccatttccttctccaatgcatgaaagtgaaaagtgaaagtgaagtcactcagttgtgtccaactctcagcgaccccatggagtacagcctaccaggctcctccgtccatggggttctccaggcaagaccactggagtggggtgccattgccttctaaagctgtgttataaagtcacagtagctaaggccttataacattggcccatgggtaatgaaagtgaccaaaagaacaaaagagtgaatcctgaaacagatctgccccgatatggtgactcactaggaaaagagtaatttttctcaataaatggtactatgataaataggtgtctttcagggaaaattagtgaaattggattcctacatgcaccttaaaaattaccactgggttgaagacaatgtgaaaggtaaaatcttttgaaaaataatgtagatgagtatctttatcactttaggtaaagaaggatttcttagctgtatttttgttttgtttttggtcacatcatgaggtatgcagagcttccctgatgagggattcaacctgcaccccacaaagtggaagtgtggagccttaatcattggaccatgagggaagcccatggatttgttttatattatataaagaaaactatgtataaaagattgataggcatgactgcttgaagattgagctattgaaaaggaggaaagacaaacgactaggtcctactgtatagcacagcgaactatatagtcaatatccagaggtaaaccaaaatggaaaagaatagtaaaaaaaaaaaatatatatatatatatatatatagagagagagagagagagtgctcctggtggctcagtggtgaagaacccactgccagtgcagaagacgtgggttcaatccctgggtcaggaagatctcctgtagtataaaatggcaacccactccagtactcttgcctgggagatcccattgacaaagaagcctggtgggctacagtccatgggctcacagagagtcagacatgactgaagcgacttagcacatgcacacacacacacacccacccacatatatgtatatatataataactgtcactttactgtatagcagaaatttatacaacattgtaaatccaactatatttcaattaaaaaaagtaaaaagacaagccacaaataggaggaagatatttgcaaccactgtaacggtcaaaggatgagtacctagaatattcttctcaaaagaattcctacatgttcataagaaaaagacaacccaatagaaaaaaagggaaaggacatgactatgcttgttcacaagaagaaattgaatggccaacaaactaaaaaaaagaagaaaaaaagaaaagaaattgaattgctccaccacattagcaatcaaataaatgccagtttagattacagtgtggtaccattttgagaagtctgacaataaacagtctgacaataaaaagtctgatggtgaagatgtgaagttgggagtgtaaaacaagtgtggtggttgagttgctcagtcatgtccaactctttgcgaccccatggacagtagccagccaggttcctctgtccatgggattttccaggcaagattattggagtgagttgccatttccttctccagggagtcttcctgacccagggatcatacccatggctcctgcattgcaggcagactctttaccactgagccacggagaagcccccagtttggcattgtcttgtattactgaacatgtacataccaatgtcccaggaatgtcattctttggtacccatccttctcctttggtatgttctgaattggttcagatgtcagttcagttcagtcattcagttgtgtctgactctttgagacccccatggactgcagcatgccaggcctccctgtccatcaccaactcccagagtttacctcaaactcatgtccattgaattggtgatgccatccaaccatctcatcctctgtcgtccccttcttttccaaccttcaatctttcccagcatcagagtcttttcaaatgaatcagttctttacatcaggtggccaaagtattggagtttcagcttcagcgtcagtccttctaatgaatattcaggactgatttcctttaggatggactggttggatctccttgctgtccaagggactctcaagagtcttctccaacaccacacttcaaaagcatcaattctttggcagtcagctttctttgtagtccagctctcacatctatacatgactactggaaaaaccatagcctttactagatggacctttgttgccaaagtaatgtctctgctttttaatatgccgtctaggttggtcataactttccttccaaggagtaagcgtcttttaatttcatggctgcagtcaccatactcagtggttttggagccccccaaaaataaagtctgcctcagtttccactgtttccccatctatttaccatgaagtgatgggagcagattgcatgatcttagttttctgaatgttgagctttaggtcaactttttcactctcctctttcattttcatcaagagggttttcagttcttcactttcttccataagggtggtgtcatctgcatatctgaggttattgagatttctcccggaatctttattccagcttgtgcttcatccagcccagtgtttctcatgatgtactctgcatagaagttaaataagcagggtgacaatatacagctgtgatgtactccttttcctatttggaaccagtctgttgttccatgtccagttctaactgttgcttcctgacctatatacagatttctcaagaggcaagtcaggtggtctggtattcccatctctcagaattttccacagtttattgtgatccacacagtcaaaggttttggcatagtcaataaagcagaaatagatgtttttctggaactctcttgctttttccatgatccagcggatgttggcaatttgatctctagttcctctgccttttctgaaaccagctcgaacatctagaagttcacagcgcacgtattgctgaagcctggcatggagaattttgagcactactagcgtgtgagatgaatgcaattgtgtggtagttagagcattctttggcattgcctttctttgggattggaatgaaaacagaccttttccagtcctgtggctatttctgagtcttccagatttgctggcatattgagtgcagcactttcacagcatcatcttttaggatttgaaatggctcagctaatcacctccactagctttgttcgtagtaatgcttcctgaggcccacttgacttcacactccaagatgtctggctctaggtgagtgacaacaccattgtagctatctgggtctttaagactttttttgtataattcttctgcgtattcttgtcatcccttcttaatctcttctgttactgttagattctcatcgtttctgtcctttattgtgcccatctttgtatgtaatattcccttgttatctctaactttcttgaagagatctctagtctttcccattctattgtccacctctatttctggtccatcttattcttatgtctaggcttttatctttaaggagtgagaggtgatacaaggggcagctgccaccaggaccccatttaagcttctcatggccaaactctttgaaccgagaactgtgtgaggaagagaccattgaattcagccctcttatttcatatttgagggagcaaggcctggaaagtgttggatcacacacaggtggtagcagagctgaaactaatatcagcacactgacggttagttgtccagccctcttcaacttgccacattacctcataagcattcctttgaatttatagccagctttatagttatttgtgtatttgtcttatgtttctctggctgtaaattctgaggggtaggactatatcttatttacatttgttgcctttgaagtagttaactgggcttctcagtacctgttaaattgcagtcaaaacatgctcttgtaccagacatgccattttcctattcttcactgctttgaaggtgttcaactcaagtcctggtccctgtctgaagccttggtcagattgtgccctgtttttgactgcttagggtcttcagtccttccaatgatcttgatagataaaatctctcatattgaggaaacaggcttggagaggttacgtggcttgccatggatcacacagctggaagtgacaaagccccattacatgtttgatatcctgtgctgggtgacatcttgcttcctgatgatcttgtttcatgtgtcttttgtggaaaatgagttcattttgtttccttatcctgattgctagcttcttgagacgagtggcgagatcacatatttctcctgtgcgatttgtagttgccaacagagtactgggcatgtagaaattgcctatcaaatactgttgaattgaatgcaaatgtaacttaatttaccaaaaaagagcagctgtcagtggcgctctaagacacttcttgagtcattcctgaatgtaatcagcagggaacagagggaagcggaggacggatgagctgtcagagaaagtcagtggtagacacaattagcaatggagtggcagctggcctgttgtcagactggtggtgaggagcggaagggaagccacgcacaagaagacagaccaggcaacataaaaagtttactgcagggatgagggatgggagaggagtactcagaagtagcctaacacctgtccaggttaatgaagatagagcactcagatacattgagaaaacgttgattaaaagaatatccagaccttgatatggctttggaggactgatttctagggtgacatttgatgggtagagaagcatttggcttagtttgtgatcattctgttaattactgaggtcatgagaaaaggaacatacgtagacgaggttgttgctggtgaaacaacttccctccccttttctccactatggtgatcagtagggtctcagtcctgagccctgatggtcagaagtgaagggaattcaaatgactgcacgtgtcctccgtgcccagagatgtgctgtgatgaccagcgccatggctgttctggtactgcttcatttcattttcttttgtttgcattgccctgaaagttagtgaggtgctttagaaattccagtactttgacagctaaactgtatttccaattctgccttttcccaaaagggtcataaaaatccactgacagaccacatgctccagattttggtttggaaagtcacactgcatctcctgagttaacaatcattttgcatctgaaccagatgtgaagcctcttgcattagaatgcatgtggtaaatgtccagtttcctcagagaagcctgcacatgttcttttgtgaagttctgtctcctacagagatcaagatcaagagcttttagaggagaagtaatagaagttcagtctgttcttttctgtttcagaaatgttcaatttagaactattttataaaagctaaagctatatgtacctcaactgcttagaggtaccagtagttaagggaaattacttcaaataaaaaattgtaatttctatgcagaataatgttctttatcatgttctatctaaaatgtaaatatggaaaagcttttcttgaacatttgcatatgaacttttaaggtgatactcatttctaggaaaatttcagtatcattgttatgagttttggtttattttcagtgtttgatagctatatagcaatcgtatttttctgtgatgtacaaataaataggaaagttctaaattaaaatgatatcagtgacaacatcattattttaatggaaaggtaattcttggggtcaaagtgctcaacttactaatttttgcaatcaaatttgttggtatgtgagggctagttcacttcagttgctctgttgtgtctgactctttgtgaccccatggactgcagcatgtcaggcttccctgtccatcaccaactcctgagcctactcaaactcatgtctattgcatcggtgatgccatccaaccatctcatcctctgtcctccccttctcctccctccttcaatctttccagcatcagggtcttttcaaatgagttggttcttcacatcaggtggcctaaatattgaagtttcagcttcagcaacagtccttccaatgaatattcaggactaatttcctttaggattgactggttggacctccttgcagtccaagggactctcaagagtcttctccaccatcacacttcaaaagcatcaattcttcagtgctcagctttctttgcagtccaactctcacatccatacatgactactggaaaaaccatagctttgactagacagacttttgttgataaagtaatgtctctgctttctaatatgctgtctaggttggtcatagtttttcttccaaggagcaagagtcttttaatttcatgactgcagtcagcatctgcagtgattttggatccccaaaaaataaaagttgtcactgtttccattgtttccccatatatttgccaagaagtgatgggaccagatgccatgatcttagtatgttgagctttaagccaactttttcactctcctctttcactttcatcaggaggctcttcagttcttcttcactttctgccataagggtggtgttgtctgcatatctgaggttattggtatttctcctggcaatcttgattccagcttgtgcttcttccagcccagcatgatgtactctgcatataagttaaataagcaggatgacaatatacagccatgacgtactccttttcctatttggaaccagtctgttgttccatgtccggttctgttgcttcttgacctccatatagatttctcaagaggtaggtcaggtgaagggtattcccatctctcagattctttaccaaatgagccacaagggaagcccatgtgagggctaactttatacttttaacaagtgggtatattaaagcatgattatagaattatgagaatgatttccatgtgtagcttataaaactttttttttttactactttgaagtcacctctttattatatagattctcattttatcctcattaagatgaagtacagtattacatgtttctttagtttcctccaaactctcaaacaaagtttctaaagctgttgattgtaaatctgttattcatgcacaaatacttacatcctcatggtgttcctttcatgtgttttatgctcctcttgtctgtaattttctttcccctcttgacttattctcctgcagattcatagtttccttgctaacacagaatctttattttgccttagcatacctaaattgtggtctctttattcactctttcttttagtaaggccctgtagattctttctgagtggccatcttgctcacttactttggcccctatattcttagtcccctcccttcaaatgtctttctaataggtgcattcagaaaatagaacttggaacttcccttgtggctcagtggttatgactccaaacttccaaagcagggggcatgggttcagggtgggaactaacacatgttacgcggtgtggccagaaaagaaaataggagcttggttcccatgggtgtgcttactacatggttgatgacaaagacaggtgtaggtttggggaccaagttctaacctgaatgcttgagttttccatttgcacagggcaggaacctgattgggtagattagggaggcttggaaattgcatgggttaagcaggagggagcaaatagttggaataatttccctgacttagctaagaatctctctggcttttgataaagtaactactacctggatcttagattctaagtgttgttcctgatgagctaagtggtcttcccagtgtgtatgggtcagtgtcctcccaattcctcaaattcataagccacctctccccctttttgatctactccttactctgttggtgttcaactttggcgtgactctgtccacctgtctgggacctccatttgtatgtatcccttctgaactgaagttggttttgtgccaccttcatatgaggctgccttcttgggtagggaatactaggggttgctccgatcccattttacctgtgccctttcctccttccctggaactttccaatggttctaagtagcagtcctcgcatgtgtagcattcctcatgatacagccattagctggaacaagggctcctggggagaaactacaatactagtaattccttttgaatttatggaaaaagtcaagttagtgcagaggattttaggtttttctcctatctgctctgttattatctgctgtactttagtacaaagtggcttatgatacagagcaaaataatatatttttagttattttgctgtatcatatagtaagtttgctatatcatttcattgtgttctttaaagcatatcttgacttctgagggttctgcccaagcatagtttgttgtgtccgtcaagaataacatggctgtactttgtaatgccctttagggaaaaatcaagtgtagctggttataaacatccttccagtagttccattttgcaagtacactggttttctgtcccaaggaggatgctactgcttggttcatctctggccagtttggtctagattttccctggactattcagccttagatccacagctctcctttcccgttgagtgactcaacgatcattgtttccaagattctttccttgttttctgaagctccagttagccctttttggaattcttaccagggtctttcaatacattccagattttcactcccagataagaagagtcctaaggttgtggttaagtgggcaagatgtgagagatggtgtctttaggagatgttgaatgaaaaagcctagcaaaccttgtaatgagctgtcagtctgagttgtttagggagaaagaaagtgttgggtacaaagctgaaggcaagtgagatgattcagagccatttgaggttgagctttccacactgattttccacatgtgtgcggtggagctcttgttaggaccttgttgggttcacaggccttgaaggtgggcttaccttcacttcttttaccagagtggttctaaattcacctgttttatatattagagtgccagcttagattccatttgaagaaacttgctaaggaaagtttgcaaccagctagacaagagcagttttctgagggagtgaagggtctgtgacagtgatgttcggtagtttttctgagccccagtgccagagcgtccagctggctgtgaagacactgacctgctgctgctaagtcgcttcagtcgtgtccgactctgtgcgaccccatagactgcagcccaccaggctcccccgtcctggggattctccaggcaagaacactggagtgggttgccatttccttctccaatgcatgaaagtgaaaagtgaaagggaagtctctcagccgtgtccgactcttagcgaccccatggactgcagcctaccaggctcccccgtccatgggattttccaggcaagagtactggagtggggtgccattgccttctccagaagacactgacctactatggacaaaaagtaacccaaacttacagctgctgtaagtcagccaagaagctccccaaacataaaatcagctctgtagcgatctgtaataaaaggttaggatgcaacataatgtgttcatcccttattgctcaattgactgtcctaacaggaaaaaaagccactatgtgctgaacagacatacctgaggcttgctgtcacttactgagtgtggctcacacatgcttccttaactactcttacaagagtggacatgtgaattcactccagatttttaaaaatgaaagaaaataaggaaagactagtatgcattacaaccttctcaattaatgacacatttatgagaataccaaatactatgtagtatttggaatagtatatggaattctttcataaatgtatcattaattgagagggttgtaatgtgcactagtctagcaaataactttgccaggcagtgtcagtgagcagtttggagatctctgagtgtggattataactcatttgactgtagatttttattccagttaaaaaaaataataataaagaggaaaaaaggtatctgaatgaaagtttatagactcttaaagcacctccatggatcccagaagacttgagatcccacaaacttgaggcctctcataaggactgcagtgtcttgttcttttatgatgtgttattttcatctcctttaagacattgtcttgtgcttaattttctaaaataagataattttcttggaacctaacaggtgaagtaggaaaacataaacaaggatatatcagattgaaaaatgcaactaactagcttgaactagcacatatctaattctgcatgcaacaaacagggaatacagattattttcatacttaataaacccccccaatttgatattaagcagaccacaattactgatccaaaggtaataaaattagaaaacaacaacaataatcacaaaaaagccaacagtgatctgagaggctgatttagaaataggctggatgactgcaaatacttctgtcctcttttgcataagtaaactcaagacacaccctagtctatacacagctgttgatagaaatgcaaacagtcctttgctaagactgcctactgaataggtggaactgggcaagacttcttgagaatcaacaagaagtatatcccactggacctgggccataggtgagtttctttttttttccccttttgatttagctattaaagaatatgatatgtagggagcagctaaacatgtgttataaatatattaacagagagagtggatctgacaaatgctagaaagacctattgccggctgtttagaacttatcggcgccaaacaagagaggctaagaattctagtactgttgtctggtgctgctaaaatgtcaggaaatagtttgatttttcttctgagcctattttactgtttttaaaagaactaagttaacatatggtggaatatttatagacaatagtgttttaaactcatgatcaacttgtgtctatatgctgccttttcatcaatatatgataaaacccaagctggcaccatggagaagcacttgggtttcagaaatggccctgttctcagacttagctggaggaaaactcccttccttattggaaaagccaaagtccctaaagatagagcagctcatgagcttgtgaaggagggtccaataccttaaaattggcatagctgctcactgttataaggagagcaccagtattcactgactggcatcattggtgtaaggtcagtttttgctcgcacaagctgaagtttaggacgagtacctggagatgagggacaggaaagccagaaaaggagagagagcagaggggtcgtgactcagggtactgagtagaagtgggactgttagaacccaacgggagggaatcatagggtagataggagactatggaaaaggaaaccagctctgaagagacgatgtgctttcataagccagcctgcatctgagaagcatatccctggggcagagaacagctgtgctctgatgtggtcagcgcaggcaaggctatggggtcggcagagtgagggagaagtaaagacatatccagtgcatcttagtggcctttgtgagtatctgtatgccagaccagtgcttcgcctcaattgggtgtgtgtgataggagccctcaccattcacagttcctgaaagtacgcacttacagtgcgtgtgtgctcagttgtgtccgactctttgtgacgccatggactgtaacccaccagactcttcttggaattttccaggcaagaatactggagtgggttgccatttcctcctccaggggatcttcctgacccagggattgaatccgcatctcctgccttggcaggtggattctttacctctgagccactggggcacaatgcatctgatcacagaaaagatgaggtacagtctgtgccctttgattaagaagtcagggaaatgttacagtacaccgtaaaaaaccacacttacaaaacaacagtgacaatgatgtcctagtatgcaaatgaaggagtctagaaaggcaggacagtggtgtactctggacacagtttctctacatgaataaatatagagtttttgtcttagttttttaaaaaggcaatgatgaaggaaccctcttttccccagctactgccaactcagggatatttacccagttgtttttattgtttggacagtcatcttcaacaggtctgggttcttttaattcactatttttttttcatcctaaaattttcttgtgaaagaagtattgttgctccatcacaaagtgaggtgattctcttctcgattgggtgtatttcctctgagaaatcagcatcttccctgggttacctcacatgaaaagctttgaagcaggtgagatgcacatggacagccaggttgtgttggccaaaggccttccagccctcccacattccaggaggaccagacttggcagaatcttcaactctgtttctcagtcataaatggaagggtattctgtgttttgcaaccttggaaatgcattcttctgtttcaggtcctttgagtgcttcttcatttgtaatccttccagtactggctgtggtagcaacatgcttcatatttccatctttgagtcttagccctgggagcttggcatcactctggcatagccaacgactcttcacttctacttcttcaaaatttaatagcaggatttcctctatgaatcagttagtcttgcagatatattgccttccaggtagcttagatcttttcatactgttcatggggttctcaaggcaagaatactgaagtggtttgccattcccttctctagtcctgaatactcattggaaggactgatgcttaagctgaaactccaatactttggccacctgatgcaaagaactgactcatttgtaaagaccctgatgctgggaaagattgaaggaaggaggagaaggggactacagaggataagatggttggatggcatcactgactcaaagggcatgagtttgaataaactctgggagttggtgatggacagggaagcctggcatgctgcatttcatggggttgcaaagagtcagacacgactgagcaactgaactgaaccaagcttaggtcactcctccatttccattttcagaaaatacttctactccattctttgggagctttattaggttcagtgtccctcttaagatgtcaggaaaaaaaaaccagtcttaatgacataatatcagttttccaaccttaatctgttgcagtcattagaagagctatgatatatcggtttccaccacgcattttgctactcactttacacaggtgggtggtggtgtcccattgtttgaatttccagaccttgactccttcattgtcttcaagggagtagacttcacaggtatttcacttctttgtaattcttggatcttccttgcttcatgttgtctttaagaagcacatttagccatgggcgagacattccattgataggacatgtggttgtgaccattatgggggtactttcacattatttgagatattactcagcaaaccaaacagccactcctattaccacggtattgcctatatttcacaattgacagattctgtagtacacctttattcctgttaccctgtgtctataaaacaagatgtacttgtcacaaattgtgagtaatacaacacccagtgtttacttttcataaatttcggtaaacattgtattctgatcctaaaagaggtgtggacaacaaataatgtctttggaataaatgaatcaatgatctttatatcttaaaaaaacaaagccagtatcttatttgagttgttgatagtggtcttccagaagaacattttctacttccatgaaacattctggtgcctcttctttttgtagttgcttgaattatttgtctactggtttatgttggttacctacagaagtgatggtaacatctcagaaatagtaggtcaactcttgggtttggactgtttattttttctttattctggaccttctctttaatactcataaagaattgcaaatgtctgaaggatgcttttacaaatgatatatttggatgtcctggcaatatttggaaatgtatatttaattcaacagtttttgtagataattcttttttttctttgaataatttggcactttagatatcatctaaatgacatttagatatcatcatctgctagaagttagtcttttcactttgtttaaatagggaaaatggaatattcctatgtaacaggcacatgtataaatattaagatatgatattagattctgtcagtttttagtcacgtgcctttcttttcactattaatggtggacgtatgatattactacaaaacactatgttgagaagaatccatttacaaatcataggttataggtgaatatgtaatgcacatataatctaatattctgaatttagataaagccaaagtcatctttcaataaggagataagaaataaagagattcccattcctgtctatttttcaaagccattacatttctacttctctctatctaagatcttcttgaaaagaataattatttgtttacaccaagtcttaattgtagcatgtgaggtctttgatcttcgttatggcacatgaaatcttttttttttcttttaatgtttttaatatttacttttatttatttggctgcattgtgtcttagttgccacatgtgggatctagtttcctgaccaggaattgaaccttggctccctgcattgggaggtcagaatcttagccaccagaccatcaaggaagtccctacctaagatccttgcacaaacaagataagctctttgtttataatttcatctatttcactgtcaacctattcaggagggtggaaatgtatccattcaaactagaccagaaattgagaagaggaaggtcatgtgcacagaaagcagagggtgtctcctactgtagaaatggggagccccactcttgggcagtacaaatcttgctttcacagtgaaagtaaatgtgtttcacttcagggtgtagcaattgcagtgacctaagacagtggaaacagtgtcagactttattttttggagctccaaaatcactgcagatggtaattatagccataaaattaaaataaaaagccatgaaattactccttggaaggaaagttatgaccaacctagatagcatattaaaaagcagagacattactttgtcaacaaaggtctgtctagtcaaggctatggtttttccagtggtcatgtatggatgtgagagttggactgtgaagaaggctgagcgctgaagaattgatgcttttgaactgtggtgttggagaagactcttgagagtcccttggactgcaaggagatccaaccagtccattctaaaggagataagtcctgggtattcattgaaaggactgatgctgaagctgaaactccaatactttggccacctgatacgaagagctgactcattggaaaagaccctgatgctgggagggattgggggcaggaggagaaggggacaacagaggatgagatggttggatggcatcaccgactcgatggacatgagtttgggtgaactcctagagttgatgatggacagggaggcctggtgtgctgcgattcatgggttcacaaagagtcggacacaactgagcaactgaactgaactgaagacagtggtagccagagctcatttggtaaacacaagttgcccctactcaaatcttggtatattataagatgctttggtgatgaaccctctagctctgacagtgctgaaatcacccagttaaaactcactgttagatcagaatgccaaggtaacttttgtgataaaggccttgtacatgactgcacctaaattgaatttttcaattttttcagaaggttcaggcactgattgtaaaattacatgctttgcttaataagaatgtgatgacgctatgctttagtaatagtattgataaagagaactttcagttattgaacagaatgcagaccaagcagtgtgctaaaattttctgtggtttatgtcagttcatccttaaggtaacccagtgaggtttgtaatgttatttctactttgtagtttaagaatggaggcttagtgtgaagaacgtggaccaagtcacaccaacaagggttcagaatttgaacccaaacctacttaccaccatattaagagaacatccctttcttatacagacttgaagttctccttaaggatgatgacaaaaagtcatgactgtctaccaccatttgtggcatatggtagtggttcaggtaatattatctctccttgctttgttactctctgtactaaatatggttgatagagggaaaatcaagctttcaagaactggccggattatctgggataactttaggatgactctgccttgtgataggggatcctaaggccagaatctatgactgaatttaatagggagcttcatggagaatttggactatgttgtgtgtgtgtgagggagagagagacacacagggatacagagattcacacacacacacagagatcttcccctttgtgttagccaaaccattttcttctatcttatttcctgaagagcaattaaaatatattttgtttttcaaataaggaagaagatcattgactttctcttaccaggcattggtcaccacatggtacttgttgaagaagtgggtgttccttgccttctattgttactctgatgagagtgagggtggagagcactttgaaaaaatatttgtgtaaggaggagagaaagaagtgagctggataagaaagtcttttgcctatcccaaattgagggcattcttgtcttttattaatagaagacatttccttgaggtttagatgctacttcctccaggaggcattgtgttgaaagaagtgaccttatgttcaaatgctctccatagagtcttattttatgtcttattttcactttaaggattcagttctctttttagatttctagggaagaagattgcctgggtattgacccttcagaactagactgctaggtaatgatgctaatagcagttattgtgtgccaagcactatttcaaactttatatgtatacactaactcagttctcacaacagatgtttgagatagatttactattgtgcttcatcaaatctaaatgtgttgatgctgtatcttgattttgctagaagatgcttttgaaaagttttcacacaactgtatttctagtgccattttatttacaaacaattgcaagttgtcatagtttgtaaaactgtgaaatataagatacatcctactaataaaaagttaaaataacaaagcatatacataatagtattaagaatagaatatcattcccatttttaaaatggagaccctgaggcaaaagacattaagttttataaagtgacatgactgaactcacacttgttgtgattctagagtccatgtgcttaacctccacttctttctgtctctcaacaatacgttggaattgagtccatgcagacatgtgttagactgcccaagacccacttactcatcctttcaactgtggcattcatgatagaatggcactgagatttttccaagggaggaagtatgtatgatgtgtatctttagggctgtgatgagggttttgccctaatgcatgcaaagtgcttgacatgtgggcatctgacatatttttagtaagagcaatgcaattgggaggccttgatgaactggcttcccaaggatcagtaggttggagtacctgctggaagttgtgtgcacaacatgttgtttgagtgccccaaattctgcattgtgtattttattctgttcccctttgtgtgctaaaataccaacataaaaagaggtgggaatactagaccacctgacctgcctcttgagaaacctgtatgcaggtcaggaagcaacagttagaactggacatggaacaacagactggttccaaataggaaaaggagtacgtcacagctgtatattgtcaccctgcttatttaacttctatgcagagtacatcatgagaaatgctgggctggatgaagcacaagctggaatcaagattgccaggagaaatctcaataacctcagatatgcagatgacaccacccttatggaaaaaagtgaagaagaactaaagagcctcttgatgaaagtgaaagagagtgaaaaagctggcttaaagctcaatattcagaaaacgaagatcatggcatctggttctatcacctcatggcaaatagatgggaaacagtggaaacagtggctgactttatttttctgggctccaaaatcactgcagatggtgattgcagccatgaaattaaaagatgcttactccttggaaggaaagttatgaccaacctagacagcatattaaaaagcagagacattactttgtcaacaaaggtctgtctagtcaaggctatggtttttccagtggtcatgtatggatgtgagagttgaactataaagaaagctgagcaccaaagaattgatgcttttgaactgtggtgttggagaagactcttgagagtcccttggactgcaagaagatccaaccagtccatcctaaaggagatcagtcctgggtgttcattggaaggactgatgctgaagctgaaactccaatactttggccacctgatgtcaagagctgactcattggaaaagaccccgatgctgggaaagattgaaggcaggaggagaaggggatgacagaggatgagatggttggatggcatcaccagcttaatggacatgggtttgggtggactccgggagttggtgatggacagggaggtctggtgtgctgcggttcatggggtcgcaaagagtcagacacgactgagcgactgaactgatactgaaaaataattcattatttccataattgaggagtggaatatttttttctcctgaagaataggctccagagacaccactcaggacttgagtaacaaaagtaatttttcgtacgaagatggttctatatgaagacttacctgaatctcagataagaaacctatcaccatcaatatcctgccaaaacactgaaaaatctctattaacaatttgaagacctgcctgttccctgaaaccttgtatttccttgcagcttccttactgtttagaattctggtctctgttaacccaaaccagcctggtcattgtgtccaatttagaacaaactctaaatagcctcccaatttgctgaatgttccgcgcaactgaaatgtatatttcattgttggatcacagatcaatgttttgctgccagatccttgagataagtcaggaggtgagttctcaacccaagaggctggtgtcactcatcatgccttttcctattgtttatcattttctcctcagacagtgtcctttctcccaaccagtatactgtactccaacatggacatattgttcagttgttgaaaaatactatactgtggtggagatacatttttgagtacagattgtctacaattgtggtgattataaataaaattttaattttattgatttggcataagtttaaaacaccaaaccattgcttttatgcttctgatgatcattttacttttttagtcttaaactgaacatctgatcagtcaatttggacttttttttttaaatgtttattttttggctgcactgggtcttagttgcaacacgtgggatcttcagtcttcattgtggcatgcaaactcttagttgtggcctgtgggatctagttccctgaaagtgaaagtgaaagttgcgcagttgtgtctgactctttaggactccaggccagaataactggaatgggaagcctttcccttctccaggggatcttcccaaccgggggatcaaacccaggttttccacattgcaggcaaattctttaccggctgagccacaagggaagccccgtgttccctgactagggatcacacccaggacccctgcatagaacactgagtctttgcctatggaccaccagggaagtctcaacttggactgttttgaaccagtttttaccttgaactagttacaagtggtttgataaacttagagcaactgtggtccagttagagatagatttaattggtcagtgctaacttgattcagtgaaatttattctgaaccaatcaaacctcatgtgaatcagtcagaacctgcttatccaagtgagagcttatttgagctagctaaaaccagcctgaagcctatttgagctcttgaaaccagacctaaatggttagacacatgtggttttagccaaagtggctttagatcaatcaaaaatggttttgtaggtagaacgtctttgaacttaactctttcattctcaaccagaatgaaccattgaggttcttttgaacaagtatgaattggttagaatggattgaagtgttttatgtaatttaaacctgattttaggctagttctaactcttttgaaaatgacatatctacttaaaattaattgaaaatggttagatttagccaaaaaagagggtcttcttttctgactaagtgaactactccgagccagtcagtaatcttttgtgtcagaaatgcatgtttcaagctgcccagaggctatttcagaattgttttaggtcttcagagccctgtccgatatgtccagagtcgggagaggagcttgagccagcatttactgagtacccagcatctgccaagcattgtcctgggcactccacaaacagtgtctcgttcaatccttagaacaatggggtgaagtagtgtacattatcttctttttcatagaatggaaacctgaaaatccaaggttgaaaaacatctgagtagccagtaggtgggagacgtggaatcagtctagctctgcttggcttcaggagtcacgtgtttcctgttaggctaccttgtatgataccaaacctgggcactttaaaaaatatatatttatctatttatttggctttgtcaggtcttaatcatggtaaagtaggatctttcattgcagcacacagattctctagttgtggcacgtgggctcagtagctccatggcatgtgggatcttagtttcctgtccaggaattggatccacatccccaacattgcaaggtagattcttaaccactgaactaccagggaagtcccccaaacctggtcgcttctaagtccaacatgcatttgtaaaaatctgagtaatggccacaaagcttggggtagaatagacattggacttgaagttaggagacatttgttctagactgtgcaaatgagttaaactctctggattctgttttattgtttagcaaacaacccaggaaatggaaggtctgaacatttattttcaggtaaacaaggcagataattatctaaaggtgtagtctaaagaatataaactatgattaataccaacagtgatgtttgtactgtcagttgcggtatttcgtttgttaatacttcttttatggtggtttggttttgaacagactgttatgtattgctgttaccatgaatagaaaacaaaatccatgaagaccatttatagacttaggtgtataattcttctcccacgataactaaacactttaaattcgggggccctaaagatacagtcatctgtctttgaattccatttaagtaggtttagagagttctagaagagtgtgccattgatgacaacattttctcctgtacctaaagtgatacaaaaacatatttatagaaatgaccaactttttttcaaaataaaaataaagaggaaacaaggtagccacagaaagttcttacatcactctccttgcagaatttggagttgctttctgctttctcatttatttggaggggaacccctctcccccagatggtttgatgttatctggacctacttttcaattcttatctcttatttatgaataacttggagccagtcagatgctgtgatgaaacatgctagtctttatttgtgcccaagtggtcatcttctggagaagtgttctgttgcataccatcaatactggcaacctgcacctgtgcgtacagaagctgtaaatggaaagccatcatctgcactgtgtcactctttacagtgtgcaaacagagtgctgaatgtttgtagaggctttgcccttagtgactgaccagccatatctgaatgtgaggtcatagctctgcactaaggcactctgcagaggtcactgcagcagcttcttgggaatcagaattcaggatttttgagcataaggtgagtcaccaaattgaggaagggctaggggaggcaaccttgaaaagtcagtgaatgtccttgcctgagcttttattaattttatgtatctataggaataatccaataggaagcattgagagttgtggttaagtttctggataggagctgaccgggtgaaaaggggacagtgagagggaaatcagcagaatttttttccctttattttggctacgctgagtctttattgcagtgtgtgggctcttcgttgccacatgtgggctttctctagttgtggctttgcaggggcttctctagttgcagcacatgggcttagttgcctggcagcatgtgggattttagttcccccaccagggatccaacctgcatcctctgcactgggaggtgatacttcaccacgggggaggtcccccaaaccagcagagtttaacggaggacttatgatgtgtatgtggataggtaaatgtgtatgttgatgggcagatagcattgtcagtgataacaggatgattggttttcggattttcaagaggatttgttggtattcgaaatgggaggataaaaagaagtaagcgttccctgaagatagactatgtgtccagtcagattaatatcttgaatagtttgaatctatttaaaggattaaaaataaaatttgaaaagtgctgattgcaaaagataaaaggtaaccatggttaggtcttgctatgaaaacaagagtatttattctcaaaggtagacttgttttggccagtgctgaagagctgaattggtagcatttcctatagactatcaaggcaaatgtaggtaaatgagcccttcataatggaactcagttctcaagtgagtagtgatattccagaaaaatctgatttaatatgtagtaggagaaggcaacggcaacccactccagtactcttgcctggaagatcctatggacggaggagcctgttgggctgcagtccatggggtcgctaagagtcagacactacagagcgacttcactttcacttttcactttcctgcattggagaaggaaatggcaacccactccagtgttcttgcctggagaatcccagggatgggggagcctggtggtcgcacagagtcggacacgactgaagcgacttagcagcagcagcagcagcagcagcagcaggtgacaataataacatgtgaggaagctgcaaaccaagttttattagcattatctttgaagaaactgtaatgacatgtgaaaatgcataggataaacgaaattgcctagatgtccaagagagaagccgaggatatagcactaggagactttgaaaaaggaggtacagttggaaccacttgcactctaagaattattattattcctgtaacattctctttggagaaagaaatggcaatttactccagtattcttgcctgggaaatcccatggacagaggagccttgcaagctatacagtccatggggtccaaaaagagtcagatacaacttaaggactaaacaacaacaaacattctctttcttcccttgttctgttaacttttattatacacaatctttgtgtaagatagtgaccattatcttcttgattttcattctcagttggaatttttgttttaagggtactataacagcacagcacagttcagtagcatatctagcgaatgattaagtctttgggacagtgaataatgtctaaccgtttcttcacagaacccttaggcatataggtgttatgtaggagtatttgttgaactggatattaaaagaagtcactttattagcagaggattctaatattttctaatgagtttttggtaaatatgcatttgtttgtatttttcaggtgacccactgagttcttcattatgtctgatggagactacgattacctcatcaagtttttagctctgggagactcgggagtagggaagaccagtgtgctttatcagtacacagatggtaaatttaactccaaattcatcacaacagtcggcattgatttcagggaaaagagagtggtaagttctgcatccttccatataaaaatgtaatctctgagtcaacctttgcctgtctgttttatttacttcataggaattaggaggacaaaggttggaatctaaaattaaagggtgcatatgaaagtgtattatgttcagtctgagcaatgtgattaaaggctgtaactgaggacacttcacataaaaccaagcaggtaaaataaagtaaaagtgaagattttttaaaaatttccttgatatacttctggctggtatcttccttctgaattctgaaaagtgatttgtctacctttattatgaagcttgcaaaccaccctgcttttctcttaattaaggcctcagcagccccattcactaggtggcggaactcattgaccccaccaggagtgtgaggttgaagaacgggtgggaatgactgtgcatatggatccaggaagtaaccaaaagaacagtagggttctgcagaacaagagaagaggttctttttaacaatcgtatttattttttttgaaggactgcaagacaagttattctcggggtagagaggaagtcaggaggttggtgtgtccaggaactacattttttacaaaaaagcaaccattcccataaagcaggtcaccaaatagtcaggaagactaaggacaaagaccctttggtggagcgtattctacttgggaaatatgcaagtttctggcttcgaggacagaagaattcattctttctgatccactctaagtcttttattctactaccagaagccttttcttctactaccactgttttgttttgttttaaaattatttttaaattaaggtatagtttatatacagtattgtgtaagtttcaggtgtaccatatggtgatttacaatttttaaaggttatattctatttatagttattataaagtattggctatattctctgtgttgtacagtatatccttgtagctcattttatacctttgtctttttcatgattattttgggatgcttgcaatttcaaatgaattttagggtcatcttattaatctctacaaagaaatcagctgaaattctgacagggatcgcactgaatctgtagaacagtttggggagtgcacgcgtgctcagttgtgtcagactctttgtggccccatggcctgtatagtccaccaggttcctctgtccatggaattttccaggcacgagtactggagtgggttgccatttcctactccaagggatcttcctgacccagggattgaacccacatctcctgcattggcaggcagattctttaccactgtgccacctcggaagcattcacatcttaacaatattaagtcttctgatttgtgaacatggaattttttgccatttagatcttctttaatttctttcaacaatattttgtagctttcagaatatattttatactttttaaattaaatttattcctaaatatcttaattttttatgctattgtaaattgttttcttaattttatttttgaattattctttgccagtgtatagaaatacaacttattttgtaagctgagcttgtatactggaacagtactgaacttgtttattgtttctgatataacctgcatgtgtgctggtggagggggtgtctgtatctgtgtgtgtatctgtgtgtgtttattccttaggatttccaatatataagatcctcctatcttctgttatacttcttcttttccaagttggatatgctttctttttttttttcctatttgccctaatgagtgcctccagtaaaatgctgagtagaaatgttgtaggagaacatctttgtcatgtctttgattttaaggagaaaacattcagttgccataaagtataatagaagctgtgtgtttttcatagatggtgttcttcagatccaggatgttatcttctattcctaattgttgagcatttttattatgaaaggtgttggattttttcaggtgctttttctgtgtctgttgagatgattgtgtggttttagtcctttattctagaactgttctgttccattataaatcgatattgattggtttttgtatgttaacccaaccttgttcttacgataaattccactcagtcatggtatataatcctttttatatgttgttggattctgtttgctagtattttggtgtctgtattcaaaatggatattggtctatcctttttccccctcatagctttgttttcggtatcaggataataaagccctcatagaatgaagtgggaaatatttccttcttttctgtattttgaaagagtttgggaaggatggctgttaattctaaacatctgataaaattcactagtgaagacatttgggcctggtcttttctttgtgggaagttacttttattatgaattcagtcttcttactggctatatgtctctttagattttctgttttttcttgagttagtttcaattgtttgtgcctaaaaatttctccatttcttctaagctatccaattttttggaatatggttgttcatactattcctttataatctttttatatatttaaagttggtagtgttgtcctttcatttctgattttaggaatttgaatctcctatttttattcttagtctaactaaaggtttatcaattttcttgagcttttcaaagaaaagataatttatttctactctaatctttattattctttccttctgtttgctttggatttagtttacttttatttttctagttttttaaggttgaagtttaagttattgatttgagatctttcttgttttttaatataggtgtttactgctatacatttacctctgagcactactttagcagtgaagctactttttgtatgttgtgcttttcattcatctaaaaatgcgttctagtttccattatgtttcttctttgacccattggctgtttaagactgtattgtttaatttctacatacttatgaattccccaaattcctttctgtaaatgatttctaatctttttttaaaaccacattatggttagaaaatgtattttgtataactttagtctcttaaacttgtcaagacttgtttgatgacctaacataaggtctgtccttgagaatgtttcatatggaatcgcatgaggtggccaaagtactggagtttcaactttagcatcattccttccaaagaaatcccagggctgacctccttcagaatggactggttggatctccctgcagtccaagggactctcaagagtcttctccaacaccacagttcaaaagcatcaattcttcagcgctcagccttcttcacagtccaactctcacatccatacatggccactggaaaaaccatagccttgactagatggaccttagttggcaaagtaatgtctctgcttttgaatatgctatctacgttggtcataacttttcttccaaggaggaagcgtcttttaatttcatggctgcaattcatggggtcgcaaagagttggacacgactgagcgactgaactgaactgaactgggaagagcgtgtgttttgcagttgttgggtgaggtcttgtataggtgtctatgttatgtctagttgacttagagtgttctgcagctcttctgtttccttgttcatctgcttgcttgttttatccattatcaaaagagtgttgaagtttctaaatattgtcaaattgtttatttctctctttttatctgtatgtattcttaaaggtaactacctgacccttttatcattataaaatatccttttttgtctctttttgtcttcaagtctattttgtctcatattagtataactcaagctctcttttggttattgtttgcatggcattgtatttttttcattcttttcctaacaacctttttgtgtctttgaatctaaagtatgtcttttgtagatagcatatagttggatcacatctttaaatctagtctgctaacccttgcctttcagttggaatcttcaatccatttacagtcaatataattactaaaaaaggaggatttatgtctgccattttgctacttattttctatatgtcttatctttttttgttgttctgttacttctttgcaccctctttattttgtgtttggtatagacaaatagacattttctagtataccatttaaattcccttctcactttttattttttgaattgttttcttaatagttcccctgaggattaaaattgttatcttaatttttaacagtctagtttggattaatacctacttaatttcaatgccatactctgctcttacatgggtccatatcttgcccattccttttcactgttattgtcatacaaattgcatacatattgcatctttatgtaatgtgtacctatctacacgagtttataattattgctttatgaaattgtgttttagtcagatgcaggaaagagttatgaaaaaccatttatattgtcttttgtattgacccatgtagttacctttactggtgctctttatttctttgtgtgaatttgaattactgcctagtgtcttttcatctcagcctgaagctcagtctttgttatttcttgcagggcagttctgctggcaatgaattttatgtttttgtttatcagagaatgttttaagttcccttttaattagaaggatagctttgctggaaataggattctcggtttgtagtctttttcctttcagtactttttattgtcctactgccttttggcccccatttttatttatttgtttcttaatgataaatcagttcttagtcttattgagatcccttatatgtattgaatcacttttctcttgatgctttaaaaattctgtcttttgatttttggcagtttggtgatatgtctagtcagtatcagaaagtttatccttcttgaagttcattgagtttcttgaatatgcacatgaatagttttcatcagattttggaagtttttggctattatttctagaagtagtttttctgcctctttctgtctctccctcccaccccaccaaataatatattacttgtacattttaaaatatatttataaagatatataatgtgcttacacattataatgaagagccaactcaatgaaaaagaccctgattctgtgaaagattgagagcaggggagaaagaggcaacagaggatgagatgattggatggcatcatcaattcaacagacatgagtttgagcaaactctaggagatagtgaaggacagggaaccctggcatgctgtagtccatggggtcataaagagtcagacacagctgagtgactgaacaacaaaaatgtgcttacatcatttagtacaaattattgtgttatccagagacaattatttgaaataaaatataaataagattgtattccagatggaattttctttagaagtttaagtacttaggggagttattctgaatagctaagtgagaagagttcaccagcctcagaagttctcttttctctttcattttgccattttaggtgtacagagccaatgggccagatggagctgttggcagaggtcagagaatccacctgcagttatgggacacagctggacaagagaggtaggagatcttcagtcatgtgctctttgctgaaacaaaggggaaaaacaattgcactcttcacacagtgacctgatcaggaaaaggccaactgattcgttgatgtgcacctggataagccatgctgccaaattagcaggaaatttatcagtctgaaatgataatagtggctttatttcatacaaggtcaaagggaaaatgaatccttttaaaaatggatgcttttacttatggacttctttctttttctacccctttttaaaaacctgtatacttgtctccatttacttttgtttactcaaccatagagaaagtagagttgcatgcattttccttacttgattattggaacctagcataaaaatcttgttggaattaacttatatgatcagaggttgcttgacaaaaatgtcaaatgaaatcttcatataaagttactttttttgattgaaatatagttgatttacagtgttgtgttaatttctgctatacagtaaagtgatacagttatacaaatatatacattcttttttatattattttccattatggtttatcacagggtattgagtatagttccctgcactatacaatagaaccttgttgattatccattgtctgtataatagtttggatctgctagtcccaaactcccaatccatccctcccccacctacccctcccttggctaccacaggtctgtttaaagttgctttcagttagctacagctgtgttatctctcacactttctttaagggattttatttgtttgtttaactttttcttatggaaaactccaagtatatacagaagtagagaggcgagtacagtgaaatcaggtactgacttgccaatttcaaccaacgtcaggttgtggcccatcttacttcgtgtatatccttcacctcttctcactacccccgccccacaattattttgaagcaaattccaaatatcgaactatttcttttgtaactattttggtccatatctctgaaagatgagtagtctttgtgtaaaacatggattagaaatacttgagaacacttaaaatagctaattaaaggacaaattcttaaccagtattttcttctctggagcccatgcctgtcagttgcaggctttgcataaaggcaaaatgagagaaaacctactacgagagagagagaggcacagagatggcaggataaacccttggtgcatgcatgcacgtgtgtgctcagttgtgtccaactctttgtgaccccatggatattggagccggttaccgtttcctaagtcagaggatctttcccacccagggatcgaacctgcgtcttttgcatcttctgcattggcaggcagattctttaccactgggccacgtgggaagcccaaatccttggtggagagggtacaaagaaaggggaaattgaatctgattaccatcaccctaaagccaaagaatggttctcagagataagtgatttctgtagagactgaaattaaaaggtcatgtgtggaacacatcgtgatgttaaatcaagtcaggctttcacaggacagggaagacacatacacagcaagtaccattgcttttggcctatttaacttttaattgtacaataaattcttgactgagacaaagagatcatgagctagttcttgccatccctgtccagaaggctggtttttcaaatcacgtggcttattaacacataaacttctaccagttagataaataacttattatacacatttggaatatcatcatctaatttgttaaattaaaaaaattgtttttattttaaaagaaaattgcaataactgttggcattttagaaagtctgtgtatgttttcaaatattttttcttgttctaaatacctatttactatatttttaagatactcaatgtcattgattatagtacctaattttacactgttgaaactatctattatataatagcataattcagtaaaccttgtgcaagtaaggtctgtgcatagtgtgcatgtatagtacgaagttagtagaaacagtggcatgttgtttaacatctgacttgttattgatgaactgttgtaaaaggcttgaggggactgctggtggctttatgtttcaaagagtagggatgtggtttaggtgaccaatctgcttttatgttccaggtttcgtagcttgacaactgccttcttcagagatgctatgggctttcttctgctttttgatctgacaaatgagcagagttttctcaatgtcagaaactggataagtaagtagtattgtctccctgctgtttcttcccactccctgaaacagaatctctcttatattctacttcttttgtaagttgttttgtaagagctcctaatgctgtttaaaatgctatttaaaggagcacggctcttagttcaggagcaaaggtaactgaagtcctctgctttccctggtcatgctaacctccatttgttgagtgcatcttgcactctagatccatggagtgttttctgtgtaatctcttcaccagtctttcccacaaggaggactcttatccccattttatagatgaggagatagaagcctagagaagtgctatcgagtctgataccatcccagggttcaaaacatgtagtacattgacccttttgaaaaattaatgaatcctaaccctgtctagtactcttgcctggaaaatcccatggatggaggagcctggaaggctgcagtccacggggttgctgagggttggacacggcagagcgacttcactttcactttttactttcatgcattggagaaggaaatggcaacccactccaatgttcttgcctggagaatcccagggacagaggagcctggtgggctgccatctatggggttgcacagaatcggacatgactgaagcgatttagcagcagcagcagcaaccctgtctcaaggtctcttctgtatttaaagggccagagcacttgccaggaggatcttgtcatagaaacctctagaacttggccagagtggtccccagcacagtatacatgaacctgcattttggctctttggagacagcctgatagcttacaatagtggttagtagtcatttagaatcctactacttggccaaatgtacattttcctctgttggttgtattggtggaatcatagagaacctactagagaggcctgtgatattaaattcctaacagccaaatctttagaatgaacttatttataaacccctactacataacaacttcttatagtttcagtattatgaaagggtaatgggctgtactttttatagtagaaaaccttgtttttaaaaatgagtttttaaataagtcattactgaatgtcttgtggttttcaaagcattttcacattgtttgtgtccagtccccatgttccccccatgaggagatccagggaggtggtgtatcctcattttaggataaagatgcttagtcttatggaataataggcttgcccaaggacatggagcttttggcttttgattcagtggcctttttggggatggggggattcagtggctttttatgctctttctcaactaagttaatcactaagaattgaagagctatttaataccttaaatacaggttccccaggtcagtcatgcttcggcttcacgttgttaagtgcctgtctgagtcacacacccttttggctgaatggcagtgactgtttctaatcacttatcctcattccctgctcatcatccttcattcaaaccagttctggggctttcttaagcactttctaaggattgttgttagaaatgggctcatagaatcttagcacagcatggtgggaagagcatcaacccgcctgtttttcactgggagaaaccaaaactctggacaaggtaaatctcgtccattgggcttcatggctagttacgtgcaggataaaatcatgtgaaattctgtatattattttgtttttttcttatagtgtaaaagaattcttcttgctcagttaggcaaagaaaacatacatattggagatttcacatcttcagtataaagtgtgtattcactgtcagaaaaattcagtgtcagaggtagtaataacaaatcttaactaggaataaaaatttgtcaattatatatatattttatttttcctctgcctgttagtagtttgaatattaaggggatcattcttctttgagggatcgaattaaatatatattttatatttaatgtatattttaatatttaatgtatttttatgtttaatgtatttaatatatataaattatatatatatacacacacacaagcatatatatatgtgtacacatatatacatataccaatggtggatagcagagcagaggcagtattgcattgaacaggtaactgagtcctgggtgctgaaggcagaaaccaggtctgcactctccctttgcttctccagagatgcattgcagtcctttctcccttgaactcagatctctcctgtcctcatgggaaacgggtaagagttccaagttgatccctgctgagcttaggagactgaacagagatctgtgtcctctgggccggaatttgaaatcaaagaggaattggatagtcttgtatcactcacctgtttttctggagcttgaggatgaaccagttgtacctatgggcagcatgttttatagggaaactccaaagtaggctatatttctaaattgttcttctgtagcctcacataagtgggtcaagagcccaacaagtacattttttaacatatttttgcctttatatttttattcctattattccctctgtctgaaaagccctctccatactcactcccattgtcttaaaaatttagagttcaatttactctttaaaatctgacaaaatatggcccccatgaaattttctgtgataactttgttgaattaaattttttctctcctcttttaaaaaaattatattaaaatatagctgatttacaatgttgtattagtttcaagtgtacagcaaaataaatcagttatacatgtatccattctttattttttaaagatctttctccctataggccattacagaatattgaggtgagttccctgtgctatacagcagactcttattatctattttatatatcctgtgctgtgcttagtcgctcagtcatgttcgactctttgcaactccatggactgcaggaggggttcctttgtccatggggattctccaggcaagaatactggagtggattgccatgccctcttccaggggaatcttcccaacccagggattaaacccaggtctccacattgcaggcagattctttaccatctgagccagtggggtgtggatgtcagttttattcctctcaaatggagttaagtttcctattatgttttatactgcttacacatgatccttatcacataccgtatcaagttgtagttatttatgtgcttttttttctttggtgagatattttaaaagaattcataaatttattttttatataaataattcacaacctttgtagaaaagttaggaaaaaagaaaaatgatcaattatcacacttcccagactctacaaaataaatactattaaacattattactggtaatacacaatatctctaaatgctttattgcattaaaagaatgattttcaagtgtgagcatgcatctagatccccccagagaacttgttaaaacagattccagacttcaaacccagccttcctccttcagtagatatggggtggtacctgagaatttgcatttctagcaagttcctaggtgatggttgttaggctgctggtccatggaccttacctcaagactcactgaattaactcacttaacctttaccttacccctatgaagtaaatactgtcattgtcttcctttaaagagggggaaactgaggcacagagtggccatgtaacttcctcaaggccacacagctagtaaatggcacagccaggattcagccttaaacaccctcggtcccaagttcatttcataaccttgacactgaacagataaggtgttaacagagcactgagcctctctggagaccagaaaggttcctcagtagaagtgactgagaggcaagttgtaacagaagtaggggatgtccctgaaggaaggctgtgtttggttattcagagtctagggacagaatgcataacagcctggagacagaaaggatgtggctgttggaaatggtacagtttggtcttgcctgtataggtcctgttcccctcttccgtcccgtgagggcaaaggtcagtgccctgaaattctgcaccaagtatcaggcctccgttattgctcagtaaatactaactgacttgactttctcatgataagatataatgaacatgacttgataatgaggaactaatggttaaccatgataaaaaataaattaggccatacatttttgaggatgtcttattgtgcaagtttgggtaactttaatttcactgtgaggcatgatgagtatgaaataagacttattttccttatttgggagattaaactctttagttgaagttcctttgcttttgttactgttaatatgcctactaacagattttcatgtgaaaagaaatagaagctatagagtgagaattgtagtctcttgcttcttgggtctggtgacagaatcattgactatatattctgggttttctgtcttcatttgatcctaaattttatttgttttagataaattgattctgccttaggataatagaaaaatgtgaaaaatctttcagatagaaataggtttatagaaagacaattcattttaaaaacgccactgctgtggagagaaaatatatgaaaaacagagctttaaggttagtcatgagcactaggaaatcctccaagtgtggttttttcttttcaaatgatcttcataaggaaaacagctatgtggtatatgtgtatgtgtgggtacgtaagttttggatggataacaaattctctcattcctctctaatataaataagctggagtatgtgcataaggacaggattagttttacatctctgccccatccatttagttttatagcttggggtattggtgttttgaaagcattatagagaattttgcagttcttatatctgtatatccatttacagttttaaagcagttttgtatatattctccactgatcatagacttatattacttaactgtaacaaattttcttatcttcttctactaataggtcagctgcaaatgcatgcttattgtgaaaacccagatatagtattatgtggaaataagagtgatctggaagaccaaagagtagtaaaagaagaagaagccagaggacttgcagagaaatacgggtgagtattttgggggaggagtctacagcacaaatttccgatgcaagcattggcatgtgaacgggtaacaaaaagggcaaaagcaaaaaactgagagggatgtaggccttgggagaaggtgtcaaacacctcctttgcatattagtattacatgatttgagaaccatagaaaaagccattggtgaggtccttccttcagtgctttagtaccattttctcagtctcttggtgtttgaagaaagacagcttcagggacaaacaccctaactgtgtaaggcctcctttccaagatgcaggtacgagatgcccaggataaggaaattctgtatatttattcagtgaggaaaattcagagccagtccatattctgctttggcgagttctaggatacaagaaggccttcttggccttgaaatacctatgctggtggaggagtgtgaagatctcctttggtttaagctgtgttttgttgtgtgcttagtcacttcagtcgtttctcccatggactgaagccctccaggctcctctctctgtgggattctctggagcaaggatactggattgagtggccatgccctcctccagggaatcttcctgacccagggattgaacccgtgtctcctgtactgcagggattctttaccactgagccactgaggaagccccatttttgtggtggagagtcagctaaatactgtcttcctccttgagctcagggggtaggatcatagtagcagcagcattaacggacatgaaagaaggggtcagccactgctcaataaagtactacaaagcaatttgtgctgtactttcttcctccaatataatgagaatgcaaatacgcatgtaataattactcttattattagtgggagacagcaagtagggtagagaaggaaggggagggagggagaaagagaaaggaagagagaagggtgctgtgggtggcgtactgtgtgtagagggtgttactgcctagtggcctctgttgtgagacaaatccaaggaagctataggagggactttgcctttttatcatgtgaaccctgcctttttcttttttgggctgatggagttcagaaagcactcaaggatggggttcacactggagagggagtggaatcataggttgactgggcaggaaggaaccaagagtctggagagatttgaatactagggaagaagagtagacttgatctgcgggggctcaggaagttgctgaagacctttgaacatggagtgctgctatgtctacttccccaggtcagactggggtgacggggaggatggagtggagagctcctgggcagtccctgtgaagggctgctgtgtgtctgatgctgaggcccttaggatgggcagtcagaggggtaggtggatttgaagtgagggagagccagaaccagctgggaccatgaccatggcctgaagctgtgtcagtccctgttgcttctgacctggttggtatgggtggccaacagaagccaatgctctttgcacagagctaaacacaaacacatctggcccaggagctggagaagctaaaggaggatctaggggaaggtggaaaaggagacaggtctggttgctggtttgtgccaatgaggtgagccagcggataagcgacaaaatttgagagccgcagaatggctgctgcctcacttccaccctgcatatctcccgtgcatctctctgcggtccaccttaactgcaaagggagttctgggaagtgttcaatttagacaagctgacaggtcataaagctaccacagatagagagtggggctgggcattgatgtcttttagaagctttccatgtgatttttttttttttaaagcaacagtcccactgacatttatttatttatttttaattaatttaaattttgactgcactgtgtcttcattgcagcatgtgggcttcctctagttgcagcaaggaggagctactctctagttgcggtgcacagccttctcattatggtgtcctctcttgttggggagcacaggctctaggttcacggtcccagtagttgtggcccttgggcttagttgccctgtggcatgtgctatcttcttagaccagggattgaacccacacccctttcattggcaggtgaattcttaaccattggaccaccaggaaagtccctccatatgatttttgaagcagaacttgagaacctctgactgaggtgattctgaccaagctctgagggcgagtctgatcacctgatatgcccacttctatcttgatagtcactgttgtaaagcagtggaaggaaagagggatcagataccatggtggattctgaagtgttgaagctgggggctgtgttgcaatggggtggggaggaagtaagtgatgaagcaatggaagctgtggatctagctagaccaggcttttgagaagtgtatttgcaaagacaagaaaaaaaaataataaaatagggcagctaggaaagttagctagacccaacaattatactgtcaagtgttgtgggggggtctggattgactcattccctccctgggctttacctgccctttgcttgtttcctctgtgcccatcctcaggattccacatcctgcccagtattggagagcctgccattaccttctgactatatggaaactcgggtacaaaaggggccttctttcctcagtgctcagctcagatctgggcagtatttcataagagaggatcagtgtaaagtttctgaactcggttaaaatgagcagaggagagattagcagataagatagtggagggtgttgaagatgggaagggatggaaacagacttcccttaggatttaaggagcataaaatagagttctgtaggctgttgggagtttcagaggaagatgtggaagagaaatttggttcacatggattggacagatttgacatttaagtttaatgataattttcacagaaatttttttttcatttttaataattgtaatattttcattgattgcacatgcactaaaagactatgctggttaatccatctatgtgctaacaatcagaaaacagtagtttatgggatatcttcatatcatttgtacgttatctgataaatttgtggtttttgttactgttgcattaccgtctatcttcagttcataagaatgggtcattggttcacaagtggctctctgaaatatacgtgtatttaagaatgaaagactatgactcagaaaaactttgcaaacctaataagaacatgctgcagtgcaaataagaaatataaatgtgtgtctgctgggacaagtaaatttgagaatgaggacttcatgcagcagcccaaaatagaaagggtgaattggatgcatgatgatgaatatttgaaaatttatttttagtagactaagaatccttttacccctaatcccctcccccctttttttgctacagcatttgtttaaattgtaacatgaagctcttaggtcactttctaatacaacaaagcaatgtggcccataaaccagcttttttagaacaactacaaaataatgctttccaatattgaataatattaacaatgaaatcggagaagagagcaaaacagagggttattcagatttgtacttctgccagtcaaaaccatgatattcactttgttgctgaaacacttttaaaaatatctgcaaagtcagtaacaaatatgttagaagaaaaagcagaaagcatattggcaacattcctcttttagatggtactgttagatctcagacttaagtgtgccccagcatcacctgaactctgggtcccactgagtctctcatttagtgggactgggatgaagccccacattttacatttctagctgactcctagatgttgccgccaccagtgactgaggatggcactttgagaagcactcgtgtaggtgtcacgttaccatgatctctgcatgctggcagatgtcttccttgcccacagaactggacaaaatgatggtgcaacagaatatgaagcaggtgtctacttgtgccacatttggggagggacatgtgctcaccgactaatcactggaaaatccatgctaagtccagcagtatttttcctcttacacagttaatgatatcagctgtgctatagatggggcaaggacagggattgttaccaagagagcacgagccataagcttatagaaaaagacttcattgtaagtgaaaatggttgcatctaagtgtccttctatcctctttactcacagaaggtagttgttggtcagtataagccttttgttcttgattcagggttaagggaaatagaggacataatgaatatgatgaaagtatggtaattgaatgtatgtatatcacatgtgctgtgcaaagaaatcagcagtaaattttcacagaatgagataaaactatcatattacattgtattagttttaggtatatgacttaatggtttgatttaagtatatgttgtgaaatgatcaccacaataagtttagttaacatccattaccggcataattacagtttgtttgttttttcttttttgctgaacctcaaggcatttgggatcttagtttccagaggaggggtggaaactggacaccctgctgtggaagcatgaagtcttaagcacagtactgccagggaagtcccctgtagttaaaaaaaaaattttttttcttgtgataatgaggacttttaggattgattcttagggacagcaaagagaagacaactccgccccacccccaccccccaactggagactactagctaatgatgagaaaggtgctcaagagtttctggaatggaggatgtattaaaaacttttatttattaataatatgagtacagaccgttttggggattcccagtggtttagctcagcatgcggcactctatttcatctagtctgaactaggtgaaatgtatgaatagcttgatctctggtactttgattctttgaaaacttgatgatatcttctctttattcaagaaataaataatgacttatcattgggcacattttaaaaccacacacataagctgcaactaaaaagacaaaactgatttccagggccccacagagctcagaagatgatctggctttcatttgccgctttcaccctttcctctaaaggcttgttcactcagcagccagcaggctataaaaagtagcgagacttgctttttagtttagtgaaaaattcctccatcatttgtggatacacatgtgaaccaaatatctaaaaccgttgcgcagaatcaccaaatacccttgcttttcattcctgggaacctctaagtgggatctgggatattctcgttttgtagaaataagagaagagagaacacctaaaaattggatcctaaactatgacatgagctggatataggtatctcggtgaaaaactgcaaatgatcatgttcccctcattttcttaaatttaaaaatttgtgatgtatcagtttattaaaagcacatcaaaactggagttctgcaggtgttccaaaatccatttagtgcacatttatggattggtatcggttagctgcacaggattttttctgaaggttgatgaactgcttcctagctgttctgcaccagcaccatcatgtggcgagaaggaacaatacaccggctctatgcttgaaagtggggcagttgatccacttgaatttaagctaagattactaaaattttgcctggaaagttttaggaaaagcagaacattatgtttagagaagaagagaatcccactgggtgaacattgattgagcacttgccggacgctaggcttgtgttaagccctttacctgtattatcttattgcttctttatgaagacaccacgaagcactgttaaacctctttacagatacagagaactgttcagataaagtagcccaagtaccttctaaaagtgaacatcaagaagatatgggcataaaaatatgtctgactcttatactagaatttctatgctgttaggacaagctgagcagtccaattttcaaacgtgagcacagggcatcattgtttgtttgtttggtcacaccacatagcttgagggattttagttccctgatcagggattgaactcatgccctcatcagtgaaagcttagagtcctaaccactggactgccagggaattcccagagacatcattttatgatggaaagaaagttttaattcaggatctttgctgtcctcatttagtttactttttgtctggcagctcaaagagctgagggtggcaaggagtaaactctagcattcatttattcctataataataaaaaccatattacctcagttgcttagaagactctgaataattagtctgaagattttaagattgttaacctgactcctggtcacatcacctggaggttcacaaatggtcagaaaatacacttttaatttttagtttgttagtagaatttgggattaaaactctatatcttcttaatattgtacctcttttaatatgagtgacttcaaaatgtatgctttcactcagataccctgaaattctatcaagtaagtatttacttaagttagtaaacattagagaatagctcatagttctgctagaagtgtcagtcatttgttgttcagttgtgtctgactctttgtgaccccatgaactgcagcatgttttgtttgtttgaaactgtgtttgaaatagaaaatgtttattaatgacacatttgtcagaaatgacacatttcttatatgtcagactccagtctaagtcctttagatgttaactcaattaatccttaataggaagatagagatattttctggttttatagataaagcaactgaggcacagatatttatactctgccagtgctacacagttagcatgaagttgtaataggacttgaatccaggcaacctggctccagaagttatggctgttaaccattgtccagactgtctttaagtgtctgactctttgcaaccccatgtacaaatggggtcccctttatttagcccactgggcacttctgtgcatggaattctccaggcaagaatactggagtgggtggtggtgttcagttgctaagtcacgtctgactttttgtgaccccatgcactgtagcatgccagtcttccgtgtccttcactatctcccagagtttgccaaaattcttgtccattgagtcagtgatgccctccaaccatctcatcctctgttgtccccttctcctcttggtctcaatctttcccagcatcagtcttttccggtgagtcagctctttgcatcaggtggccaaagtattgtagtttcagcttcagcaccaatccttccaatgaatattcagggttgatttcctttaggattgactggtttaatctccttgctgtccaggggactctcaagagtcttctccagcaccacagttcaaaagcatcaatattttggtgctcagccctttttagggtccaaccttcacatccatacatgactactggaaaaaccgtagttttaactgggtagccattcccttctccagggtatcttcctgacccagggatcaaaccctggtctcctgcattgcaggcagattctttaccatctgagccgccggggaaaccctcatgtataggttttatcatttttagactatttataattttttcatttatacctttaaatgattatgggatatgaggagctgagatggaagaaactatgaaaagtagaaatagcataatggagagagatcctgttagggaattcattgaggctgaggactctatagttggaaagatatttatgatggactttgaggaaatgttaaaaatgagatgtgaaccattgtaaccagagtttacaaggaagttttctgctcaactacttttttatttttgtatttccaattttaacccagtattctcatagggaaagatgaatttttcagttgctttttcatgaaacaatagctttctgaatggtgatagaatgatcaagccttctccttaagtataagcaatattcttagacattaaatgattgtccttgggagtaactgagaaagagcacgatggagaaaatctaagtatttaaattttgagaattctgaatctaaaattcagttcatataaaaatagcagcatcaaaaagtgtccctgggacttaataacatagatagttgataaataagtattttttgagtttccacaaagaatatcttcttcaaacttggtagagaaatactacatgtgaccagggggatgggaaaaatgcatttccttcattttgtagataaggcaccagatgaagatgtagaaaaaaaaaaaaaaagactgaaagtaaccaaagagataggcaggcaagaggtttaaaaatcactaagatgatgtaatttggccagtgagactttctctgattaagatattttactttattttttaaaagatttatttatttatggctgtgctaggcctttctccagatgcgccgattgggggctactctcagttgtggtgcacgggcttctcattgtggtggcttctcttgttgagcacacaggctctagggcatcagggtttaagtagttgtggcacatgggcttagctgctccttggcatgtgggatcctcttggattaggaattgaacccttgtcccctgccttggcaggcagattcttagccactggaccaccagggaagcacctgattaaggtattttagagtcagcatatgaagggctgtgaacatgggcatggtagaatcagtgggacagctatgtccatcagacctcacagatagacggatagatgctcaaatgaagtgatggttcctcaagcagtttttatgagctacactccaacaggaaagaatatagagtccagttgcaaggcctgttatttcctgtaggaagcaagcagataataaggcagcatcttgaggaatcgtaatggacagataaccttccatgcctccacatgtacctctactgtgattcttaggaagcagaacagttctgaaaatatctgtcaaagcactaagaaggttaaaacaattctgttaaagctctcctgtggaagctgctcctagtcaggaagtaatgaaagaattaccagaattgtagtcagagtcactgatgtagtgttaacatgctatgagaacacaggaaaacaaagacattcttcaggaagagtaatagagatggatgttaaagtatctataaatgtaaggaatattttactgaattcaattgcaggactcctgaaggagctaaacaagtttattttgtagtttttatatctaagagtatttttggtcagactcctgactaagtggtgggaatgaagttaacagtttgaagaaaatataactatatcattattttcatgactttattaagaagggggaagaatttggcaggtaattgattaatccccttgcaaagacgaagtatgaagggtgaccaccgcaagaagactgatgatgtcttaagaacatgtgaacaataaccttatagttttgaagcgatgctttgtaagttactaaagaattatacctaaactcaggtcctgggataacaaaataaacatgcttaagattgttatgcttgaggaacccggaagtgctataaaattcagaatgtcttgtcttcaaaggtgtggtccaggaataccgcctggagctgacaagtggccaagcccttgacgaatatggccagggacctctgatgtctcatgttggcttgcatttttttccccccattgacagcaagtgagagttctctattttggagaacttcatacaacattatgtaaatttggaaccagtagagcctatggttgagttggttacacttgaacagctgtggattcaaatcctggttccactcctttctagcattatgaaattgggcccattacttcatcttactgaggtatagtttcatcatttgtgaaatggggataaaaacttccagaagttttacatctctgttaggaatgcagtgtcagttattattttacttttaatgtgctaaaatgcctttcttgtcttatatatttatattcttctgattttctaagttgaattatcaagggcaaagtgacctttcccatcacatgctgtaacccaagttgttgctgtctttcagagtcccctactttgaaactagtgctgccaatgggacaaacataaacgaggcaattgagatgctcctggacctgataatgaagcgaatggaacggtgtgtggacaagtcctggattcctgaaggcgtggtgcgctccaacggtcacacctctgcagatcagctgaatgaagaaaaggagaaggggtcatgtggctgttgagggggctagtgagctgaacagccattcgaggggttcatgtctgtgaccttccctatggtgatacatgactcagagagaggcaaacaggccttgcatacaaactgcttctcaccatcccaattaaacctatcagtgaagcatcccattttaaaattactttgctgcagctttgtaaatattctctaagattcagcctgagagttaggcaaaatatctcacatagccaaaagtgccttataaaacattagccccatggcagtagatcgtttaaggattcaggattttgtagccacagaacagcgcatttatgatgtagaatgactgaagttatcatccctgctttaccatagatagacccagagtctcacctttaagatattagatgtaatatcagtctttaatgcaaatttaagacccttcttgcaccacaggggactttctaaaatgtcatctaaacaatttaaatattaaataagaatatacacaaatgatggttcaat

SEQ ID NO: 191 - DNA, 63282 bp, Hippotragus leucophaeus
  source 1..63282: mol_type = genomic DNA
ctgtctaccctgcgaggcggaggcgcagcccacgacctcaagagttttgtgttccgccagaccggttacctaccgtctgtctccccgcaattctcttaactttttagacactctcacttgccaaacctgaaaactgaaacccacacctccagctttgtggccaagattacaggcgagaaaagcacttcggaaactgtcaggggctgtaacgaatagcctctgcaaaagggcctctgcgcgtgagcctccccagtcccgggggcccaggaatcgctcgggtctccccccgagccgcgcgggcggggtgagcaggggtgtcagcccgcgaggcgcgggtctgggcgtttctgcagcggccggggaggagttccgccctcgcccccgtcccgccccgccgccgcctcgcgcccgcactcgcgctccacgagtctctccggcccggcccgcggcggcgcttcccgggttcgcagccagcaccgcgcggcgggcgggccgccaccatgcaggtcccgcacaaggagcacctgtacaagttactggtgatcggcgacctgggagtgggtaagaccagcatcatcaagcgctacgtgcaccagaacttctcctcgcactaccgggccaccatcggcgtggacttcgcgctcaaggtgctccactgggacccggagaccgtggtgcgcctgcagctctgggacatcgccggtgagccccggggccgggaactggggcgggggcacctagcagaccatctcctgtgccagggcagcggctcgcggccccgcggagacccgggtctgcctcccgggcgctgagccgcgagagactttccggggtggactgcaaacttggtttcaaaggaaacaaaaaaagtttctccctagcgcgcggcaacttcacgtgcgtcccctggagctttgcggcggctgctttctctccctcccacagcctcccctgggatctctgggctcagcgcgggcctccccgggatccagagggagaccctccggaattgcactcggttcttgatccccagctcactttccaggcaccggcagtccttcgggtgacggcgcccggagcgtcccgcccgccctttccagcccggtgccgccgggaccgccgaggggaagcccctagaccgggtcacagcgggaacccggagagttccgaactagaggcgttgcccaattcctgttcctaactgctccctttatttcaactttcgacacccgtttttctaccattcagtcaagaaagctggaggttctctgctttgagaaaacctttctgtgtctgctttgggggtaaatctatcactgtttctgtttgtccttctgtctctctcgtctatgaaaaggagattgagtatatatattcctgttagggtcacttttgtctaagggtctattctttgcgaccccatggactctgggctcttctgtccatggaattctccaggcaagaatacaggggcgggtaatcattcccttctccaagggatcttcccaacacagtgatggaagccaggtctcttgcgttgcaggctgatttcttaccgtgtgagccaccggggcaacccctttctatgacatttgccacagatttcttgatttgtccctaaagttttcactgagaggtctggaaaatgaggagcctcttacaatgtttgaaatcagaatttgattcccagggtttgtaccaggagttggggcttcagtctaaggtggaggtgcaaagagaccctggacccagactgtcggggtgtcccacccctccctgctgatcccggagctcaccatcctgctccccacaaaccccttcagctcagccacttcccggttaagttggaagtcagtcagacaatgacaacttggggacccttctgctaagaaattttcaggtcccctgggattccttgtgaaccccttcacacaatcagtccacttcacctgggtctatttcatagtctgtggcactaggaacctttacaagtgttggacccaaaccagccacttctctttcagaaagtaggttcattttagcaggtgcatttgactggaaactttatcatggcttgaagtgagaacatatgtgggaagttttccaaagggcatttctcattctggggagtccagtgcctctttactcgcgagctgccaggtcttatgataaaacttggcatgtgaacaggttcatgcctttagtgtcatcgttaactgctctagtagtacaaggattagcggagaccagaagatgtcggtggccactgtctgattgggctctatatctagaaagtcctctgtgagtctgggcactttgctgctgctgtttttagtgtctaacacctctgatgttgcatcaacatctctaggacccaggtgtagaattagcttactctttgaacaggggtgtagctgtaatttagttttttatgtgaaaatcaaatgaggatgtgacctcagacatgttacataaattagtctgtgagtctcagtgtcctaagtatactagggtttagagacgaagaacctaaatcccactcgaaatgcttccatcagaatccctgtttcacctcatatttcttcggcaattttaagtaagtttccttacttcctagtctccgttccttatctgtaaatagaatgctttctcccaacaaaggagaaaacgagaggaaaaccgacaaatgctagctgaactcattagtacttactccctaggagaactgcaggaattgttgctatactagctttgtttgctatttgtatttttgaatatgtgtaaatgctaggcaagaaggacatgatataagtgtgctaattagatcttattaaatgataattcctgatgaacgaatataacctgttctaaaacacccagcaccattttccagctttctccatattacaacatgctgtcttgagcaatttcattcccaagcttagaaatacctccttcagttctgaagttgccgtggaggctatagtcacagaagtctgtgtatataagaaatccaaggagccttggaaagtcagttctatagatatggtggtgtataccatctctgtagggaagtttatttttcccagagctttgatgttcagtgctaacctgtcatttcagcctccagaccaaagagccctgcgggctgggtttgaagttcttggtggtgctggtgtagtcagtcagttgtgtctgactctttgcaacgccatggattgtagcccaccaggcttatctgtccaggggatttcccaggcaagaatgctggagtaggtagccatttccttctgcatgggatcttcctgacccaaggatcaaactggggccccctacactgcaggcagactctttaaccaactgagctacccagaaagccagcttagaagttgggcagcaggcaaagctggttggggtggggtggagctgggccattgtggggaaggatgattggagtgtagaatggacatgtttccagctccatagctagttctgtgaagagtaagtgcatacggaacccaacctcagcagcccagtcagaccccagttagaccccctcagctaagtgtatcttagagcatctttagatctgcctgtcggtccaaccttggggaatgcttcctgtctcctcgctgcttacttctggcgtatgtcttacaggcccgggtagtgacactcattttgagcttgctacgggtgttgatgaagtagaggaaacttgccctgtcctgagatatcacatccatctgctatcaagggaatcttttgctcaattagagttttaatatccatttggttcagggccaagttgggtcctatttgttcaactaattcctgtgatctttgtcttgtggtcacttagactggccagtctgcttctgaaaaaagactgcagaaagtaccttttaggaacttgtgaagcagaccttgaaatcactgagatgaatcccacaaaccccatagaagactctgaatcccagtgattccaccatagaggagcatctgagttagctttggatttggaaactcttgatagagtcagagaaattaagtaattttgcccaaggccacccagctagtaagtggaagagctgaatttgactcaggtctgtttgatttggaatcaagccatgctctttataaccatagccctgtgagggcctggtgtacagctgacccactggggttatacacaattcctctttaagggcactgcttatttagtggatagattatcgtcgccttctttcccttattgctaatatgtttttggatggtaccacagtgcagagagtggaaagaaaaggaacagaaatatatttctgggcttccctgatggctcaatggtaaagaatcagcctgcaatcctcgcgagacatggattcgatccctgatctgagaagattccacatgctgtggggctcaagcctgagtgctcgactattgagcctgtgctttggagcccagagccatagctgctgagccctcgtgctccagatactgaagcccacgcgccctggagcccaggctctgcaacaagagaaggcgccacagtgagaagccctcacaccgcaactagagaggagcccccgctcattaaagccagcgagaagcctgagcagacaccaagacagagcacagtcataaatacataaataaatacaaattaaaaaaaaaaaacactcaaagtttccacccagttacaaaaacactagtttcaaaaaataaaaagaaagaaaatcttatttctgaaaatttgattcttagttatagggttttttcattttatagaataatcaaaaaaaaaaagaaaaagttcaccgttgagacactcttttactactcctctccgaatcctgatgctttgactattccattaagtaacttgcacaagtcacaaagctagtaagcaaagttggaataagctgctcagtactaacggcacagagggaccacgttagagcagacggaggctgcaagaggtaccatcgtatgaacatgtgacatcgcagggaaagaaaatgatcgccatttgaaagatgggcagctgagatccagcaaagtttcacggtttgcccaatgtcaagtgttacagctttagaatatccataattcataatccataattaatatattagaatacatctgaagtattctattgattactttgatgactccattagcactttcaaagagaacaacacaattttgtctacaaatcttgctgtgctttgggaaccaggtactggaattaggacagtgatagtaataatagctaacatctttagacatttattcttacaattttctgtgcatatgtaatttttaatttcccagtaaaatagctggttaagtggtagtgctggaacttaaaacttggtcattgattgaatctagcacctaggttcctaatagttttgcgctacctcccacagttcaaaaatagaatacttcagatgtagtctaataaatataaattatggctattctaaaacggtaatacttgacattgggcaaatcatgaagccttgctggatcccagtccccatctttaaaatgacgattgtcttcctgtgacatctgctgcacggtgttctctcttgcagtctctttagctctgatatggtctctctgtgcccagtagcttctctggtagctcagctggtaaagaatccgcctgcaatgcaggagaccctggttcaattcctgagtcaggaagatcccccggagctggggtaggctacccactccagtattcatgggctttcttggtggctcagatggtaaggaatccacctgcaatgcgagagacctggcttcaatccctgggtctgatccctgggttgggaagttttcttggaggagggcatggcaacccactccagtattaacatgcccagttagtatgtaacagcttattccaactttacttactagctttgtgacttgtgcaagttacttaatttctgtgcctttgtttcctgtctaaaacctggggacaacggcagacgctgcatcttagaattaaaagaatgagatgggttaattcacgtaaagctatgcctgacgcattctgaatgttagctattactcttcttttttcaactgttatcacagacttctttcacatacattttcctgcttgatcttctcagagttgctgagggtatagacagagcaggtggtatcaaacctattttatattagatcaagaatcagagacccaagatcacaagagctctcatgtggcagaggagagcaggaagaggacgtctgtttaactccatctttgatgcatatacttgagaaaaatgaccagatctgtgggtcatcagaaaactcaatcccagatttaacaaatacaggagaaaataaagttggcaagtgatgcagagaatccttctctcccacgtgaaagtttcacggcaagactctcctaagtaatatattcccctaaatagttaaaacccaacacgtaggaaaaatatttccccgcagggcacatctgtactgactttccccacctaagctgtgtgacgaagccctggaggacattaactctccaacaggcagaggggcagcgcgaggcagcccgggtttagagttacccgcgtctagaggcaggagcccagagcaccagtggccctgagagtcagctgggaaacagtgctccgttgttttagtgtctgtgaagtgtttccacatcgtaatattcagctgaggttttggacttgacctctcttcaatagagacttcagctgagacttccctggtggctcagacggtaaagcgtctgcctacaatgcgggaggcctgggttcagtccctgggtcaggacgatctgctggagaaggaaatggcaacccactctagtattcttgcctggaaaatcccatggacggaggagcccggtaggcgacagtccacggggttgcaaagagtcaggaatgactaggtgacttcactttctcttcaatatctattttttttttttttaattgtttatcggcttgctgggtctttggggctgtgcggcctttcactagttatggtgagcagaggctatgctctgcttgcagggcatggactgccctgggcctctctcgttgtgcagccaggctgcagggcgcagggcttccgtgcttgtggcttctgggccctggagcacgggctcgatggctgtggcccccgggtctagtggtcctgtggcacgtgggatcttcccggatcagggattgaacccgtgtctcctacactggcaagtggattctttaccactgagccaccagggaagcccttttatatctatttctaaaagacaaattctctgggacattttagaagcatcttaaatattaatgcaatggatctgaaaatgtagagagtgctaaatttggcaaccgccgtgccaggcaaaaaaaaataaaaatgcatggcaagtctgggccacgttcaagtgggcagttattgtcgtgtttctagcctggctaattacagagtttctgaataccatgtgggttaacgtgctaggtgcttacaagtaaataatatgtatactgaagggaacagtgaactttcgacacaaggtaagggctgagtggggaacgcacctcagggcttcttacaaggaggtcgttagactctctgggcatcacagacatgtgggcattaggcctgtgggataatctaggctttagaggactggttctgacaggtgggcacagaggagcctgaccaaggggcgctaacatgcttgagaggaaggaatgtgaggagcagctcctgtgtgtgtgtttgatttcttcagcaaatgtgtctactaaatgcctgctgcttccgggtggctcagacggtgaagaatctgcctgcaattgcaggagacccgggttccatccctgggtcgggaagatcccctggagaagggcatggcaacccgctccagcattcttgcctggagaattccacggacagaggagcctggagggctacagtccatggggtcacacagagtcagacatgactgagcgactaacacacatgcacacacacacgcacacacacacacacgtatctgttaggcactgtactggttggggaaacaagaatgaagacttgagcaagaccttaacaagttcatggcttagtgggcatgatagcgtgagagcaaatacactgtaatggtgagcaaattgtgttggtgaacgtgactccaaaattctctggtgatacagaaggggtcctgtccacaccatatccttccattctctgagattaagcctgatcagactaaacaaagcctctggctagggtgatttcctgagctctgtcctagcaccagtggactccccgggagcgacttaaaggccacacaccttgagacaaaagttcatcctctggctctttttaattctgtctccttctcctgaggagctcatgcattcctgtggttttaaactctgtaccagtgactcccaaactgtgcttataaccttgccttctcatgaggttcagacctacaatttcatcttcctgctggacattgcctttatgatatctcagatatattgcaagatcaatatgtcatagccaagttgcatagaaaagcaaaattgcttgttttctctagcagtaaagtaaaatatgctcaacgtagcaaatgtggaacgtacaaaagaaaacaaaaatacgacacaacaataaagaatatagacatgaccgctcttcatgaaagcagtaaatgatgtctttgtaaatcttaaccacgtatagctctccacatattgatctttgtagtgtagtgagctatactgcttttcacccagttactaagacccgaaacctctgccatcctttctccccctcttttgagcttcacatgctctctgtcatccaggtcagatagcgattgtgcctctccagcgcctgctctaaaccaggcacagcactgttatcccctgtcctgctgtcataactccctggctagttctggtctcctcctcctcccgttcttatgtggactaaggtcgcgtttatcgtcccagaatatcgcttcggtggttcttcattgccaacagattataaacatcatggcgaaaggaatgaaagtccttgggatgagatgattggagaaatgatggctagaaagaggacagattctaaattttagagctgttgagggagaagttcatggggtcctagatggtcagaagtaagcggagtccttgaggcctgacctggtccgaatgaaatccgggatctgtctcattgtggacttgtcagaacacagttactctcactgagcatcaaatgatacttaagatttttgtttaatgtatttaacttaaaaagtcattttacaatatgagaatttgagaagtgtaagatcctgcctgggaaaatttgttcattcatttgataagcacagggtttttaggaggggatgaagtaggcattggtgtggaatctgatattccacgggggacataaagttatttaaatataatcatggagatgattactgactgttttgataaacctctgaaggagaaatgtcaggtgctaaagaaagtcaaatcatggcccctgccatcgccatggtatggaggagagggctgtgggtaggaggaggtggagagaggcagcagccgacaaattacaaaagggtgcctttgctctgccagtggttaagaggggtcattctgtacacatcaatttatcagactaaatctttgcagtttaaacagcaccatgattctggcaaataggtcattttatttccagatttataagtgaggagactgggccaagggtaagtagaacgtggtgcctggtatgctgtagttgctcagtaaaagtgggtttggtgttaaatggccagtggggttgatactacagtcattgctcaactgaaacatttcgaggagaattgtcttgtggaatgtttagacttgattgctccctcttctgaaaattaactttggaaaaccctgcaaagctttcaacccattgagaatctttttaacattgtattctctttgcttctggaatggaccttcccagatggatatggtggccctgctgctccttgggtggaaataggtttattctgtgaagggaagagcctcatcttctagatgggtgtattagagtagtctccatcaacttgacaaggtcaagtctgagactctagcctgggattccaaattattgagttccactaactttttccagttgtttgagagcttgcttgagaagttatatggtcttaaattactctctgaaaatatgtcagggtttaaactgcaccattccccactccctttagttttctattctcaggtataaatcctgtcctatcttttctatcttagaaaatggctctctcttctccctcctttcagtagccacgtcttcctcacaactcgtctgaactgctgcagcattgcactaaagctcatcccttcctccagctttcccgcccatcagcttgcaatccgcagaggtgaagcttcgtaacgcagtgtcggtctccagttaggtgttctccagtgtggcagccgcagtggaccctcatcactttcagagtgagaggctaagcattttagcatgaagttcaaggccttccttgatctggtcattgttacccatcctagtcccatctcctgtacctgtgattcttgaccattctggatatcttaactgtggcttcagttcaactaccgttctctttctactgtggcttgtacagttgtctctggctaactacactttcctctttcttttcttaaatagctcctataggccttttgtcatcacccctctcacttccttcaggaagtctcttttgagtccaggtgaccgaggaagatactctttatctgctcccataatatcccatgcttcccccagattagaagtcctctaccactgcattgatatgctttttcttcccaattataaccctagaacttggttctagtccgtgtttagtgagttttattcaataaaaagcttcagtcaactatttcatcattgctctaaaaatttcttcaataaacaaaagaaactttttgtttacaaacaaaaggttatcatgcttcaaagactttgtaattttctcaacactaacagaaaaatgcatgccttttagaactgatgaatacagcaatcatttttattaaggtggcattccattttatttttccccgtaaaaactggggagtgaccttaaagagcattcttaagaactgtgcttcttcatttaacaaaatcttcctaattcaaagtgaaatgtcattcatttggaggtcaaatgacaaagctgtattttccttttatgatttttgaatagattagatgaagtaataaaggtaattttcacagagttaaaacctgtaggtcatcaaaacaaatcctgcattttaaaggtgaggaagctctgctctgaaagggggtgcctattgatttctcaggctcagagagctagtcagaggtagaactggaacaagaatgctggcttctctggtttattagggacgacatgtgaggaattaaaaaattctttttaaacaccaggtgttttggcattgtcttagtcctggggcacacgaataaatgaatttagtaggtgctcagctttgagagttcacaataaagcaataaagaagagagaatgttggtatggcgttgaggtgaaccagaggcacccacggtttgggttcaaaagacatgcctgatttaatttccccagtgctctgttacaggctcactatgtcgccccttggacttcctcttccttattcacaccccctatttatcgcctccgcacctctgctcctgtgcgtcttactaattaattcacgtgcccttccctttatctccacatacccaaaccctatctgatgtttaagagccgtctgaaagggacctcctgtgcaaagacttccctacttccctccttccgtggtaactctttcctcccttgagtcaacacagctccacctcctgtcctgaatattagcaacttattagagttctattgtacctctccagatatcctttccagtttttagcagagcttgctgcaattatttgtctcatgatttaatgaaatgactgtggagttagccaagaggtggagaaagagaaagtaccgtggacgagagtgaagcaaaagaggtttgggatgcaaaggcaagcgagttcaagaagaagatagtcaatcatttcaaatgtccgggagaaatcggaattattgctctttgctctgaaccattatgttttctagtctgtgttatcctgattcattatttaatcttccttcctcatcagccttgtataaatgtgctctctcaggaaggacaatggacagcttagcttcttgtctaccacctcagcctattggagatcaagaaattatctattgtgtgagggatgcaaatacatttcaacctaacttgtaggatgaagtttgacagcaaatgatttaaattactttttgacaggcctgtttccccctgtaatataacgtattattaataccaccatttattgggtgtcaggcatggtactgtgcattttttatgcatcattttatttactgctcacaaggaactgatcttatagtttctgttactaacctcatcatagaggtctacgcttacaagggctaaaaaaacagataaacacacaaaactcttcaaaaggtgcatagaaggtaagagatagtgctgggatatgaactgagatatacctggttacaaagtagtagctgttttctaactgctccatctactattgcctgtggggtaatatgacagtgcgatagtttgacagtgcgatagttttcacatatcaaggattaagttgcattttgaaaatgcatagtatttattttaaaggaatatttattattatttttaacccttctactttggatggagctaagaattgaatgagctgaattctttgcatacatcattgcttagatcatgtggttggtttgacttaataagaaatatctaaatatactatatttagacaggaaaaccacagtacataagggatatagactctagtttgaaaattaaagataagagtagctaagatgcttgatggtattggaataaaaattaagtcttgatggtgatagaagacggggtgtgtgtgtgtgtgggtgcattttaaacttaataaaagaatcctctaggctagactcaaaaagctacaatagagtttctcaaactcctcagttcacagaacctttagtatcaaagtacagataattttttcatagtgtctttaggccaacagaagtaattaaaagctctgttattttttaattaaaaattttttaatatatattcatcaattttttattttttattatttttttgtaatatgtattttattgaagcatagttgacttacaatgtttcaggtgcacagcaaagtgattcagttatacacatacattatttttgaaattattttccattaaagcttattttaagatattgactatagtttgttaagtaattagcaccaaacaatttcataaatattatagcctaataatttaatagtcctttgggacaatggggaacagaaatgaaaatgatttttatttcatttctaatagatatgactgttcactatagggacatgtgttgctttgggccatagaatagcttcttaaaactgagtccaagtggtcactatcaccctcatttcctgtttccttattgattgtcacatgatcttgctttttatcacacaaactgcaaaaaggccagcttcaaaaagatatgagcacatcaaagggaacgtcgcacaatctaatgttaaaattgtgaactgcctctagctagtagctcctaaggtgtctgattgatcttgagcaccactgcttgccttgaaatttaaaattacccagttgtaatcctgtgacttcactgaggcaccccagagcaccttggcacacattttgggaattgtacctacgaaggaatctgaattatttaaaagtgaaacccttagagtccaggatccctggaccccgtgagttatttataaaagtatctttaaagaaactgtggcgaggcggttctgaactggggacagactcttttccagagtggattttaagagtgagcaggagtttagtagtcatggaaagtcaatgagctggatcagagatcttgctttattcagtccactcctctccctgatggggctccctctctcaaataagaagtcattattcattgttactttattgtgtaaagagtatgtatgttaccagctccattctgtttcgcaagtccattgtgaacacagactaagagcttctcaaagtgcatgtgagagagagagattgctgtcgttaagtcgctatgtctagctctttgcaaccccatggactgcagcacggcaggcttgcatgtcctccactatctcccagagcttgctcaaactcgtgcccattgagtcagtgatgtcatccaaccatcacatcctctgtcatccccttctcctcctgccctctatctttcccagcatcagggtcttttccagtgagttggctcttcccatcaggtggccaaagtattggagtttcaacttcagcctcagtccttccaatgaatattcagggttgatttcctttaagattgactggtttgatctccttgctggccaagggactctcaggagtcttcttcagcaccacaattctaaagcatcaatagagatcagtattagaggaattccacagcgggcctgaggagactacagtgtaactggacacacggtctgcagagtttgcggcatgtaaaatgcagtatggggcagggcctgattggacgggcgagccagtgacccatcgtcagcgctgtctgatatctgggaggaacaaactgagcctggggccaggtagtcagaaaaagctccaaggaggtagggtttggtacaaccttgaagaataggtaggatttagttcagcagagagtcagagatggtgtatgttccagtgaggatgggaaagccgtggaatggtgaatgaaagcaagaggcagaatttagtgagtccagcaaggcgtagattgctggattgcacccagcaatccacagtctgaggattagcctttgacttgtagatcaagctgtgcagccttaaaaataccacaggagcccaagggggaaaataaatgaactcttttctctacctggcaatcactcgttcatctttcctaaagtcttctctgaaaaaatctgttctctcttctggaccactcacgcttctgctccctgtttccctaggaactgggcgtaaaacttcccctaaatcctggctcccattttgtttctctgcaaaatttcatgtacagctggatagttgtatagaaatgaggctgaatgtgttgaagagtattttgaggcaatgaaccaaccacaggatcctacgtaagcatgtataagagacttcaaataaaaaaaaagtggatcaatagcaatgatttactttaaaattatataaatgtcattgaattccaaatagtttgttataattatttgaataaaatggatatagatacatacatttacgtttaaggcagtgttatctaacaatgtgaaaggaatagtatcttagccattttttttttttttactttaagtttgagtgtttggctatggaagacagtttggcagttatttacaaaactaaatatacgcgaaccatataatccagcagttgtgctccttggtatttacccaaaggagctgaaaaattatgtcgacacaaaagctacacacagatgtttatagcagctgtgttgctaactgccaaaagtcgggagccacagaaatgtccttcagtaggtgaattgttggggctcccccggtggctgagctgtaaagaatctgcctgccaacgcaggagactcgggtttgatccctgagtcaggaagatcccctggagaaggaaatggcaacccactacagtattcttgcctgataaatcccagggacagaggcgcctggtgggctgcagtccacagggtcacagaagagtcagatgtgactgaacacacacatgcgggcatggttaaactgatacatccagataatggaatatgattcccactaaaaagaagtgagctatgaagccatgagaggacatggagggaactggaacatatattactaaggtgacagaacccaactcgaagaggccgtacagtatgtgattccaactccatcacattctgagaaaggcaacactacggggacagtgaaaagaaccgtggtcgccagagttggggtggggagaggggaaataatggagcaagaggatgttcagggcaatggaagaaccctggatgtctgatacagtaatgaggaatacgtgtccttaaacgtttgtccagtgccacagaatagacaacactaagaattcacccgaaggtacaccatgagggattatgatatgtcagtttagcttcaccaattataactgttagtgcatcactctggtgggtgatattgataacaagggaagctatacatgtattggggcagagagtatatgggaaatctctatacctttcactcagttttgctgtgaacctaaaacagttttcaaaaaattaagtctcaataatgataaacagataaaaaagactgagggcttggtactgatcagctcaaatgaacttgacagagtaattcataaaatattgaccccagatttctgcatatactgaattttcaagacattgcaatatttgtatttatctttcaatttgcaactgttgggaaattgttcaagttgctttaaatcttgtgtaggtcacataacatgtgagcagcccaatctcccattttggcacttgctgtgggcagcagtagatttaattaagcaaattataaagtgacaacagggctttggatggtaaatctggcagaggtgtacagaaattaaaatacaagtaaatctccagtcctgaccacctcagccctggaacttcagactcacatatccagctgcctactcaccacatctgcataacggacatctcaaagtcccaatcaacttccatgaaacctgtgcctcccaaaacccgctccatttcagctaatggcagctccacactttcagtaattcaggtcaaaagcttggtagtcgtgtctggatcatctcataagttatagttcacctatcttctctgtctccaagtatatctggaaagcagccagtctagaccatcctcaccaccctttggtcagcaccgttgtctcttgcctggactgttgtttcctgtcagcaccgttgtctcttgcctggactgttgtttccccacttccaacttcaactcctgcgtgtcatccctcaatgcagcaaccatagggatccatttacttctatcggttcttgtttctcatctgtgcagtctttcagtactttcctctttcatccagaatagcaggtagcctcaggataatggcctgaaactgtccacagtctgggtcctgtgatccaggatcattgcacattcttcttctccttgctcagctctctccagccaacaacagtctccctgtgttctctgcatgcgtggcagacacttctgagcctcagcatctttgtacttgccactcctcctgtctgaagcccttttctcctaaacatcctaatggcttgctcctttacttctttttggtctttactcaaatgataccttctcactgagccttccttatccatcttgcttttctttatcctggcctcttgtagctcagctggtaaagaatccgcccgcaatgcaggagacctgggttagatccctgggttgggaagaccccctggagaagggaaaggctacccactctaatattctggcctggagaattccatggactgtatggtctacagggttgcaaagagtcagacacgacagagcaactttcactagcgtactcatttctcctctgctgctttatttatttaatagtatatatttggctgcattgggtcttagttgcagagtgtagcctcagtagttgtgacatgtgggcttaggtgacctgtggcacgtgggatcttagttccctgaccagggatgggacccacatatgtcctctgcattgcaaggtggattcttaaccactggaccaccaggaagtccctgcttttctccacagcacttttcgccagataatataatatgtctcttactggttttgtttcctgtggatctctttttactagaatgtaaacttcatgcgggcttccctggtggctcagtggtaaagaacccacctgccaggaaggcaatttttaatgttttttttttttccccccttagttgctgatttttttcattgcatgtttctagtgcttggaaattcattgccattgagaattttttgttagatgaatgaaagaagtaaagtggtaagacataacttaaataaagtgatttcagtgggagtggaaagaaagtgataattgctagtgacatgacagaggatgattcttaaagacttggtaagcctgaaagtaatcagagggagtgaagagtcaggggttatttattcactcagtaaggagatcttattgaccacctactaggtgcacaggtcagtgtttgtcatggagttgcagaaacttggctctgggcagggaaagaggctggcaattttgtaggggataattacccaaggttaattcaagcctaagtgacttggaaaaatggtgattgattgacacttctctgtcactgatttggtggagcaaagaagtgaggagagatgatgaaaaagttccagaaccactgctagagggtcagatgggctcttgaaaaatgatgagaaccatgttctccagcaatagcctgactctgatccttgttggggggtttccctgagccttcaaaacctgcttataccacaggaaattcagtggccatttaatcttcgcagcaactggctagtttttttttttctttctccagatccttgttcaaagttcatatttacttttggttttatctacttgcttttcatgccatttctctctagaaataaagagcgtaccttggtgtggtgtacttttaatcctattgattttgccatgacccccaaattttatatttggaataaattgattccaagggattatttcttaagatgagaattactgtgaaagcacaacattccagtctgaaattcattgcaaagatatgcatgtaaccctgttgtaataatgttaattttctccatcaatgaacatctattgattatttactgaaaacaagagtagaatatagagtaagtgtattagtaggtggcactggctcatgaaaacaagataatgctgtattttagaggaaggacgaattttaatttcagtttatttctaccacaatacttggaactcttaactatatccaaacagtagaggaataaacttcagatatacagtgtaaaatgtgaccagcctgctctccaggtttttgcaatgccaagttggagacagaagcatgaagacagagcatggtaagtgtggatggaacaggataaagaaaatgctgtggggttgtgaaaaagggagccagggttctggctggcaggttctgtgaggtttcagggcacagagataggatacacaggatgtaattgaaggtgagacgggagatgtggaaggaattcagactttgggaacagagctgaaaaaaaaaaaaaaaaggccaggaaagccagagagttatgaaggatgtgttctgggaaggacaggtcatccggtgtggcttggttgtggggtactcggaaagaagggacgggagaagagcttggaagggtggttggaggcagtctccaaatgtgtggtcttcattcgagtgtctttttttaaagcatggaagagtcactgaagggctacaatggcagagaataatggtaatatttgtattttgaaagtgattctaatagaaatagaagttttaaaacttcagctagggaaggcttaaaaaaacagtttcctaggccccacacagaagcagtacaataagaatctctgaggaggatgccctggggacgggtgttctgtaaatactttgggtgagttcttttgtccccccagccctactgagatatgtgttagtcgctcagtcgtgtctgactctttgtgaccctatggactataatccgccaggctcctctgtccatggaattttccaggcaagaacactggagtgggtatttattgccttctccaggggatcttccctacctagggatcggatcaagtcccttacactgcaggcattttctttactgtctgagccaccggggaagcctctgttgagatataagcttactcagtttaggtaagtttaaggtgtatgacatgatgatttcatatatgtgtatattgtgcaatcattaccacagtgaggtgaataccatctccatcacctcccacagggcctcccaggtggctcagtgggtaaagaatctgcctgcaatgcaggagatgctggagttcaattcctggttcgggaatatcccctggaggagagcacggcaacccactccagtatccttgcctagagaatcccatggatggagaagcgggtcgggctacagtccataggtcgcaaagagtcggatatgactgaggcgacagaacacacacctcacctaatgaccttcttgtgtttgctgagagtatttgaggcttactctttgagcaactttccattatgtaatacagtattgttgactacagtcactgtgctgtacctgagatctccagaatttattcatcttataactggaaattcagacctttaaccaacatctccccgggtctcccatcccctagcccctgacaaccgctgttttgctctttgtttttatgaatttttggctgttatggagtttttagtttcttcatataagtgagatcaaatggtatttttcttcctctgacttattcctctaacatattactaatgttattgcaaaagataggatttccttcttttttactagtattctgttgtacatgtatatagttggtcctctgtatctacaaattccacatgcacagattataaaggacagagtgcattttataagggacttgagcacctgcggattttcatgtttagtgggccctggaaccaatgttctgcatatactgagggaagaccaaccacattttctttgtccattgctctgtcaatggacatgagtgcgcctgttcaaggtagtgatttcatttcctttatatacacccatcaggtgatttcttgtgctgccagaacagcaactgtctgaagacctgtgttagttatatttatatttattttaaggggaaatgggggtgataaaaactgagatgccaagaacctcaggagctttcaggggtccagatgagggcttgaactggagcagagagactgctgatggagcagaggggcaaagtcaagagccccttttaaactagaagtgttggtgcgatgtgggagaccctttgtatgtggcgatgaggaaggagctggaagatgactttagggaccactctggtggcggtgtggatggtgtttctgggaaccagcgcaaggaacacaggaagagagatagctggatgtcttcatatgagggaggctgatcaaagggggttggccagaggcgataatgaacttaatgtaggtgtgtaattcagttccttattttcccaatgaggtaactgagactctgaatgaggaagtgacccatttgaggtcacacagctagttggttattagaaaatcctcttgtttttatacctgtctagaagattcacaggcataggggagcctggtgggctgccatctctgggatcgcacagagtcggacacaactgtagcaacttagcagcagcagcagaagattcactgcttggttatgttgagagcatttagataatactattaaataattaccaagtgaaaaatattattaaatatacactatagcagtgttgctggtgtatgtttttagctgaatcaatggcagcaaatgggccattgcaggccgttggaagagagaaccaggtcttgatttcatggtgttatcatggggctaagcctcttcagtcatatctgactctctgtgatcccaggggccgtagctgccaggctcctctgtccacgggattctccaggcaagaatactggagtggactgccatgccttcctccatgggatcttcctgacccagggatcgaacccgcatctaagtctcctgcattggcaggcgggttttttaccactagcactgccttggaagcccaacatagagctgctgctgctaagtcacttcagtcgtgtctgactctgtgtgaccccatagacagcagcccaccaggctcccccatccctgggattctccaggcatgaaaatagcaaggtgacttagagattggccagaacaaattcattttacagatgagaaaactgagtctcagggagagacgtatagttgtataaggacgcacaggtaacaagggattgaaatgaagcctccccgccacccctgccccactcccacctgccatcttctgacccttcgacttagtgatttctgtgggaggttatccaaactattaccacagccattgtactaacctttgtgatttggctgattgctttatcatttaacacccctttagactgaaaactgaatcatgagccatgtctacacggctatggagtgtgtgtttaggttcgacaagtaatggggacctacgtggagaaccaactcattttcaatctgggcctctatgacacttcttggtttagaagttccttgaggacaaaaattctgtatctacagcacaaagcacagaacctggaccatactgtctattcaataaatgtgggtcaagtgtgatttgaccccagtggcatttttttttttttgaattatagtctttgtttaaaaagtaaatcacctgtgcctgtgatggattcatcaggtctctactgggcccacatataggcactcactaagcatcacatggttctcattcttttcttaagacacagcagagagggctgtcagctgacaaaggcacgataaaatgagtgctggaaaacccttggtctgaatgtgacctcttgctggaatgccaaaaatacaaacttgccaagtctcctggcccagtgacctccatatacaaaggtcttttctttctagaaacaaacctttttcttctggtttctgatctgacacacataccctcacaaactcaaacacacacacacacaatccctacaaaggtgtaagtctacgcagtctatgtagtatgtcttttttttttttttttttttctgtatagaccctttgacatatatttgaaatgtaaaatctttcttcttaaaggctgccttattgtactatgaaaaccccggacaagcagattattgaattacccatgactttgcccttcatctgattatttctctgaaagggatcataagacatcctgaaaaagcccagaggccttcagagttccaaatgatcacagagggcctttttcccctgtcttcttgaaatgtcatggccaccctgatcagtatcaaaggaaatctctgtatgcataaggatctaaaacaacaaaatacggaaataaaagaaatttagaactcatttcggaaaaatgaaagttcatctgtgggctttgggtcatatgaggagtgttataccactctctttcattgactagatgactgtggggagtttttttttaaatgctggtataacccaagtggcggatattttaggacggtcatgtggctctgacaaagtgctcttctttccagggatacgtgcttgaggacacaggctcacacactaggtgaggcagccttgaccttcatgtgttttcattaagtgcgtatggatcagttcctcttacaatccgcagtactaatgccagtgtgaacatgacctacgaaagaatttggtaacttgaattaaaactcaccgtcacaaaaccttgaacggaaatgttaagtgtccttagaggtatattgacctacaggtacatgccagtttcagcatttttttttttaaagagaagttggctttttcaatacacacttgactttgttataatttctgaaactttataaaactctgaacacgaagaagttcccaaatcacaataaaataactctgcctggtcatacacttctggagtttggggttcagaaaacataaacccagtcttcagtatctcccatcttcagcaattacttgtggacagagttacaagcaataggattttttccatatttgttgatcagctcaaattcctgtaatgttctttcataaactctggtctagaactctgatttcactacctttgtcatattgtcttttataatttttaacatgctggagaaagggagggaaagctcaagtaccagctagttgcaagggactgtgctgggtgctctacatacatcagttcttttcatccatgtaacagccctgtgaggtacatattattacttctgttttgcagatgaggaaggctaaacttattgtgtttaagaaacttgctaatattcatttagaaaattaagaatcagaacaaaactgattctagctgattggtctaaataagaccaatccatttatttatttatgtatttatgggcttcccttgtagctcagctggtaaagaatctacctgcaatgtgggagacctgggttcattgggaagatcccctggagaagggaaaggctacccactccagtattctggcctggagaattccatggactgtataatccatgggatcgcaaagagtcggacatgactgagccactttcacaacaacaacaatgtatttctatgtcagaaggctttccttatccaatagattgcagactagttaagggtataggtcatctagttcactgtcatattcctagcatgtagctcagaaactggcatcgatggataaacatgtgttctgttcagttgacttgaatgggacacttctggtacataaacccaggggagagatagtacaagactatggtttagtaactgagggtattcactgttggtaaatgactatgagctttggattcaaaaagctcaactttggattgtaacttcttaagcctgcatctatataatttgaagaagttacttagcctctcttggtctcactttaaaatgggaatattagttgtaccttcatgattatttatggaaatcatatttctgatggttagtgaatgtcctattatccttaataggagttgactgcggatgcctttgtaacatgctaatctaattagtactaattgtcccactaaaatgtaaactccatgatgggaggtattttcgttttaatcattgtattccaaatatttaggacagtactgtccaatagagcatcctgtgataatgaaaatgttctctattggggtgtctaatactgtagccacaaccacatatggctattgaacacttgaaatgtgattgaggaactgaattttaaattttatttcattttaattaaaccaaggtaggcatatgtgctaggggtatactgtattagcacagtcctggagtgttacatggtccaaggatatttcaataattacttattacatgaatgaatccccttgggattaaaaaaaaagaaaaaccctaaacaagagtatcctggttgtgtatttagtgcattttttttatagataagcaatgaaacactttacggagtgatctgctcattctggaagccttgttagggtccagtatatgattcagtttacaacagaaatgaatttttgatttctgtttctttttggtgataggtcaagaaagatttggaaacatgacacgggtctattaccgagaagctatgggcgcatttattgtcttcgatgtcaccaggccagctacatttgaagcagtgacaaagtggaagaacgacttggactcaaagttaagtctccctaacggcaaaccagtttcagtggttttgttggccaacaaatgtgaccaggggaaggatgtgctcctgaacaatggcctcaagatggaccagttctgcaaggagcatggtttcgtgggatggtttgaaacatcggcaaaggtaatgtgaccttaaaggataaacttattgtaggcaggattcacaaagaaaatggcctataatcatcatcattattaccataatgatagtatatgtttgtttagtgatttgtagttctcaaactgctttaagctctttctcatttcaaggggatgggtgcaactgtgacccacaatttaaggtgtttgtggctaaggcagcaaagcaacctgtatgtgatcacactgacagtattcaataactgtgttcatgtgtggagtgcttatgatatgtcatggggtttttgtgttttctcatttaggcctcacaatagcccttgtaggtaagaatgattttagtcaatgaaagaaataagcttcgccttcagtgtcagtgctttactcaagtattagttgactccatcaacacttaatatgtttcactgtgtatcaggaactgtgttttgccctagaaatgaaaagacggccaaagcacagaacaagcacattgggaatgttggaacagtgggcagagagtgagtggatggcaaatacgcctgtaaggaacatagtgtggcttggcactgctcaccctcctggtggcagccagtagcaggaagtgcgggcagagtcagggctggaagacgcagaatccagtgtgagctggtgagaggctgacactcccctctgtgccccacgctgttatctaacgtatcaggggcacaacatttactctgctccctttctctctgtgtcagtatcagagagaaagatagcttcatcatagattttgaaaaaaatttttaaatcataaattaaaagtaaatggtttaatatgtttttctgatattctctatatgcatatacatatatgtatgttttctattactaagattgcattctgcatagttgtaaatcacaatttttctacttatttatttgtggaatacacatattgtatacttgtggagcacaggcactgtgctaattgtttgggattcatctttgagtaagataggcattgtctctgcactgagggaaattaacacctaggccttgctgtgaacctttgagcgcatggtttggaactacagcttgaatggacatcatttaaataggcttaaagaaagaaagtgaagtcactcaattgtgtccaactctttgcgaccccatggactgtaacccaccaggttcctccctccatggggttttccaggcaagaatgctggagtgggttgccgcttccttctccaggggatcttcccgacgcggggactgaaccgaggtctcccgcgtggcaggcagaagctttaccgtctgagccactaggaaataggctgagtaagagcttctgaagtatcttataccagagcgtagagtggccagatttgtccctggggactctggaaaggcagatcgacatggtagttattgcattcttacgagaaaacgacaaagccttgagctaaggtaatggctgtagagattacagagaaaaacctgatgtgagactatcactacagtgaaaacttgagcaggaagactgaactgctcggggtgggaggcgccggagcgggaggcggtgatgcctcttatctgacctcttggttccgtctttgggggcgggtctcagtgcctgccttctcccagtgctgcctctaagttggccttatgtttagaaagttttacttcttggttccttgttttccttcttgaggcctcagcatgcttgtacgtgcttccccctttttccttttaaaaccctttgttttccttattatttttgaggattttttccttagatttgggacacagtacctgttttctatttcctggctcccattgaaccatgtctgtttgtttcaagaatttactgttgtaaagatacatcagccaagtagtactcgcggatgtgattaagtgaacatttaagaaacactatccccccctccctccccacccgcctaccatcccccacaccaagtggctcatggaatctcggttccctgacccgggatcgaacctgtgccacatgcattggaagcagagtcttaactgctggaccgccatggaagtcccagaaataggacgtttttaatagtctggttattgggtgttagtctggctttaaaaaaaaatccaaaatgtgggtgaatacatccatttacccattccttagccccatcctcaacttcattccacagatctttgaatattctttcaaattcctttctttcccaagagtctccagcccagaagcctctaggcacaagggtaaaagacccaagttttggagaactccttttctcaattaattaccttacacctggagggcagtctatattgaatgactcatattatataaggatatatttagatccatcattctttcattcagcaaatgttatggaatgcctgttatataccaggcactgggaacagagaaatttatgaaacaggatcctgacttcatgtataacaataacaacaaaagctaagtaaaaatatatggatatatccaatatatattggacagccaataagtaccaacagaaaaataagagaaaaggaagaaagaggcctgtgaatttgtggggagggctgaaatgtcttgtgggacaaggactttctttcacttcatgctgacattccttgctcaatgattgcagtgtcaaactctacttaagggcatgatgttaattaacttcaggcctggctgacccacatgcacttcaatgctggatttctaatcctccaaatccccgaaagtgtaaactttgaagagaagctttgtacagagagagggcggagggagtttcccaaggctaaagggcattgaacagctaatatgaccaagagggtacaaggcctcactgtagaaggcagaacctacacctctcttccctccaagcatactgcggttgaaattgtccttccggatgtcctaataatgaaaatggtttcccagagccgggctggttttcaaagctgacatgaggtgtgcaggaacaatcctgcatccttgattagtcaaattgttcccaaagtctttttatttttaagatctctgataaagctctgcttcctttctgaggatagtatttcagcatttacaaaacagaggcccagctcagactgtctgcctgaagctaagatggcagcatttggaggcagccaccaattcattctttgattacctttgggcccggggaacatttcccataaagatctttgtcttagaaaagtgtctctcctaacaacttgagtcctcttgggtcacatcattatcagtctggtgataaacatctgattttcttttttttagtgtttccaaaacttctaatgagctaacgtccacagcctctggctttgttctcccggcgcctcttgcacaaatcctgtgggtatcatcagcagtttggccatgcccgaagctgaaagtagcaggatgttagaggagcttgttctttagacaagcctcctttctgctgctgaccccactgccaaagtaaatttgacctcttgctctttaatcttctcaagaaactttctgcaagaattttcaggccgtgtgctgttgctggaataagcatggtaccctctggctgtgaattaagagaggggggaaaaaaaattaaaagtaaatgtttgctagcatctttggtttttcacatcatctcttcaaataccaaaagcaaaggaaggaaaagaaaagcagtctcctaagtcaggttttctttagttttcaacctttgcattatcttcttttcttagccatgtttagttgaattctgcctggggattcactacagccaggtaacatataactggggtgagcatatgtcccattttctggaaccttcctgatttatgcttaggatcctagcacaattatttttaacacctccatttctggtctgtaatttaatttaattggtcaacctgtaggtcaggaactctgatgcattgcactgtccacatcataccttatctctaataatggctcttatgcatttttgtgtccaagcccggtatttataatatgctttggtagatttgtctatttagaatgagggccctggcctgctcttgctagagcattcccaagactgagaatcctatcttttgagcccatatcaatggctgatggagccccctgaccttctgctccatttacctggtgctttcttgatgctttttgcctgaatctccaaagctacttcctttggattcacactatggccggatccaattacctttcagagtttccatgagattaagcgacccaggggtccctggatgttttatgtctgatctcaccgcacacacatcccaccttgtctcaattgcttgttcccatagcccatctgcccttgtgggtgtcatcatctgtagcttactctgatgctcacaaaagctgcactcagaagaagggtctgtttctgcatctcagtccttcccaggctgctccatcttactcttatgctgtagtggttcccgtgaggttgtgttcagaagcagaacaccaggaaaatgccatgtagatgggaaagaatggggcgggtgggatctccccgagtggccacaagaacaatctcaaaaagaactgcagtgtcttctgttcatgcagcctccatggcatgctctacttctggcagatttccttgtctgtttctatacaatttatagtgacctttaggcccaccctcgatctcagaatattctaagatcaatgggtaccctagaagaaactttctgacattaaactcgattgaattttagtctcttccctacaactaaaaagcaagatgttgatgtgtggcctgctaagggaaggaatatacccagtagtattctctataagacattagtagcttttagggggaggagaagactcttgagagtcctttggactgaagggagatccaaccagtccattctaaagtagatcagccctgagtgttctttggaaggactgatgctaaagctgaaactccaatactttggccacctaatgcgaagagcctacttattagaaaagaccctgatactggaaaagattgaaggcaggaggagaagggggcaacagaggatgaaatggttggatggtatcacaaacccaatggacatgagtttgaacaaactctgggtaatggtgaaggacagggaagcatggcgttctgcagttcatggggtcacaaaaagtcagacacaacttagcaactgaacaacaaataggggtttcatggtgcagtgaaacacctatttttcatgcgttttgggtttccagtaactgttgaaaacgcatttgttatctttagggagcttctcgccagggaaggctcacctccccagggagagcccataaaactttcttcttttgctttctttgcagctagaaaacagacatatgacctagattcccccacctacagactgattcataagtgagcaactagaggatgaagggacaatgcagaacccgttttttgccccctctgtgaagggtggtggcagaacagacttccactcttgggagagagtgtggtttgctgagtcctatgctggatgcagaatcaagatccggccccaggaacaactgcattcaagttgagttcctcagagctttgcagatgacaggacctagtgttcagtggtggctggtagctgtgttctcgtcacacttgttctatatgggatctgagtttctggaagcttaggctaaatctggtttttctagactactgtttctgtaggctactgagtaattctgcaagcaacctaacatgccttgaataaatgatttcatgtttagctagcactggcttctgagtcttatgactgaaaattcaaattaatatacgtgatcagatggatttgagaaaaccaacttcactgtcccctttgctgttggaattctcaggcctttgatatcttaggcacatgctgaatctctagtaataacaatgtctaggttcttcctgtttgctgaatgttaactttgtgtagaaatttttatgtgtgtgaactcattcaatcctggcatgatcctatagagtaagtaataatgttattacaattaaaaaaaagttgagatgaaacctaggcaatttccctaaagctatatagttattaccttacttctttgattctaacagacactttttgtttcttcttagattaagatttcaaaatcaagatatgtctctagttagtgtggatttctaaaacgatagtgtgtcacacttgtagtggtatttttttgtattatctcctccaaagtacactctctcaggcatcagtttgtaaattatttttggccacatagaacactaacaaactaatagaacactttacggagaaggcaacggcacctcactccagtactcttgcctggagaatcccatggacagaggagcctggtgggctgcagtccatggggtcgctaagggtcagacacaactgagcgacttccctttcacttttcactttcatgcactggagaaagaaatggcaacacactccagtgttcttgcctggagaatcccagggacaggggagcctggtgggccgccgtctatgggatcacacagagtcggacacgactgaagtgacttagcagaacactttaaggaaatgctgtgaaagggaaagactgaagaggcaaaaggagaagagggcagcagaaaatgaggtggttggatagcatcaccgactcaacggacatggatctgagcaaactccgggagatagtggggacggcggagcctagcatgctgtagtccatgcggtcggagagtcagacacagctgagcaacaacagtaaggaaatgctggcctagaattctcttgtaaagggagtgttttctgtatttagttgtattgttttaaaactgttttgaatttgttacaatattgcttctgctttaccttttggttttttgaccttgagtcatgtggaatcttagctccctgaccagggatcaaagcctcacctcctgcattggaaggccaactcataaccactggactgccagggaaatccctgtatttaatcgtttagtaagattttattcattatcattattattttttaattgctctgaaagctgaaataagcagcagttaagtggctcgttttctagaaactgcttgaagggtaggatcacacatcatttatttttataggcttttagaaaatatgtaattagaaatacaatgcatttatacaaaccggaaatgcattgctgagcttgggtatgggtagatggttattctaattcattttttaatgaattgagtataggacattattcttaaaaaatccttttatttttcaatcgagtagtaagccatctctggcttactcccaaattttaaatgtcaatccatgaaaaaattcttaatagtcactggtgaattcattgattcaacacaatttatatcgaacgactgtttaagtctgtgctgtgaacaatgtatattaaaccttttctgggctcagagtatgcttttaggttcctgttcctaaaatgtcagaattcgctatgggaagtagatatgccacattttagacatctgtctccaaagactatttggagttgtaggctgtgcctcccctgactcggttggggtacagcatgtttaacctggcatttttaaccaatcttcttaaagctggttgtccttaggaacataaaagggcaggcccaatctgaaaatccaaaactagagcaaagttagaaggtatcatttacaggaaatggtgccaatggttaagagccatgatcatttcatacagtgaccactagtctgtggtacaactgtttgcatcatcatttctaacagattcttaatgccctcccctgcatgaaaaatggaatcattgcttgaaactgagagtagcttaagtatgagtctcaaattcaagcaactcatctgtttaggagtcagtataaattaagaatagcattttaatttttaactttagctaattaattctccagaggttttctaggtctatgctaattatttgctaggtaatatgggaagaagcacaacctggaatcaagattgccgggagaaatatcaatatcctcagatatgcagatgacaccacccttaaggcagaaagtaaagaggaactaaaaagcctattgaaagtgaaagaggagagtgaaaaattggcttaaagctcaacattcagaaaactaagatcagggcatctggtcctatcacttcatggcaaatagatggagaaacagtggaaacagtggctggctttatttttctgggctccaaaatcactgcagatggtgattgcagccatgaaattaaaagatgcttactccttgaaaggaaagttatgaccaacctagatagcattttaagaagcagagacattactttgccaacaaaggtccatctagtcaaggctatggtttttccagtggtcatatatggatgtgagagttggactgtgaagaaagctgagcaccaaagaattgatgcttttgaactgtggtgttggagaagactcttgagagtcccttggactgcaaaggagatcagtcctggtgttcactggaatgactaatgctgaagctgaaactctaatactttggccacctgatgcaaagagttgattcattggaaaagactctgatgctgggagggattgggggcaggagaagaaggggacaacagaggatgagatggctggatggcatcacggactcgatggatatgagtttgagtgaactccgggagttggtgatggacagggaggcctggcgtgctgcgattcatcgggtcgcaaagaatcggacacgactgagcgactgaactgaactgatgggctccaacgatgactaagccattgtaggaaaatacagacagaccctcagcgggtattaccgcagctgggtgtgcgggaggcaaggagctgcgattgccatcttctcctgcagggttcgcgtttgtatcacccacggtgcaggtccttcctgtctcatgcctagacaattgttacagactgcagacctggcttgaggtagactatacagcatgatgcgaaaaattcagcctatccaaggaatcactttgatgttttcatagtccagttcaagaatcttctgtagagtgtacttcttgattcaaatttaggcatctgaaagcagaggtcagcggctgtgacctgcgggccaaatgtggctgcttctctatagtaaatgaagggttagcagagcacagccatgctcattggtgcacatgttatctgtggctgcttttctactacaagtgcagagtagagtagttgcaacagcagccttgtggctttcaaagcctgaactatttatcatctgatctgaccctctactcattatgtcttacaacagcaattgcttctcttttgtgcttgtggctttacatgtaatagctcatccttaaaagattcttgtaagtcattttattattcttgttttatggatgaagggattaaagtttaaattggagaacataaatgacttgctaaagatctcacagttgggaggttgtaaagttgggatttcaagccagatgtgctaattgtacacccagccaccaccctgcactatcttatagccttttccaatctagccttattatataataactgtttatggagcaactgatacttggttggctagagactgggattgatcaataaatattgcattggccaaaaagttcatttgggttttcccatcgtgtcttatagacatcctagagtgcacagtacacaccctcaaacacacttcccgaaagaatgatttggccccaaatttcaatagtcctgagcctgagaaaccccatagatcatgctttatattagaattttctaaatcctctaaggaaaaggtactaattgaatacaagttcctgttggttgccagttttctcttaaggaaaatcaagtagggtggacttttgagttttgtctgtttaccaggtatgtaattatatgaaaaaagttataattcttgcccagtggtaacagttgttagattgtgggattgtgggtgatcttgtttctgattttcatcctttagtgtgattatgttgtttttacaatgacaaagataaatttataaataaagataaaataaaaaaaaaaaaagaaactgttgaggcttctgtagccttttaaggattctctgcctgaggagctgatgctaagggacatagtctgactcatggtggagttttgctttctctgtttgccacccacctactactttgatatctgaattttagtattcccagtattcatctccctgctttttcatgcagctccttctgcttcagatatccttctctggtctttgccttaggtaattccagactttccacatcattgttctcttcctacccacaccgtacagcctctacagatgtttccttaagggactccgtctctgccgcctacgcgtctgctgctgggcggtggccctctgctgggccagctcaccccgggaggctcagccctccctccagatgatgggtgttgcttacaggctgaggcaggctacgagtctctgagagaccatgtctctctgagcccagaaaatccaccttttcctctgctggatccaggctgtaggatcactgtggatttttgaacctaggaaaagactctgagaagcacagagaggcacgaaggcagagtatggtgagtgtgggcatggaggccatgtagatgggggtcaggctctcgccttggacccaaagtgatgtggttttgggccaaacacttaatcatgctgagcctctatttcgcatatgaaaaatggagctgtcataagaatcaatgatagtaagtacaaaatgtctggaagattagtatgcaataaatggctggtctctctcttaaaaaaatacacgtatgtacaaaaattgctcccagtttcagaggcttcccaggcaatcctgcccactgagtcacggatgcttgttctagaagcagcccatggcaccttcaattgcttaattcctttccaattatatctttagaaaaatgtgttaggattaggggactcctggagaaaaagttctattcagctggggcaggaattttatgctggggtagagtatcagacccagaaagggaacagggagccttgtcaaacaaaactctctcctcggatttttgcacaacccctctgttgatggtttgttactgtccactcatcccctttgagaatctttgcgtgtactgagagatgttgcccctgggagtgtgttgccctccttcatggtgtggaagcaggacctggaagctggcaaatgatgcgcttaattagaggaagagtggagactggagaaaggacgtatcagctctgttctaaaggacagtagaagaattcagaacaacttgatgggtttcctggtgccaagacagggcaccaaaattcgaggcagggaaaatctgaaatctttgtaagatttccatgttttcacttttaaaaatcgtatcctatctgtccatcataatgatttctgtaaaaatcttttaaaggaaaaaggcctatctttcaggatttccaggaggaaggatattcctgaggttctatcctgtctggaacttaatctgcatcagaggcgagaggtatggaaaagtgtaggtgaaggaggatgggaaaagcaagtagaatccagtgcctttgggaatgaaaatgttgcctcggtgcagaccatgacagatatgtcctatttggtctctgattttcagtagtaaaccatggttgccattcccagactcaaagaatgattaaataccagacctagcttctggaatcagcattcttcctggatctctacctccagcatggcttgcttccaaacctcagacttccaggtccctctggatctctgcttagatctcacctctatgactcttcaaatccaacatactggaaacagaatttattagctcttctgcaaattagatcatcttcatcggagacctcacatccacccagacatttgatccatactcccatagaataagatccatactcccataagtaaccaggttacttgtccttcagaaagcccaaattcctgagcaaaaaaaaaaaaaaaaaaaaaaaacccatagtgaggctcttctctgcctctctgagtctatccctggctacttcctacctgtttatcccctagtgatcctaaactgcattaagtcccctgttcacttttggaattcctgcttcctggaacacgcttcctacagttaattcacctgtcctccactcttccttcaggactcagctcaagcatcatctgccactgactctcaggtagtctgtcctatctcttaccacatatgttaaacttctttctctatggacctgtctcctgcgctgcactttgaaatcctcctgtttacccatccaagtgaacattgatcacttggtcagtgattacgtggtctgtttattggctgaaacagaatttttctgctgcagtgcttttcaagcacttattcagaagattcatttttctgtattattctttcttctgcctgttgtggggatatttctgtccttagagaactgtgaagaagaagcaggaaaattaatttactgctgtatttcccaggagcataccacattatgtaactcctttcatccagaaagctccctagacactttgcacagcagggagattgcagcgtcccacagcatgaagtaggggtagagacaaaaactgaagacgagggagactgtcccccctagtgccttgggcccaaactagcaactgcagagtttttagcttggtgattccactaacactacccaagaatctaccaacagcctgtggattttattagccagcatattccttcttcataccccaaaaccagcatcgagaagtttcctcctcattgaaattctcatgtacctctcactggtttcagctattgtcatttgagccacacagactattgtatttgtcttttattttttaactaataaacagagttgcagagaggtttttcagcgattttcattgaagaaacgaagcctagacaacagatctaggctagaactctctccagtgatgtgattcctggatagagtcgtacatcaggaatacccgaggagcttgttgaaatatactgcaggtgccttggccctaatttcggaaatatccggaggggcagaggaggtatgtttttggaaaacagtcctttagtgattttcatatgcacaagctgttttacacttgctcactcactccttcattcatttctgatatattccttgaagacctgttgtatatccaggcacttttctaagcactgaggccctggtgatgaagggtacagtttcttcccattaagacgttctcagtctcctggaagaaaaatcatacaaatgaataattacaacatagtaggaagttccgtaaatactagtggattctacagggctgtgagagcacttggaggagaaggtgttacctctacctgcgaatgaggcagcttacttgatatttgttctgagttagcaaggataagagagtccccaaaggaagatccaaggagaccgctgggaggagcttctttttaacacgtctgtgcagaggggcataaggaagccacctttagaaatccctgggtgttttaaaaagcaaggagagtttctcatattttaaaaatatttttgctgttgaaatatacttgatttacaatgttgcactatttacaatagccaagacgtggaagcaacctaaagtgtccattgacagatgaatggataaagaagatgtggtgtttatatacacaatggaatattagtcataaaaataatggaatcccatttgcagcaacatagatagacctagccatcatcatgctaagtgaagtaagtcaagacagagaaagacaaatattatctttaccgtaaaatatctaagtaagaatgtgtcactactgcagttacctagctttatcagccgtcagagaattgtcaatataagaccatggagacttactattaaaaataatagtatgacatcccctatatgcagaatctaaaaagataccaatgaacttatttacaaaacagatgcttagacttagagaatgaacttatgatggccaggagagaagggcagggaaggggtagctagggagtttggggttgatatgtgcacactgctatatcctcaatatattgtcaagtaaaaaaaaaaagcagattaaaaattagtatgttccctgtgaattcttctatgtaaaaatagaaatctatatatacttagaaaatctggaaagttatactgcacattaaacttttaaaaatggcaagctttgggaagaatttaaaatttcctattttcactcttccggattaaaaataagctcttataataaaaaatggataaccaacaagatcttactgtatagctcagggaactctcgatattatgtaacaacctaagtgggtaaagaatttaagaaagaatagatgcatgtatgcatgtatacctgaatcactttgctatacacttgaaactatcacaacattgttaatcagctacactccggtagaaaataaaaagttaagtaatgatagagaaatgtagaaactaaagtccagcaggatttaagacactcacccaaaggagtaccagcgttaggatttaagctaggtctgattgattctgaatctacctggtgctttctttcccacctccctactcttaaaagcgtgggcaaaggctctgtctcctctctctacaccactgtcagaaacttctggaaggggttgcttccttgtcgcatgaggggtttgtggcggagacatgtttgctttcctcctctgtgtgtctccccgctttttctcagtgttgccttggtctgttcctgttttgtggtcctttccctccttcagtgggtcttgtgtgccagccttggaggacccttaggtttgtgtgcagcagcgttgccctcccacggccttgtttcatctctgcttcgctgaccagtgaggtattgatttcttgggagaaactgctgggacaggggatgaaggcaggggctcagtagtccattagacagaagcgggaagcaacggcagctgcttcccggtcagcctgctcactgacccaacatgcgggaatgctgttcaagggtgaggttagcctggggtgtccaagggtgatctgaaggggtgaggttgttcctggaataatgtagcaaagccacggacagaaagatcgagagctctaaatcacgtccttgaactaaatgaagcagagccatcttttgagaataaatttgcctgtcacaggttgcttcaagggaaggaaattctgctgagaccttttctaattcttaggtcactttgaattctctaatgtaagcatgatctttgtgaatcgtgaggcaagtcatttagctttcattttgggggctcccgaaatgaaagagaggggtggctgcagtgggtggctagcagtgcttgtacagtgtgtttctgaaacattgtatgtaaatcccgcttttacatgctgcctcaacgggctcactgtggcaggtctcccaggatgagtccctttgaaaaggaagagtttcttgggaaagagaagtatcattgtctgtttcatgtggttataaatgtagttccatgttgcagatttttgtaaagaaggacagacatgggcagtaaatttaaattatcaaagtctcaagaggccttgtgttaccacggtaatagaaacccatactcggattcccattatcacctcattgtgtcttctaccattgtatggaaacccaggaaaaattagatttggagagtacctcaaaatcttcttgtcatctaactccttattttacggtttcctttattcattctttagaaactctgagtacctctgttccatgtgacggacactgttaggctgtaggattatgcctgggcgaaacagatcaagtccttgtcttctgagagcctgtattgtagtgtggctgcaggtaattaaaagataaatacgtttgtcccatagaactaagagctagagggttcgtttgtacaggaaaggagcctagagcttgagtcacatgtatgcatggggattcagagaggaaagcagttttagacaggtgactagggaaggtttcactcaggtttttttttttttttttttaaattaaacatttggaagagggccagcatggagtcatttagattccctggaggggaatggtcatggaagagggtttagcatgggcagaggtgcctctggaactggtatctgggctttgctaggatgacagagatgaagtaagaggtgatgtgtccagtctttaaagcattgtgaccactttgggttttgctctcagtgagatgagaagacatctgctttgagcagtgctatgatttgatttagacagttgttctggtggttatgttgagcttggactatagtaggaaaggttggaagcaggaaatcagctaggactctattgtgtatctagggaagaaaaattctgaaaaataatcaaactctatatgctttaaaaaatatattttatcttttaactttttggccacatgtgcaggaacttagttccctaaccagggatcaaacccatgcgccctgcagtggaactttgaagtgttaatcattggatcgccaaggaagtgcctacatgtacttttgaacatacagcaggcaggactaactgatgatctggataaaggttatgagaggaagaggacgtttggggatggctccacagattttgttctgagcaactggagaagtcgagttgccactgtctgagctgggggtcctgagaggtgggtgggctgtagggaaagctatacggactcagttctgggtatgttaaaatctaggagacatctaacagcacctgtcaagtaggtagttgtgtatgattctggagttcaagagaaacatctaggccgtgataagaggaccaaggactgatctctgggtatgaccaacattttgacaagaaaatgaggccaccgagagagaaaggggtagaggaactgtgtatttcacagaagagctaagactggaaaacagtggactcttctcagtgcacaataaggttccatttaggtagcctgggttttcatcttcttttcctgtgctactcctctcagtaatacagtgggaagatgttggacaagagaaaaacaaaaagcaaaaccagattgcacagcattggtgctctctctttctctttctaagtcaccaacaattagatttattcactgtgtctctgctaggcggtgggtctgaaaagcaaagcagacaagtaagatgactaaatgatggtctccctctatgccaacaaccatgcactttcttttaagttgccagtagttctaacataggtcagaggtgtctaggatatgattgaagcatgccttctgctaggtttttggctggctggagatatttaaatctaactttaagagtaattatgcaaatttttttcagatcttgaaagggccaaaatatttagaaaccttgtaaattacgttcatcacataaatcaaaagtctgcttttgttatttgccaagaatatttaaaataatgatatttaacatttgtatagtcctttaaaatttagaatgcttccagcatctacttatgtatttgctgctgctaactcacttcagtcgtgtccaactctgtgcgaccccatagacggcagcccaccaggctcccccatccctgggattctccaggcaagaacactggagtgggttgccatttccttctccaatgcatgaaagtgaaaagtgaaagtgaagttgctcagttgtatccaactcttagtaaccccatggactgcagcctaccaggctcctctgtccatgggattttccaggcaagagtactgtagtggggtgccattgccttctccaacttatgtgtttggttggctacaaatcctcagcacaaaaagatttgtttcactcttttgtaagacttctctttgttaaactcctgcctgtagttgatgtgaaatggctttaagaacctttaccattctggtttccctacctggatattctctaatatgtccatatgcctttttccttttattaatgtagtgaccagatctgttgtcaacataccagatatagaagcatagcataacgaaactttaacttaccttgcataagtcacctttctattttagatagtaaaattagtcctgtgctaatttcttttaacagccagatcaaactgtcgacacatgctgcactcttggtcatctaaatgtcccaacccttttttttctgcaaataatagaccatcaaataagttcttatgcatttaagctattgataattcgaaccaaagtgtggtattttagctataggatttccctatagctcagatggtaaagaatctgcctgcaatgcaggagagctaggttcaatcctgggtcaggaagatcccctggagaaggaaatggcaacccagtcctggagaatcccgtggacagaggagtctggccagctacagtccatgggctcacaaagtgtcggatgtgactaagtgattaacacacacacctggtagtattttatattaatgtctattaaatcttattctgaggcttcaatttatgattccagcttcatttttaatctactactttgcttatcaaagtcaaatgtcagtttcccttaggatcatgtccatctacctttgaaagagactctaaaatcagtgacagctggcagttggctgtggttgtggttagattctagaggctgacttgggttcccagccacagccttctcacaacacagcagaagaagaatctctttccagttggctatgacagaggcttatataaggcagcgtaaccaagggggtgactgttccaccttgtttacaggtccagtctatactcagtggtcacgtgtcccaggaggtagaactctcatcgacagctctgagatttctgtgtgccgtagtggtttccaggcagaaacaagttttctggaaagtttaagagcaaacgacatgtaacaactaagtgccctctccatcctttttgactgccaaaaaacaagttttactggaagccccacctagctgacttctgcttatatttcattaccacaactaccacaaggaaaccaggaaaatcaagttttcactatctacttgtaattaggtttctgttagaaaggaagaggagatgttacatattgcataaatacaatagccagggcatgaatggaaatgccaaatggagaaaacaaatcttgtctagtttaggaaaaatggaagttaataatgaaaaataatcacataaaaactcccacacaggattaatcagtgttaacattgtcatatttcttaactatattgtattatatgcaacttaaattatgaacatttttgtgataaactctttgcaaatatagtttaataactgtataatgttccatcataaggatacaccatagtgaaagtgaagttgctcagtcatgtccaactcttcgcgaccccatggaccgtagcctaccaggctcctccctccatgggattctccaggcaagagtactggagtgggttgccatttccttctccaaggatacaccataatatctcataattaattctcatcagttcttcagtgctcagctttcttacatctgtacaagactactagaaaaaccctacatttgggtagattgcactattgtaaataatgtcatgatgagtactttttatgtaaaatattttatatatttaagattattttattagactttatttttagtcttgttgttcagttgctcagtcatgtacaactcttcatgaccccatggactgcagcacaccaggcttccctgtcaatcaccatctggtggagcttgctcaaactcatgtccattgagtcagtgatgtcatccaaccatctcatcctctgtcaccccttcttctattgccctcaatctttcccagcatcagggtcttttccaatgagtcagctctttgcattaggtggccaaagcactggagctccagcttcagcatcagtccttccaatgaatattgagggttgatttcctttaggattgactggtttggtcttgcagtccaagggaccctcaagagtcttctctaacaccacagtttgacagcatcaattctacggtgctcagctttctttacagtacaactctcacatctgtacatgactactggaaaaaccgtaactttgactatatggacctttgtcagtgaagtagaatttagtagaattactgaatcaaaagatggactttttatggatcttattacataatttcatacctactttccaaaatgatgagctaatttatacttgccaacaatggatagatgttttcatatttctatgaagacactctaaaatcccaattttatcatgtcagtctgctttttacctttgtatctaaaaaaaattgctaagtatgccttttatgacttcctcaaaatttctaatacaaaaaatgaggttaattctttataagatcagaggtttgagttttgtgtcattacatgaaaaactattcttgtttagcgtaatcaaataattagtagccctcaagcaccatctgagacaattaaatttaccaagttcactttgcctccaacctacagctacctcgtccataggacattatggtgggtattatactaaacataatgcagaaggcagtcttctgaacattcaatctgaaatctttattacagaaaaaaacagagttagtctttttgtgttagccttctctgtgtcatctatttgtcccataccatattcttcaagcattggcctgcccctttgtgatactactttgctctgaataaactccaatactgtgtttttctggctttagcactttctccaggcatgttcttagactcggtctgagcttcctgacccaatctggatgagttcagaccacccgtgaatctgttctgagttcacttcccttcttctatcttttgtatgtattatttttaaacctgatcttacctgagatattcctgtagccaaactggtctgttttaaagatctctttcctctttcttcttcactgggttacttgtgactgtatagttagaatccctgtttctgagcgtcctgatcttattttttcctagactcagtcttatggatagttttccatctgtgaggaaaacctacataactttccattcattctcatctatttctgttttaaagttcatgaaatatttatagatgtactctttccttcctgctgtatgggattcaggggtgaaataaagatattaggacttcctacaccattcatggttcaaaattaatcactcttattttctttgtgctacacttttgaatgtcagtattcaaaaatatatactctgtatgaagaacttagaaaacagctagaattctgaaacaagataaaaatgatttgtaatcaaactaccaatagatttcagtgttaagatttggtctgtttcctttctaagcagaaatttgtatatattaaaaagaatttcatcctatatttaagcaatatttatccataaagtgtcaacccatagaattggcttgttagatacagacttatagttacatacatataataccagcaggaggaggaaggaaaaaagaagtaaaaaggtacacaggattaacaacaacaaaaaaatattaaatggtcttctgaacaatattttacgatgcaagaaagcatgtaatacatcttaagtggttctcaggaataaagtcaatatttttaaagtttacatttgaaacagaagcatcctttatctggaaaagttattgtccttttgaacctatttaattcagtagatttctatcaaaaaaagaaacagaaaatcagaactggggttgttttaagctccaagtagcctcttttgttctttctattttattttgttccagaagaaagtattcagtaactacttatgcctttctgaagaggtatttcttgtcaggtcatttatgtttcaacttcatttttctctttttttttttgtccaatatgggagcctcaatttcccacttattctgcatatgttgaagttatcagatgccactagatatgtatctgacagcacacaactttgtggaaaaatagttttctatttcttttacaaattatacgttgcttgtatctgtttaaaaagttcattcatatatctgcactgctatagatgattgcaaatgtccataaaacaatatagtattaataaataccactgaaggtttcctgatatttgcagtgattctttcgtgggcagttttgtgcttttaccccaggcgttccctttcagctctccctacaggttgtccatagataagtctccatctcctatgtattccatctctgaaatcacagtgttagcccaaagtgttcacatgacctaaatcgggctcactcctaataccacttctctcctagacagagtcgctttagtctcaagtgtgaatgcgagacggaagccaaactcatcagcgttctcccccaagattcctccaactgagtttgagggaaggaggctttttctctttagtgccaaagctacaaggatataagcccagaggctgctggcatctgtctccctcttttttgtgtgtggctatgctgggtcttagttaaggtatgcaggctcctctagctgagaagggttgaggggaggttaattgccctaaggcttgtgggctgcagttcctgactagggatcacacccattcccccgcatctgcattgaagagggtttcttaatcacaggacttccagggaactcctatctatctccctctttatatggaaaaaaatagctggacagagaaaaacaagctgacctgctggtgtttgagagcctaagggcattttataagggtcttggtgtggactgaatcttttaccaattctgtttcccctgggagctagcctccagaggacctaggcaattcaatgagttcctgattttcgcaaaccaagaactcctggctgatcatgtagatggagcacactcatgctagtaatgactggttaaatgaacgtctcatacttaaactttcaatttgagaaatgtttcccattaaggaagcattattcttaggactcttatgaatttaactacactagtcaagcactggagatggtctcaagagtcatcttcagtcctgtttggaaaaaggcagagtataaatactctcctcctgtgcctgatgaaactgacgtcagagaggaggcttgatccttttataatgtctgagctaatttgtagcagcatcaaggctaggaccaggggcccttaattctcttgtctaaagctatcccgagtttaaggggaacttcactataatagatttcaacatagagcagctcacagtattttttgtgatttttaatcagtccatttttctttcccttcccctggccagtccattcataagatacttgttgagcacataccatgccaataggccctgtgtcaggtgctggtaacactcccaaatgcataaagggccactttctctcttaagaattttactatctggtgagaaggtaaatttctaggagtcattgcaattgtgcatgactagaatttcaatagggaactgctatggatgcacctaagagaactacccagccctaccttgctcagggtggggtgaggcgctggtcggagaagactcaccagagggaataatctcaggatctcatcattccaaatcaggcctgtggcttacaattttgtgatctcaccctcctctgttaaagtcatgttaaaacaaaaagtaaaaacaaacgaacaaaagaaaacatgtcagaatttccataatggtctattggctaagactccacactccaatgcaaggagcctgggttcgactcctggtcagggaactggatcccacatgctgcaagtaagggtttgcgtgccacaatgaaagatgctggagtgttgcaactaagaactggcccagtcaaataaaaaaaaaataacaaacaaacaaaaacatgtacttcttttcaggtgaggctcagaaaaatggaaaaaggcaaaaatggaggcaacactccctaggaaaaggttaaaaaagccaccagtataacacaaaatcgggtaataagtgtctctacccacccagccctccagaggccaccacagccactcccatttattctaccactgctctcaatcaaaagttgccaaattgtgcaaagaggaacaccagccctgtgagacagagcctgagatcagtgttctgtgatcagataagttcacagactcctgcatactcattctctgcttggagataggaggggagaaggggaacagcttgcttctttctaagcctcccctcccaacctgaatctgcctgaggaatcctgtgataaagaaacattatgagttatttttaacttaacatgcctaaaattatttaaccatagatgcttttttcccccggtaccaccttacaaaactgcaaaactgctttaagatcgtttactctgacaaagaggtatgtttgtcccttcaaacattctcatataaaacttactatgcaatgttggattatttccaaagtgttgtattttcttctcaggggctcttgcgtgcctaaactattgctgcattctttcaaatatctcatctcatcttatacacattcacaacaaccttgcaaaaccgtcattattttaatcacagattataggtaaagtaattgtggtacagaatgaggagagtgaggttatggtgacttctctgaggttactcagctagcactgacagagctagtatagttctgagtctttctaccacactgttcctcttcaataaatacatgcgcaagtaataaacattgaaaataactaaaagattctaaaactgggtaacgtacttgaatttcatccaaaaattcaaagcagaacgcaatggaatccttgtgaatcaagtagacaccagcagctatattcttccaaatgaattgtgtttggcagatacagatggaataagaataacccaagcaaaacacacggagggaatggcctgtggcttaactcaactggaacttagccaagtgaggagaaccggaggagaggagacaacagagtcaaggcgtggctgagctggctggccctcaagggtcaagggtcaagggtcaagtatcagggtctgcactgattctgagcaggcagtgggagccaactcagagtttttgagctgggaatgggattgaggcatgaccatcagtacactttaatgagagtggtcaggagacagtctggcaggaacatggaggatgcttgccgtgggaaaaaaacgaaggcctgtgatcagagaagagaggcgattacacagggctgactcaggctgaaatgtcagaatctgattgtgagaaaggagcatatcaccatcctcatctcaaagcaggggtggaagaggcctgggctaatgagatagtcacagcctggctgactccgtagtgtaagaaagcacagagtgtagactttgatgaatagtgcctggtccctggagagtgctcaatgattatttgctgaaaaatgaattatttcgtttagttacatgatctttcaacattacatgataggaacttcaaattgatgtatcatctcctttttttttttccctattacaagtgtgtagaaggaagaaaaggataatgttattccacatcaggaagagaaaaaattatatagcacatgcaaagtactgccccagcgaggtggcccaggctaagaatgacttgatatctgactgaggaatttaggagttagacatcaggggttagtggcaaagagtagacatagattctaggccacagttctggtagctagcttgcatcatgaacttcctaatataaaaaggggatggaaagatggatttgtttagttttatccacatattcacttttactcatagttcttttctctatattttcacccaagagagtattattctaaacagaggacgtttaaaagctcctctgtgcccccctggaggagagcatggcaacacactccagtattcttcccttgagaatctcatggacaaaggaggctggagagctatagtccgtagggtcacaaagagtcggacaggactgaagcgacttagcatgcacacacttgtttctgtatgttttcacttgtttctgtatgttttctataagagaacattattttaaacaaaggatgttgcagccatcaaaccatcacattacagccacctgcacagtaggccctgagggatctcagggtagaaatgggatgccctccacttagcagtcagctactgcagccacccttgaggagactcaggatgaaaaagcccaggatactggccccagacagctgatgtgcatatcaaaggaataatttcattgagcccagacccttgcattttcccatacttgcgatatttggttttccttagttaacagtaattttttgatgttctaactacctgattattgttgcaaaaccttctatgtatccaggcttctcctttccatcttcagaacagccgctcagagctatcaagaggctatgtcccgggtttacatcctcagtttggcctgcaaacacagcatcattctcgactttacaacatttcagttttctcagctctcaacttttcattccaacaatactttctaaaaaagtaaagatttcaaactctctactaaaaagtgagttaagggctggataaaaggagcatatgtaaagaaaagataaactaaataaatttttcagctagaattgaccttccattcagtttcataaaagttcttaagaggagatgatgatattaaaataattttgtataatatagagtcattaaaatacataatgttacccaccttctactttttgccccaaataagatatttctaatcatgctaattctgtcaagtgggtgttattctctctaaattgcaggtaaggtccagaaaaattaagtatttttctaagttcacctacttattaaatagcataggtcacctgaaatagtttttgaagcaacaagatatgaagagttatttttaaaagagaaaagtcagtactctgacataggtccactcgactgcaaagcctttagcagttcagctcagtttttataaactggttcagtcagtcttccttcattttacctaaaaagaattgtgtcaaatcgtagctggaacacaagataggaacaggcagtttgacttgtgaagtaaattctgttgtgcatatgttttcctttttaccccctgcagaaatacctcacatctgaaattatcttcaggttgaaacctgaacttgttgctgttctgagggcctccttgattaggtcaggcattccttacccagtaccttccaagtgcctactacttgcgggcactgtgctagacactaggctacagcagtaagcccccaggagcctcctgtgctgtgaaaatacggacaaacaagccatcgtagtgactagcgataggtgcccacagaaaggggcacttgtctcagccgggggagttagaggcaacttcttatgaaagtgatcactgaagaatgacctaaagggagaaggtgaagagagacagattcaaaaacggagcatgtattcatctgagggcatatgtgtgatgtctaggtgcttcctctgtgtctatcatttaatctaacgggtaccttatcaaccatagttgtcattagcctcattttacagactaagcaaaggaggctcaggctttggactttcccttggccctgcagtaaatggcaaccaactttccaagtttgactccaagcctcattctctttccattacttcctgggacggcaatgttctagtctcagttctctacttggcacatagagatatcagaacggaaacctttaatcatggtagaaatgtccgactctgtgagcccatggactgcaacccgccaggctcctctttccatgggattctccaggcaaggataccggagtgggttgccgtttccttctccagggcatcttcctgccctagggattgaactcgtgtttcctgcttggcaggcaaattctttactactctgcaagctaagagcttggttgctcagtcctgtctgactctatgcaaccccgtggactgtagctggcccaccaggctcctctgcccatggaattttccaggttccaggaaatcttcccaatccagggatcaaacccatgtctcttgtctcttgcattggcaggtaggtttttcaccagtagggctacttggggaactaagaggtagcctgtgtgatgccaggcacatcactgccctcctctgttgccttaatttcctaatgcatcaaagtcaggctgaattagtgcatcacctaaattagtgatgtctactttccctctctctttaatactgggtggttctctataaacttggagatgctccatggctggactggggctctaggtgctgggagagggatgagagggagacaaggagaatgggctggaaggtaggaggccctgggactgtaggaaagcggggagaaagagggtgtgaaatggacttttacatcgagtgcgtgagggacacgggctgaacttgggtgacggtggggatagggaagttattgtcagagggacgcggtctttggagctgatcttatctgacaatgggactctatcctgtgttgaaatcagtgacaatatgattccacccgtccttcccagtgcccattaggtagaccaaagtctgatatctttcagatctgtcttcctttcattgagaacatgtggcaaaatgcaaaactatgggctctggactgaggtagaccctcacttgggcccttacaaactgtcagccgggaactataagacatcaatgagaagaagagaagatatagaacctttgaggattggattggaagccagattttgctccttactgtctctgagaccttgactatgtccttttagccgctctgagcttcactttcctgttctctcaaataatgtcaatacttcccatctcggctttgtcgtgaagattatatgaaattccagcttctgagaacaaggtctgagatgtagggttcagtttagaggagtctcaggagaagctcatgactgccagtgggaggaagtacttgcccaaaggcagggaggagtggtctggggggtgagggaagaaaacgcgctgtacacgcagaaatacgggtgtcaatcacgcttgccccacattagactggaccgacagtcaatgggagctcgcagaaggtttggcacttatgcactccataaacaagcgccggatcttcttagagaaagtattttcaaagcacttgttctgcgtaagacttcttgcactggcattattatctggtgggccatctgctctaattaaaatttcacggagctgaggaatttagtaccctaacctcagagtgcctggtacacttggtgtgttggagggtgatgtatttggaaagattagaggaggatgaattctcttccagcttctaacgaagcagaagtgaaggttttctgctaggatgtttttgctctctggcaccggggggtcagagattaaataatttgccaccagacagatgttctaaagagctaattaaaaaaactgacacgtacccaagacctcagatagttagatttatatgcctttctctctgggaagatcaaaatcactgcagcttaaaattgctgcactcaatgctatttccagagagttcacgattgaaatgaaaggagcatctttaaagacattcttaatgatatgatatgtgtctcttaatgatatgagtgtgtctgaaatctgaaggcacatttcaaagaagtggaaaatcttaaaaaaaaaaaaaagcccatgctgggcctcatcccagaccaatgtttggaaggagggccctggcaacaaattttcttaaactcgctgaatgaatatgcagccgggattgtgtactgctgatttagaaataaaactactttaatatctgttctaatcttggagataaggtcatgtcatatatgggagcaggatagaaaatggagttaggcctatttggttagaatgacagattggccaagctcttattctgttctagttaagttacttaaccttggtaaaggttaaagtttccttacctttaaaatatggctgttagttctttaatagattattgtaaggattggatgtgaacagtgtgtccataagtaaagcacctgctatatgctcagcacagagtggacactcaataatactatggtagttaccaccattttttttttttactaaaatgctttgttggccattttaagcctacttctcggggcaagcgcattgatataaatgaaaagatgctgagcagaaatgtgaagatgagcacatatctacctaaagtagtcagcaccgtagaccaccttgtcatactgcaaatacgtaaagaaatcacagccagattcagtctaagtgaatgtgtcttggaagtcataggagcgataaattacctttactgtgaaagatcctcctgaaagtgttgttaaaactctctagaagaaatgtcaataaaaattcccaggtagtattttgcacttaaaccaacagctgattctcaacaatcacctagaaagtgtgggcctggctgtgtctacttggctgccaagaagcacagtcagttatatcacaatataattgtcccaaaggtccaaacctatagttttatcaggcagggtttgattgttcatgctcatgtttcacagaaatgggagagggaaggtagttctgtattgctctcccttctgctagtctagactttggctgtgactttaagagtgaacagaaagacagaaggaccagcagggcagagcagccatgcctgaggccccgaccccaacttcttacccttttaaggatggaaatgaatgccctgtttatactgtgctcctttgtttctttggggaaaatacttagggggagttgagataaggctgtgccctaaacgctatacagcttgcctttttgcagttggtatattatagagatcatggcaaacactggtgtttactgttcgccttagactcacctctggctgtgggccagccacctgccccttctcaatctcagtttcctcagctgcaaagtaaaggcatagaatacacacattatcatgttctcctgatgattaaatgaggagaatatgtagataaatggctgagaaaagaagagaagctaaaggcaaaggagaaaaggaaacttatacccatgtgaattcacctgcatggcgggagacctgggtccgatcccttggttgggaagatcccctggagaagggaaaggctacccactccagtattctggcctggagaattccatggactgtatagttcacggggtcacaaagagtccgatatgactgagcaacttcactttcactttcacccatctgaatgcagagttccaaagaatagcaaggagatataaggaagccttcctcagtgatcagtgcaaagaaatagaggaaaacaatagaatgggaaagacaagagatctcttcaagaaaattagagataccaagggaatatttcatgcaaagatgagcacaataaaggacagaaatggtatggacctaacagaagcagaagatactttgaggaggtggcaaaaatacacagaactatacaaaaaagatcttcatgacccagataactatgatggtgtaataacccacctagggccagacatcccggaatgagaagtcaagtgggcctcaggaagcatcactacaaataaagccagtggaggtgttagaatttcagttgagttatttcaaatcctgaaagatgagctgtgaaagtgctgcactcaatatgccagcaaatttggaaaactcagcagtggccacaggactggaaaaggttggttttcattccaatcccaaagaaaggcaatgcccaagaatgttcaaactactgcacaattgtattcatctcacatgcttgcaaagtaatactcaaaattctccaagctgggcttcaacagtacatgaaccgtgaacttctagatgttcaagcttgttttagaaaaggcagaggaacaagagatcaaactgccaacattcactagatcatcaaaaaaacaagagaattccagaaaaacatctacttctgctttatcaattatgacaaaacctttcactgtttagatcacaacaaactgtggaaaattctgaaagagatgggaataccagaccacctgacctgcctcctgagaaatctgtatgcaggtcaggaagcaacagttagaactgcacatggaacaacagactggttccaaataggaaaaggagtacgtcaaggctgtacattgtcaccctgcttatttaacttatatgcagagtacatcataagaaatgctgggctggatgaggcacaagctggaatcaagatttctgggagaaatattagtaacctcagatatgcagatgacatcacccttatggcagaaagtgaagaggaactaaagagcctcttgatgaaagtgaaagaggagagtgaaaaagttggcttgaaactcaacattcagaaaactaagatcatggcatttggtcccatcacttcatggcaaatagatggggaaacaatggaaacagtgacagactttatttatttatttattttggctccacaatcactgcagatagtgactgcagccataaaattaaaagacacttgctccttggaagaaaagttatgaccagcctagacagcatattaaaaagcagagacattacttcaccaacaaaggtccatctagtcaaagctatggtttttccaatagtcatgtatggatgtgagagttggactataaagaaagctgagcactgaagaactgatgcttttgaactgtggtgttggagaagactcttgtgagtcccttagactgcaaggagatccatccagtctgtcctaaaggaagtcagtcttgaatattcattgaaaggactgatgctgaagctgaaactccaatattttggccacctgatgcgaagaaccgactcattggaaaagacactgatgctgggaaaaattgaagacaggaggagaaggggatgacagaggatgagatgtttggatggcatcaccgacttgatggacatgagtttcagtaggctccagcagttggtgatggacaaggaagccttgtgtgctacagtccatgacatcccaaagagtcagacatgactgagcaactgaactgaactgaactgctccttggaagaaaagctgtggccaacctagacagcatattaaaaagcagagacattactttgccaacaaagatctgtcttgttaaagctatggtttttccagtagtcatgtatggatgtgagaattggactataaagaaagctgagtgccaaagaatcgatgcttttgaactgtagtgttggagaagactcttgagagtcctttggactccacggagatcaaaccagtccatcctaaaggaaatcagtcctgaatattcattggaaggactgattccaaactaaagtccatcaccaacctgatggacatgagtttgagtgcgctctgggagttggtgatggacagggaagcctggtgtgctgcagtccatggggtgacaaagagctggacacgactgagtgactgaactgagatgtagataacatttattaaatgtatgctatgtcctcttcactgttctaagtgtcttgcatgttgtaagtattaacatgtattaacttacaatcatctgtaaaatagattccctttacagatggggaaactaaggtggggagtggttgaaagagttttgccaaggtcacaccaccagaaagggagctgcagtgtttggcttcaggcttgtgccatgtgtattatatcctgtgctgttttgtggaatgcacgtggtcagtatagtgcttgctcctcttcctggcttcctctgataggctccaatctgaaatagatgtgccgtggcaaccatggtacacataacaagtatttcccaagtgctcactgataaattaagtaattaaaaagagtactaagtgtccagcgcttccctgatggcctactggtaagaaatccacctgccaatgcaggagacatgggtttgatccctcggtcaggaagatcccctggagaaggaaatgataagccacttcggtattcttgtctggagaattccatggctatagaagcctggtgggctacagttaatatggctgcaagagttggacatgacttggtgactaaaccacaaccacccaagggtccatctagttttgtctagtaatggatttatattgaattgtgtgttttgagacttcacttgcaaagaaatctcagtggctctatctggccgagttttcattcaaggctcatagtagccaggttccagacgcccttttcaaccttattatacctctgctgtttaccttgctagtataaggtctcgcaaggacagactttagcgttgtctttgtatgcctcatacttagaagcaatctaagattgcttagattgaatgattgaatgactgtgagtcatcatgaattgctacccttgttcccaggtacaatctaaaagcaggcgcggccactcctgggctctgacggtttccttagtctagagccccatcctccataatctcacatcctagtcctgacaccaccagctaatgtgttaaaagccacagtttccctggcatcatcttatcttttactaaaatgaccctgctaggctgccactaatttggcttaagttttagttgtttctctcatgaggatgatggattttcattcatttgtccacacttcactctcttcattagtagattttgccaatttatgctttacaatgaaagaaccctattttcctggcaagttaatataggagtggaggtttaaaaatactactgtcaaatctaacttatattgcttatccaggagggccctttttaatgcttaaaactagctttatgaaagagaaaggatctaagatttattttgcacccactggtcctaacattgtagtaagaacttttgttattgctcttgattttgaaaagttgaaaaaggaataaaacttggtaagagccaggccttgatgtcagcaacatctggttgtgaattctggccctcaaacccttctgctgtatgatcttggcactgggaggagtctcttaatctctctaaatttaagttgtcttacctgtgaacagatatgatatcccacattttatatttgtgactgagcaggcagcacgtgcattatcatcaagactgtcatatggatgaggaaagggaggcccagggacatgaattctggctctccagcttccaggccaatggcaggactgcactgctccagctgctctgaagttgggtgtgaacacatgactttcatggggcaatgaaatgggaggataaacgctgtgtctccctttcacttttctccggaagcaataagagccagtgctcaattcaccatgttcttttctccctgcttctgcaagcatggcaagcacggagatggaatttctcttggcctaggttgatggcagaaaagccaggtatcctatgatgcatgtaggatgagtgacagttatgactttgttgctttaagctgctgatttgggagtgtgaatgaattctggtataaaaaccagtaagaccaacaacaacatcacaaacaaacaaaaaaacaaccagaacttcaccttattttagatttagaaaccctcagaggaatttttattaaggctctgttaaatgggagaggtttgttgtttgtggaactcgaaaagttaccataagctttcatagcaagtgaactcagggttgagcttgaatgaccaaaaacgtgttaaggaatatttacaaaacaaatccatatatttacttttgtgaaagactaaaatgtaaagttcttagaaggaatcaacgagagcgaggggaatagaaagaggatgcatgggacagggtttgcagctgctgctgctgagtcgcgtcagccgtgtccgactctgtgcgaccccagggatggcagcccaccaggctcccccgtccctgggattctccaggcaagaaccctggagtgggttgccatttccttctccaatgcatgaaaagtgaaagtgaagttgctcagtcctgtccgactcctagcgaccccatggactgcagcctaccaggcccctccgtccatgggattttccaggcaagagtactggagtgggttgccattgccttctccggggacagggtttagaaagagatatttaagtactgccctttgtttcatataaatctctgcgctagtgttattctagaatactgaatactaaaagctgttttctccccttaggaaaatatcaacatcgatgaggcctccagatgcctggtgaaacatatacttgccagtgagtgtgacctgatggagtccattcagcctgacatcgtgaagccgcatctcacatcgcccagggttgtcagctgctccagctgttccaaatcctagtaggctcctgtgctggagtatggtggtgggaggaatccatcatctcatgaattgtgtctcaaattctaccatcttggataaatgtcaggatggggatacacctggggcaagccaaagacctatgcctctaactttctttcctccaagagaaatagcaaatcttcctttttatgtttttttttccccaccacagcatcagcacagtgtttacaagcttttaaaatatttagtctgttacaaaattctgccttgtagctgactgtaattctgcacaaacagagttggccctattatttgcctctttgggtcagccagggcctcaggtctgaaagagaaaggggacaagaacagactagctgtcaagttaagcgctggctttcactttgcccctggtgtctttgtccagacctcagtacatcctctgctgctctgacaggcctattaagtagaagctgtcctttctccagagatgacctccatccccagcagacctggagctg

SEQ ID NO: 192 - DNA, 7113 bp, Hippotragus leucophaeus
  source 1..7113: mol_type = genomic DNA
ctctggaataaatgaactgaaattcttagcacagtgggaatggagggggtatttatgagatatcatggaaaagtgcggaggccatccactgatataggtaacatgaaggccaaaggttaggctggaaggagaggagccaatgatattttttgacttctggagttccaggtgtctcttgaacacccaggtgatacctaataggcttatgaatacgtgtgtgtctgtattttttttttttccattattacagtttgcaagacacgtggactggagatacaagtctgagtgccattggcagtacaggtagcaagagtgtcaatgtagtcactcagagaaagtgtgggccagaaggtctgtggactcaggactgagctctgaggagctccaactccaagcggttgaaggctcggatttgttaacattctttcaggagcagggtgtgaagaaaggagcagtaggaaaggagatcaacataatttagaggaaaacaagctgaagagatgagaagagagggacgaaactgcaggagagaccagaacacggtgtcaagtcgaggaaagtcagtagcatcaaacactgcagaggtcaacgaagataaagacaggaaacttcatgttaggtttggcaactaagaggtggccagtgcggccagagtgaggtcactcgagcgctgaaagggtgagtttccggctgttgaagaaattttttcagctgaaacgcagtttgagcagctggctgggaactgcaccccgcgctgctttcccgagctcatcagagttaagcgttcacactaatacttcaccagaaggctaacagggacttggcgtttttcgaacagagcgcgcaggaatcctgcgcaggcgtttccggagtcggaagctctcctgcgggcccctccccaggcctgcagagggcgctgtgcctcggagaagccagggagtgacgccgctctagccagcgctcgggctcggtggcgggcgccgcagctccgcgtcccgctcgcctcctcccagcacaggtgggtccgcccgcggggggcagcagtgcttgggagccttggggcgggcgggtagcggcaacctctgggcacggagtggtctccataacctaagtgccccaactcgggcccggctccggcggatcgggctgtgggcagggccgcacgtgtgcaagtccagttcgggtgggttcctcctggacttgcagtgtctgtcccgggaccccttaacaccccagggatctccgcccgggcttgctcacggtttcctggggacatcgaggggcggggctccaaggggcgggactcccatgattgacacgtctttcgccaggtttcacgggcaccactggacccttcccctgccctgaatctgagccagcaccatggtgagaaccctgagtccagctcctcacctccgcatgcgcatgcccttgcccttgtccggcgtgggcttgcctccgttgcccgatataaacctggggctccgccggggtggttccggtgggtctgccccagcaaggcagcctgcactcttgcaaccatagcacgggcgcctgaaggtgaagacatcggaagagcaagcggaagccaaaagactagagcgggaacagaagctgaagctataccaggcagccacccagactgtcttccagaaggtggggccctcagaggtagtcccctcccaccgtggctcctttagcatagcacttggccaagaactgcgccttaagagtcaggttgcttgaatccacatctaggttctatcacttactagctgtgtgtctttaggcaagctactgaatctctttggacctcaatttgcccatctgtaaaacagggctaacgattgcacttactgcataaggctgttgtgaaaatcagtgattgcaagattacatattatcccataaagggctttgtatagtacttgtagtaaagtgtggcattcacagaacattcagtagctctatttatgttatggagctctgtagcagaagagtgatgtgatccctgatcctgctatctatcttctcagcgccaggctggagagctggatgagtcagtgctggaactgacaagccagattctgggagccaaccctgactttgccaccctctggaactgtcgacgagaggtgctccagcagctggaggcccagaagtatgtaggggtttagggcccaaggaagatggccctcgctctggccctgcccagcctaggtccaggggtggaagaagaatggggcagccaggggcataggaagagggcagtggagggctaggtgcagaaagtcaggggtgaactaagactgggtgttggagggccctgacccccattcgtctgggcacaggtcccccgaggagttggccgctttggtgaagtcagaactgggcttcctggagagctgcctgagggtgaaccccaagtcttatggtacctggcaccaccgctgctggctgctgggccgcctgccagagcccaactgggcccgggagctggaattgtgtgcccgcttcctcgaagttgacgagcggaactgtacgtgcctgcagattctgtctccctgcctacacctgccccatgtcctggtagtagggcctcagtaaggtccagagttgggagggatggccaggatgagtccactgagctgatgacagaagggatgacgaggccaaatgtgtcctccatggagggcacagaggtgtttcttggggtctccaaggggatgccacggtcccagccaggcagctcttctttccctgcttctgcgatgtgttgtctacctatccccccagttcactgctgggactaccggcggtttgtggctgcacaggcagctgtgccccctgcagaggagcttgccttcactgacagcctcatcacccgaaacttctccaactactcctcctggcattaccgctcctgcctcttgccccagctgcaccctcagccagactctggaccccaggggcgcctccctgaggatgtgctgctcaaaggtaagcagggtcagggagtgcttgagaggactcttccatgctgcccttctgaccctgatgcctaggcctgctcctgaacctaccactcgggaaaatgcccggctctggggatgcataagatacagcccctggctgcagagagcccaagtgtccacttggctcctgatgtacgcagcccctgggtaaggctggcatataagtgaaactgaaggcaggaagttctccaaagagagggcagtatgtgggggtagacaggagcccagaagggtcctaagcaaagcaccatgcctccttggcccctgcagagctggagctggtgcagaatgccttcttcactgaccccaatgatcagagtgcctggttctaccatcgctggctcctgggacgaggtgaacagtagggaagaggtgggggattggagccaagaaggaatggaaggatatttaaggagacctgagactgtttcttcccacagctgatccccaggacgccctgcgctgcctgcacgtgagccgggatgaggcatgcctgactgtctccttctctcggcccctcctcgtgagtcccgaagcttttgctgaagggtaccgtggatggtgggcctggtgccgttggagtgatggtctgtctctgtcccctgtgccaggtgggctccggcatggagaccttgctgctcatggttgatgagtcacccctggctgtggagtggaggaccccagagggcaggaaccggcctagccacgtctgggtatcccagggttggtgggtggagtcggggttgggacagggctggggtgggacagtcagaaaagtggtgcagcctgggctttctcttaaccctgtgctcccaagctctgtgacctgcccgccacctccctcaacgaccagataccccagcatacatttcgtgtcatttggacggcaggcgatgcccagaaggagtgtgtgctcttaaaaggtgagccagcctgcagcctcccccctttgcagcagcgccccccatccctgtcttcctctcatgggtgtcctctcccacccctgctctgtctctcaggccgccgagagggctggtgccgggactccgccacggatgagcagctcttcaggtgatgcgcacagggaagcacacagatcggagcagggctgtgcactctgggcagctgggtgggatgccgagggctcaagtagatgtctcagactggctcctggggatgaccagcactgctccccgaccctgcccaccctcaggtgtgagctgtcagtggagaagtccaccgtactacagtcggagctggagtgctgtaaggagctgcaggacctggagcctgagaacaaatgtgaggcccgattcccctgagcccctgcttctctgagggcccatcctaggcaggctccttgccgggaggatccttctgtcctaatccccaccctctccccagggtgcctgctcaccatcatcttgctgatgagggcgctggaccccctgcactacgagaaggagacactgcagtacttccaaaccctcaaggcaagttgggtccgcgggagttggcacggaggcagcccagcacgcaggggccaggcagctgacacacagtacctgtgccctcttctccccgccaggctgtggacccaatgagggcagcgtacctggacgacctgcgcagcaagttcctgctggagaacagcgtgctcaagatggagtacgcggaggtgcgcgtgctgcacctgggtcacaaggtagggcgtgcgcatgcgccttccccaccctcaccccgctggcccgcctccctcttcctcagcaccggcagtgtctatatctgctcctcaggccccagccaagacactcaccgtcccccgccttgccttccatctcacgtgcccttctggacatttcttccttagctcattccatgcttctctccctggggcagaccccaacacctaacggctgaatagttctcagagatttctgacaaactcctgactctgtttttcctctgtagtccttcctaatcaatctccccaacacgttatttttatcacggtgctgctgcccacctttgctcccaccaaaccaactccgggctcactgggccctctcccgctagtatctgtgttcatcccagcaccgtgtacctgccccgctccctgcactacaggccaccccggcccggtgtccttgatcaggagcatgtactgctgggggtggtgaggtatgcttctcagctgctccctcctgtcctcagctggggacccccagggcctgtgtggggcgcactgggcaaagacctgataaacgacagctgagagctgtccgccaggcctcgctgggtatctcgtcccctcctcaggatctgacggtgctttgccatctggagcagctgctcttggtcactcaccttgacctgtcacacaatcgtctccgagccctgccccctgccctggctgccctgcgctgccttgaggtaaatcccccaatcttctgtcattgttctgggtttccctttccccttcctccacctcacaagtcactccaccctactaagaggtgccgggtcctcccagcccccacagatgacccccgccttctcctctgtcacccagcctgaccccaggagcctttccatgccctgtgagctgatcaccctgggctccccggtggcttgtgccaatcccatactggcggctgcctgcctccctgccttgtcttccctgctcccaggtgctgcaggccaatgataacgcaatcgaatccctggatggtgtcaccaacctgccccggttgcaggagcttgtcctgtgtaacaaccgtatccttccgtctgggtgccattcagacagcagggagggcgaggtgccataccaggaagggatggccaagaggcagggcgggcatgccctgggcgtgaggagggggcattggccatctaagctgaggagaggatagcctggctctgtatgagtctgtcattgactctcactggtagagttttgcaggatggaaggaagtggctccctcaaacctgagttcacaaaccactgcctacagatgttcttgggtaccacattgtatgtttaaaatcaggaggttttatattctttaaaaatctagaattccgattattctcaaacgtgtaagttgaagcacgctttggcctgcatttccacttgggagcccttggccattgatgaatcatgggcacttctgcagcaggggctggctttccccttggccacagtttccaccactcctccgggaccatatcccctcagggtcctgcacctcctgcctggcccccaggggcaggaatctgcagcctagaggcctgtgtcctacagggaagtggccaaggggcccatccagcgggctgctcagtagcagtgctcgatctgcagtgacaggtgttcaggagcaggcggatctggagaaccagctgagctttccttgactcctgcccaaggcctccagcagcctgcagtgctccagcctctcgcctcctgccccaggctgaccctcctcaacctgcagggcaacccgctgtgccaggcggagggcagctcggagcacctggccgagctgctgccttcggttagcagcatcctcacctaagaggccctgcccccacccttgccctttaacttattggaactgaataaacaatgaagaggtccctgagcgctgctaagctgctgccgccaccacggttattgctgtcaccactgcttttctggacaagaaagggagagagatgtgtcggctcccccgccgtgcttccattttatgctcagtcttgctgttccctgtcggggagaagcagaacctccatgttgggggcagaatcagggccaaggctggattggagtctgccttctgctttggggctgggctgcgcctaagctccaggctggcatcaggtttgggttcaggttctagttggagtggggctacaaagcatctggaagtctctccaactagaagggctgagagaagtttcttccgtgatctgtgccccttccagataccctgtttgccctggctgtccttcaccaaagctgttcccaggaggtgtgttcagggcgccctggctccactctcttataacaacacta

SEQ ID NO: 193 - DNA, 31123 bp, Hippotragus leucophaeus
  source 1..31123: mol_type = genomic DNA
gcaggccgccgcagtcccgacagccctgggccatctgcattatgtgcaaagctacctgtttggcgccacatcaggtgtctgcagagaaggccttctgtgacagcgaccctcctaggagctggcttagtccacacgtcccacatcacggctggttgcctgccaccttcatttcccgtctgagcgcggtggttgttccaaagacactcctgcagtgtctttggacactggccatcagcagccacgggtgtgtctggaggaggtcggctcatgagctcgggagccgccgggggagcaggatacaccagctggcaaatggcttcctcctcccagggcagcaagggcagaaaaggcaacgtgaagttaaggccctgttgagtggtgtagaaggtccttagcagcagcttctcggaagaccagctccgtccccacagaaagagcacagacggtggtgcctgctgaccgcccttcccaccggcagcctgggcagaggcacagggccgctagaagacgggcagccgaggggacgtggtcagcgtgcaggcgtttatgtcctcggtgtgggccgcccggtgcagggagggctccgaggcgctccggttgatcttgggcagagagtgctggagcagctcgatggaagacaggatctgaaagaggtgccagggccgtctcggggggtgcgccgggtgtccccgcagcagcttcccctcgggccccagacaggcctttcccacccccacgcatggcgtgtgcaggacgcatgtctgcccacctccacatcactcagttcagtcgctcagtcgtgtccgactctgtgaccccatgaatcacagcacgccaggcctccctgtccatcaccaactcccggagttcactcagacttgcgtccatcgagtcagtgatgccatccagccatctcatcctctgtcgtccccttctcctgcccccaatccctcccagcatcagacccgctctaacgcgctcgagcgcctggacccagccttacctggggaaagagaggcctctcttccttcactttcttcacacagtcagctaccagcctcttcatggctttggggcagttcttgtatagcttgctgaggtctggggaggcgtacccgcggcccaccatgaagatgatctggggaagcagcgggggagggcgggcggtgagcagagcgcctctgaccctgccgctcagatggcggcccagcttcccagaaccagcgggtgggcgccggggacacacctggtcacggttgttgatgtgggagtaagggagctcccccgtcatgagctcatacagcacgatgccgtaggagtagacgtcagactggaagctgaacgggttattatcctgcatccggatcacctctggggcctacagaaccaagtgcatctgtcactgggcgccccagccgtccaggagccaggctgtctgtcccagggctgagtgtgccggtcccatcctcagaaagccccgcggctgctcatccccaagggctcccacgctcagatccatgagctcagagcccaacgtgaacccagcacccctgccacccaactccacgctgtgctgtgccgccagctccctccaggaagcccgtaatgcccgggagctgccggcacaggacacggcatggaggtgctctgggcttggcctggagttggcccccgggcccccggcccccggcccgctgtgggtgccgagccgcctcaccatccacaggacggagccagtgggctgctcgacctgctgagaaccgctccagcgcgacttcactgtggccaatccaaaatcgccgattttcaccgtcaggccttcgtggagaaatatatctcaatgctcgttaaggacactagtttagaaggacggtcccgttcctcctgaaaagccgccccaagttccccctggcaccacctctcggccctccctgctctggacctatggtgctgccgaggggaccagagcgagaggcccaggcagccctgttccttccgctgcgcgcacgggcagctggggctccccacagcctgcagggcctcacaccccaagactgcgagctcggcctgcacctcgccctcccatgaccaagagaaacacctcagtcctgagtgctgtctgccttcagacatttcccatgagaacaggtaccgcggtgacttcaaaatcagaaccaaacttgcctctgtcccgggtaaagtagtcaggcggtttaaggccgacgcgtgcgatctgctgatgcccagtaatccatacctccttagaattgggtgtctgctttcgcggtatgatgtgttggcccccaaacccaccactccttgcctcagacacatgccccaagtaggtcacatcccaaattccagcccaacacaactgctgtgcctcccacgggccaggagcaaagctggctgcaaagccgctcctctgagaggcgggggcgggaggcaggtatgcaacttgcctactccacgcctacagccccttctgcaaaagcacattccagtcggaaaagggctggttccaaccgtctctaaggaaaccatttctgtacattcaagaaagacaatttcaagtaatgattctaaaaatcttataactttcgacttacatctactttctgaccagatataatccacaaaccagaaataaacatgatacaaaaggccccttccccccagttagatttactaataaataacattctaaattaggcctgtttcatgcataaccaaaacaagtatctcaactttggtggaactctttccaaagtcacttttgctgaggtaaactttaaaagtcttctaaatttagaactgagcagtctgatgaaaccaccaccaaaggatactattggatttcatgtctctgtggatgatgttctttgcatgcaaatagctgtgaagggaaaataaatctatcaaaaaccagtttgagagacattggtaaaaagcagcttccttcaaattacatcaaagaagcaaaccacttggaaggcctgactcccagttgaggagttatggggttggccaaaatgttagttcagttatttatttggttgcatcttacagaaaagcctaactgaactttttggccaccccagtacggggtactggtcctgccctggttcagggtggtccctgttaggactcacacctgaaagcaaggccacagcacaaacagggttgtcttttagcatcagttttattcaaaaggtaattctgacaacccagatgtccatcagctgataaacaagtaaaaccatatctgtacagcagactgttcagccacagaaaggactgcagtactaacacactgcaacacagatgaacgcctcaaaaacatgccaagggaaagaagccagacacaaaagacttccatctaattaatcttgaaagtgttctaaaattagatagtggtaatggctgcacaactctgaataaaacgagtcactagtcatttctgaaaatgtattccatgcaaattccgtatgaattttacaagcatgacaggagattttataaaccacttgcgagcacaacttaggctcagttgagtcgctcagtcatgtccgactctttgcgaccccatgaatcgcagcacgccaggcctccctttcaatctccatcactcaaactcatgtccattgagtcggtgatgcaaatgatcagaaaagtgacatctgataaaccctcaggaggataaaccatactggacggctacacctcagaggcgtggtgcaccccagaagccgccggcccactctgtgttctggggtgtctggctgaactctgagggcagcagctggaacctgaatctgagctccaagcaggtagacagctcaggcaagaaacccgacattctcattctttcagtccaccccacaggtttacttccagctgtgcaaaaatatcacagaatccacttaacagactgagctttcccgaatcttggttttgatttagggacaaggtgcacggaccccagacctcctactcgtcaagccatccactcactccattccctgagccgtctgccgggcaatgtcgatcagctggaacatctggaacttggtctcctggacgtgcaggtgtttgtagaggctgctgccctcgcaccactgggtcactatcgctaggttgtccttcgtcatgtaccccatgaagagcaagatgttcacgtgccgggttttgctggagggggaggaacaaaaggctctgcgcttctgcagacagggagatgcatcctgcccccgagcacagctggtgtgctcccgacaccgccgtgcttacaatcccggggctcgcaaagcaagcatggcagactgcgcccacacagccgctgctctgggctagcagggcagccgcccgggtgccggcctggacggcagagaaggcgtcccctcccagcagcacagacccaccaagctccccacgggggtcacagggaccccgcatctgcggagcccatccactcagcctagtcctgagtctaattagggactccacaaagattgaaaagctgatgattttgaagtccaaatgaaggccatttggctataaaaagttcttggaaataaatatgaaaatagaacctatttctccctatgtcaaaccaaaacccagcaacagaacctgagctgttgaggtggtgagcccagaggctgaggcggtgggagggcagtgccatcagagcggctcttctcaaggcctaacgagcacaggagctggaagaaggttccactcctttccacttgaaagggagctccacaggagcacgcccgcagaggcaggtcccacccgcccctccacagccgccacagaggcccgctctccactcaccggaggacagccacctcgttcctgaaggcctggaactgctctggggtggggtcaacaaccttcagaatctttactgcaacatctcctgcaaatgagtttacagtcagaacagctgaatgatcttaacttcatttttcacgtacactcatctgaggaagagatagtaaatcccttattcaaaaatcatagacctacacaggacaaatactatgccaatttctgaattattcaagtggctgaaaaaaaaaataagttatactactatccttaaaattccgccccaaggccctgaaccggcttggtttcagctgttcctgtcaaccctggcattcccggtggtgaggtgaccgtcacaacctgggcccatgaggatgagagcagcggggtgtgaaccgcctagcagatgctgagtctccgaggccagaggctggtgcccagaagcaggccagtgacagcccagatgctccttgcacagattcaaagatctgcattgtaatgaagctcctctgccttcaatcccattagaaaccaatcctctcgacgacccctgaccactcactaaacctgacacgctgccttcatggggcggcgctgctccaatcctcagctgccttctcccgctagcactgctgacctcaccctataaataatgcaggggggctcggccagttggccacggtagcattgcccaaaaggccagagccaggctagaaccccagtccaacagctgtacttataactaacatactgtcaatcacttatgtaacttcagaaacagccacagagcaactctattttataggtacggctgatttagaagccactttcagtaacagtgctgatgacaaaccgcctgaagccctacagggacgtcagctttcaggaaaagcgatcagtcagaggagtccagctcagcggcaccccagaggtgaccgagttcccccgcatcctgggcccgtgcccacagcaccccggcacctctgctggggcactcatttcatttggggggcaccaaacggtagagagatggttctcatgacggatcgctgccctgcgatctctgcatcatttgaaaataaaatcacctaacagcagcttccacgctggttcttaaccagttttctgccacatgaagttgcggagggcccaggctgcctgtggacagcagagacgcactctgtgttcagagctgccttctacctgggtagatggagctggtgaaccgtgcggccccgaccccaagctctgatgacggacagaaggacaagagccttgtgggtaactgtccattctggagcatctgagccaagacacaatgcaggtgagggtgctgacccagagaggagcaagtatgccagcagagatggtggcggtcttcggagggagatgggaggtcagccaaggcaagaggcagttctggatgaggaacgccaggagcagtgaggtgagggggaggggagagaggccagggaaacgctagcgtgtgctgcgacgcctgcaggccaggagggggctgagggagcctgcagcaggcccagctcggcgcaggcagagctgacggagggctggaagggacagaggccagaaccctgtgaaggtgaactggctcaacggcggcggcagtagaggcagggccggggccagggtcggccggggcgcaaagggccaggctggggaggatgtgggagggagccaggcgaggctggccgcccctcgggggaaccgctccccacactgagcctggtcgggcacaccctgccccctcacggctctcctcccacaggcacacgcagtccagctgtggactgattagcacggcaaccgcagagagggcagcagcagccacagctgccccagcaacgccccccgagctgagctcagctggcaccctcccctctagcctctactttctggagctgggaataagacggactcctgtgagagagtcatctgttctctgttccaccatcactctcaagtccaaaccctactccgcaggttgtgcccgtcactgatggggagacgggacccagaggcctgccagctcaggttagcagttctgccagtggactgtgcattaagactacagtctgggtcacagcacccccaaggaggccatcatagggatccagtttgctgggaacaatggacaaacaagacaggaaaactgatttcaactcccatacagaacggctctctgctggtgggaaccgcccagagcaaggctgagttttcaggtcactcagaagctccagtcactggtcttcaggccaaggctgggcagcctcctgaaggccgggcagagtccgggatgcccgctgcgcccagtgagaccagggtctctccgggccctcacaggccacagcctgaccccagtgccccagcctctccctcgcacctccccagcagcccctcagagctcctggggtccctgagacaggcctggggtgcggcccactccacctctgctgcttccctcacggactccccactgacccatcaactaaaagcgaggcctgccactcctcacccgccttcttccaagttcctcctgagcactcagcacacaccatctgctgggctttccttggttattatccccaccagaatattaactccgtaagagaaagaatttgtatccattttgcttagggcttcagtcccagccctgagagaactgcttggtattagaagaatgctcaggaaacactggctgaagaaatgagtggattctaagaggcactggtcagcaagccaagtcatgagctgaaaagctgtctgtctgaagctctggagctggaagtgggcacagcctctgacagggaacagtgggcattgagatggcccgcggggcccagcgtgtcaggaccactcagcgtcgccctctcagcgctccgtgcagcaggctcagcgccactgctgagtgaccgcgtgacgtgggcgctactcatcaaaccagaacggctcactttccctccacagtgatgtcagaggcaaacgtggtacaagctctaagatacatcgctactggttatcacagttttaataagacactgagctggtatgattcatccaccactgaagaagaaagagctgccatcactgatgaatctcaagtgggtttttttttttccctttttatttttacctttttatacttcaattaacttccctgttttaatcatctgggattgcctaaaacttactgtacacaaccctgctttctagaacagaaacagactgaaccccattcctcctcttcgtactgactcagtcaagatgagcctcagcctgaggcggggctgggggtgcccacacatggctccgccagctgcagacctcacacgtggcccctgagtgtcggtctggggatctgctgcctcttctcaccctgagagaccgaccctgctaacagtctgacagcttcagctgctgtcgtcttcacttttaatgcgtttttgcaattaggagacccaaattcacactcaaaaggagacttggctctcgggcccaaagggtctcttctgtatgtgaagtcaataggctccgttcacggatctgaggcctccaccttggctgctttaagaccttttctgttttttatttttgttcttgcagctgggaaaaataaaaagcatttaaaaatcaccaaaacagctttaatttttaaggaatcgaataaaacattatatatataggaatcagaaaagcatgggggaggggcgcaaaaaggaagcaagcatagcataaaacattcactcttgaaatcatggtttccttgaccctctccttcgtcttcatttgcagaccacagcttgctttctgagaggctgacctaaaagtccacagctcctcactcctctgaattttgagactcttaactcagaaaagttagaattaaaagcattagatgttatccacattctaatggttgtctttatggaagtaacactagcgcaatatacctccttacagtaatctacaagctcacaactgagagaaaacctacaatctcaaaggcagtactgtggcaaatctaatgctctaaaaaattatgaacccccaataaaagtgctcaattggaggaggtttaaatttgggcaacatttaaactgcatgtaactggcttttggcagaggctttaaaatgtataaaaatgataaaatgctcctaatggaagcattaaaagaagtattttctgctccacttcctgcaattacttacaggcttgctgtctcaaatataagcactctatctcacaaaattgtgtttttcttttctaagggatcaccaagacatttatgacatctatttacaaaatattcagcaatagcataatttctcggtgacctgaatcccccttcatgtaatttacaaatattcagtcctttttcagttcttacaaagaaccagagacttgtcagatagttagttataagtggaaaacccataggttaatgaataagctactcgcaacgctgcaagtgttctcagttgttaacaagttgaatcttaatgctccaacgcattttatgctcatgacttctcagcctttgtccatttatgtgtaaagataaacacagtggcatccaaagtagaaatgcaggcactctagattctgtgtgtggtttcgtggggcttttggtggtctgcttgcttgcctttttgttttattaaaatctgaatttaggagagatgtcttttggggaacatgtagcattttcaagaaaatactctatctgctgacattctaaaggcacaggcaataaaaacctgacagagaaatgttaagtgtgttgccaaaataaagaagctgtggctacagaccttaaaatagaaagtttcttccaagtgatgaagtatttccattcaaataagaacatcaactccatacagattcaagaatacagtctgtgcattcctgtctgacagaggttcccacaaccaattccagggcagagcaaagaaattctgccttaggaggctccagactttactgtgctgactgtctgaccatgggtgtgccagttccccttcttgagaccttgcttttctgcatgtaaaatctccaagggccttgccaattttaacttgctggaatgcatgagcctaacagactcctaaacacatttaaggagcttcaaagcatgtccctcccaggttcacactatctagtcaatttataagaaagaagagactgtgacatttgactatagtgttcaacccttgttcaccgatttcaagttatcctgaaaacttttttgtaccaattatagattgttgagtcttacaaagaacagtgtgcaacatcactgagacagaataggtacccttggacagtgctgctgtgagcccgcctggccctctctggactgaaacaggacttcaccctggtagttggcgggggcaaggtgggtaccaaacttaccatgccacttgcccttataaacagtcccgaaggagcctgatccaatccgagtggacagcatcacttcactggcttctatctcccagtaatagctcgaatctctctgtccacgaggcctctaaagcaagcacagatcattaatatgttccatgaatggttaaaactgtttaatgagggtgtcaaagaaaggatcaacccaactccatccattcccagatcttttaaaaatacctattaactataagtctagtttttgtcatttgagaaaataccattttagttgtgccctgccttgcaacaaaccagcaagttttctggtgcaagcatgcgaaaaacagcactgacacgtgtaacatgttcacttaattagcctttcccacccctaaaattaacggcatccccatttctgactaggcttctcttgttgaacccggacatgcagggggtgctgtgggcacactcacaattttgttcttctcctgggtgctggagcctggcgcccgctctctctgtgcaggcgcaggggttttgggctgtgaccagcctgtcgggctcagattgttggggctgctggacaaggctgaaggggagccttaatagacaagacaaacaggatccactcatggataagccaacagaatacgcaacagcataaagagaaggagcccattactatctgctaaatgacttaagcaggtacctgattcactgtgacttcgaattgcatcctgaaacagaaaagcaaagtgtcaatttctgccctagaaaagatgtcctctaggggagggagagggagaataaggatttacaagagcaaaagagattataaaatctctaaatcacaaaaggtctaattacatacactaacttttatttgattcaattcatccaatgtctgtggccagtatctccaggactaacacatattaggaggactgatgctagtttctcatacacgatggacacgacattcttatttctctgaagaaagcaatgcacacagcagactggtactctttaaaggaaggctaacaaagttactatcaagctgagagatttccaatggttggggatcttgctccactgaagctcaaaaaaaagaataataatttttagcaagggattcagtgcccagttcactcttactcccctaggagttagacttgcgaagggtaagcaccatgactacatactttatccaagcctaaaatcatggaaagctgggagaaccataaatcccctagtctgaaacctactttttacatacaagaaaacatatggaaacaggcaaaggggcgtggcaagggccacacaaccagcaggtagaagaaactgaactaaacataccacccaaggacctcagccaggagcgcactcatcacaaagtgttcctcagaccctgtgggtgcactcggaaatgagccacattctactcaggtgagagggcaaagattacctttagaatttattagaaactgtttagttggaacagtttaaatcacagggctctcccatgaggcctaaatcctcattttataaaaagctcacttggagtatataaataacatcagtataaaaccacttcatccccatatccttgaaaaggatatttttcttggaagtcctactctgttttccttgtgtaaccacagatacttttttcacagaattattaccaaaatgcttgcaactctgtggtatctttacaagagatgagagaaatcacaggccaagccccccaacattggcagccccatcttcagagtttaccaataaagcttggttctagggttcccccaattggtcagttttcagaattacctggagaggtatgtaagaacacagattcccaagcccctccaccagtagaattgatctaagaatgtctgggagaaaaggtgggaaatctaggaatctgcacgcttttaagaatgacaagatgactgccaggtggacaatcctttatccaaagaaaaaccctgaatttcagtagatatttaccagctgtagttttattattcaactaatctattgttttcagtcaaagcatggcacaacgtatttttattgaccagaattatataccccatgcattaggatttttttcttaatgccatactaattttcttccctgttttttctgtgctaatttctacagctggattgacttgtcatcttgaaatctaaatattaaagagaactaagatggtttacacaaagcaagaaagtgtactttaaaaatgctgaatcaaaattttaaaacacaggagtcaaaattttgctctgcttctgaagtacagacaggattaaggacaacacatgtgccagttattctacaattcaagaattttcacatttaatgttctctccaactataatacagtgtttatacaaaaacagattatatatcagaagaaaactgatatactactggctcatcacaataaaatagtaagattcacagtctgcatacacacaacctcacaataatcgtgtcatgaccgaagtgcccctaagtgaccaatttagaccccacattcaaaggacaagtatgttagaaatgacttgaggtctgagcatggtgagaggtgtggctgaaggtgcaggtggccctgaggtttttcaagggccaattcaggaggcagacagagcacagctgtctgattttaagaaacctcttatcacagggttttcagggtgtaccaaccaagctgacacattgtgtttctaaacaaaatgtaaacaggatactgatggtgttcaatatgaagtaaataaactagcattagtctctggctgaaaattatttttaaagaacaatttttaatacccttagactcaaaatcccacctgagaaactggtatttttttaaactcctaaatatgctgctgccaaaaaagaaaacatgaaagcaagtctgatgagaaatataaaatgcagtgattgtctcatttttgatagtctactgtctgacagtctaagaaatcctgttaagttcacaagaaagcaaaggcatgaagaagaatacctactcttcccctcacacaaaaccgtctggacctcgccctaggagaagccctcaggctgttactctagtccaaagcagtgagaaacaggaagaataaagaacaaaggaagtattttaagtgcattcagttgttaataaagatgaaccagaaagcaaaccaaacaaatagaacataccataaagcaaagcaaagaaaaagcagtttgaaaacactagcttgggcactttcatatatccctaaatacctgcttattaaaatcttaggcctccacccttttatttctaaataaaatcacaaagtctttcagagagttcatagtcctccatcactgttattttcttttccccactccccctccaaaacaacaggactctctattctaacttatccaccagttcactgaaattctcttcatatctaacctggaaagaatgagctcaaatgttaacatctcttcaggaaatatcagttctccatttgaatgatataccaacaggattattaagctagtctgaggatatactgaacaagaaattcagaaagtccaagggcctcagaaactgctgcaacattccttaccaggttagaaacccaaacctctcggacacaactgtcaacctgcccgacagctgactcctgcctccgcccgcgggccgttacctcgatcatcctgctgtccacgggcagagcggcgctgaccatgtgcacgttgggcgtggacgtcgacctctgcctctgagagagggagccttcagaggaggggctggaggtgctgaatgtgaaagcgtggggtgtggagtatctgtgctgggaactaggcaacaaggagaaacaaaagtccatggttgacactcaggcctctggaatggaaaaatctttcaactacttacttcattaacatactcggggcaaaccctacttacactatgaccttcgaaaaaagtattcctttcttttgtcaatctaaatatgcaccacttaaaatttttcttctgttgaggtgcctctgcatgcaaatttttaaaaaggaaataatatatgtgctcagaattcatgtaaaaagaaatgatgcttcaataaatcacgtctacagaatactgcaaaattttagaccatctcaacactatcctctacaattaagctagctgaactttcccaggttcatttcgagactaaatgagaaaacctgaaggaagatttctaaccatcttagacctgcccagtgtgcctgcacacaagtagcactttactcatgggcatcctctgccaataaacagctcacaaaatcaattacaatgactttgattttcagatctgcatacctctgacatttatcactggcttcttttacccaatgccactctcccaccagccaaactggaaacatgcattcagcgtaacactgtcatttgctcaaaagattactctgggttttgttcagacaaggttagcaccatgcatgaattcaagggatgaaagagtttttcaagagaaattattccatggccttgaaaaattgcctttccaggcaattcaacataaatggcctcagaggcctggctttttctatctaaatattcaaaagcaagtatagtttttcagtcagacatgcttttcaaattatcaagaaaaataaggtcatacactaatacagccaagtatcatttcaatacaaattccttattctaagatatgctgccttgaataatttctatgttagttttacaaaggcctttaaatattatatgactacatataaattaaagtcagatatttggggcaaagatgtagaattattttaggttccaaattcatgtgtagaactgagtgaggcatgtgaactcaacaaaactctgattttaaagttggaaaacagagtaaagacagattatgtgcaaacttacaggcacattaaaatggatttttttatattaaaaatctaattagactttttcaagatagcagtttattaaacatcatggttttagcaatgcaaggccgtaataagtatttcaaagtcgagggttttacttttattgaatcactgtatatcattttgggacccttcccctgaggctcactgcatactgacaaaggcaaatctcaaagtctttgaaatgtagttgatggatagagaagatgtggcacatatagacaagagaatgtcagtcagccataagagggaaaaacagggtcatctgtagagatgtggatggatcttgagtctgtcatacagagtaagtcagaaagagaaaaacaaatatcgaatattgatgcatatatgtgtaatctagaatcacagctccaaagaatctatttgcagggcagccctagagacacagacgtagagaaaagacttgtagacacagcgagggaaggggagggtgtgatgaactgggagattcggactgacacatatccactactgtgtgtaaaatagatcactagagggtcgctgctgtaccacgcagggagctcagctcaatgaaatgacagcctagagggctggggtggaagagggaggggacacctgtatacatacagctgatttacttcactgcagaggagaaagtaacacaacattgtaaagcaattacatttcaataaaaaatacaaaaacaaaacacacaaatgagatataacgaacatgccagaataccagaattaactgtattcactttccagaatttaactaaagaactacaaaaggaaagttctacattttgctttaacaccaacgctgagttccacagaagctgcacagtttacatggaaagagaagggaacccaagggaactcctgtcctctgtgttcacactttcaattccatctgccccagtacaacttcccataaaagcagtaggtgcaaagtacccaggaggtatccgggaaacagactctcgcatccgacgcatcgtcaaggaaggcagcgctgggaccccgccatcaccaacagtggaatttgggaacaatctaaatgaaatcagagaaaggctggtttacagacttgtggtagtgattttacagtcagcctgcttggccttccaaactcagcttctcctagtcactctttcctggaccattttaggctacccagagtaagttgctggccagctatttcttgttgctcacatccgctgggccacaggattccagaggggaagaggattcagacacagcagctcggcagcccctgatcaacaatgaggcctgagagttgaagccaggtaggagactcaggagcccctcagagcggtggtcactttctctctctgggtttcagtcttttcctttctactgtgggcagtttggaggggacatggatgggcatgtcggttatgatgagagccaatcacgttcataggaaaaggaaatggcaccccactccagtgctcttgcctggaaactcctgtggatggaggagcctcgtaggctgcagtccatggggtcgctaagggccggacacgactgagcgacttcactttcacttttcactttcatgcgttggagaaggaaatggcaacccactccagtgttcttgcctggagaatcccagggacgggggagcctggtgggctgctctctatgcggtggcacagagtcggacacgactgaagcgacttagcagcagcagcagcagagtaagttgtgtaagtagctcaagtcacgtccaactctttgtgacccagagactgtggcccgccaggctcctctgtccatggaattctccaggcgatactggagtgggtagccattcccttctccagggatcaaacccgggtctcctgcattgcagatggattctttaccactgagccacctggggagtccaccaatggactaccaacctaagtgactggcctaaatgactacagaacgtgaacaatcttgacctgccaatgaacacagagtctctagtgtgcaattctaggaaatactggcctaatgtccaactacatcaaaatatatgttttttttaatctatatatagtagggcactttgtaacctaaatcatacagcttttctggaaacattctgtctcagaaatgcacaaatggtaagactgaagtatgaaaggacagatcaccataagcaccaaaagtcatacatagaaaaaaatgatattcacatcaattgggcatcttccctccatgagataagcactcagtgactagaaagctcatgcgttatctctcataaggctcacaagaatgctgcagccaggggaatgcccccttttacagatgagtgagccaaagctcagaagtcataacagttagttaatgcaacagtgagattctgaccagtgtctgctggactccaaagtctgggctacttccaaagttctctgtgcaaaagctacatgtgactgccacgaaagcaaaacagatgcccccatggtggcttaatggtaacatgcccctcatttttctggtgccctcaaaaagtggtaaagtgcaactccgacgtttcctatccctgttcacaggttttaagagatgctctggaatactttaaaccttactaaaaaaaacagtttgtctatatggaatatatctgagtaaccggcttgtcgtcagagagatgtgtttaagggttactataaaatcatttgaagactaatgttttcccttgtttgaggtgaagaaaacagcaccaaccataccaactactccttctctgcagaagaggtcacttcagctttattcaatacaatacagaggagtgtctcctagcaacctagtaaccctgggggctgtccatgtcaccatgctctttgtcttacagaatcacagtatatcaatctctagttgacaatcctcccagctcattttagaaagttgtatacaagccaaactaaaacttaactaatttccgaactgtcagatttctaaagtagatcatttccagatcatgatacttcacttagaaagtctaaaacccagacctgtcagtcaaatacacagtatgcatcccccaagggggtttatacctccccatccccttatattctttgaaaaaagaacaatgccttacaagagctgtctgatattactccagtccacacacatcgtgggtactttggtgctacaatgctcgtgaaacttgtagccacaagtctgacatctaaatccatttagcaagaacttctgacagatgtcacagaaggcaagcttcaggaaggttttccgagcctggaacaagaacacagatgagtaaattatgctgaataaaagacaaaataatttcctccttggccccctcgaggttttattacaatggagaatcatacttccaacatttgtaataaaattcatacacagaaactgaagtacatctgtgatctagcgaaacctaaactgctttactgtaaacaataatagcatagctttaaacaatccaacaatatacacgcttattatctctgagaaattcctactgtgccagccaaagcacccaacataccacagagagaagagacctgcgacttacaaagttgtgtgttgtgaggggaacgtgatccaggaaatccacttgaagttcctctccgatcaacgaggcagcatcagtattccaatctaaccgtgcttttttactaaagaggatttttaaaaccataacacaaaagggaaatatttaaacaaggtaaaagagttgaatatcaataaataataaatatcatttagctcatactacataaacataaaacttaaagccccatacaacactaacatttaattcatacaacaaatccataaagcaggcattcttacctccatcttaaaaataagagaactggggctctaggaaggtgacttggctcaaggctacacagagtttaagggcctatttggaatctaagtcagtcagactccaaatgggtactcttacaataaagttttctttaaacaatgcaataaaacaatctcataataaagaaaatctgcaataaactggggacatctttaaacattagaatcctataaaaatcctgtaaaatgggttaaaaatatagtgagagtagcaaaatttaatcttcactagcctatttcactcttgaaaataaataagtagaaagcaatcacaaatgaaatgcactttttctattaataatgggctcaactctgtagaactgtttatagtctataaatacaaaactgaggaaagacattaagtgtcttaatatttactccgaaactattctttctgtgcctacacgagacataaaagcaggtacatgtaagtgaaaatgaatgcccaacccctttcctgcgtcctatgcagtccatcggcccatctccagaaggaagaagacccgggaaaggaagaggacactgcgtacacagcaccactcaaacttctccctttacccacaagaagccctcagagccatctctctgactatctaacaggaaacaatccactccttaatacggttccctgaacagggtacaggaaacccaacatgactccatttcgccctagtggccaaggtgagggtcgtgctgttttctgatcagccctcaggtgctctccacccaagagagaactgaggatggctccaaacaaacgcgcctggagacccagagggctcaagcaccatccagccaccatctcagcaccccagtctctaaggagctctatgcacgagcttggggaccaacccacaattgtaccagacagagctggcatctgcttcaaagatttgcacttcagcaaaaaacctccgaagctgaaaggagcatcatcaacagatgactttatgctcacccttctgagcagactcattccctaggctcctctctcaaactagggagtaccttgaaaaataaaacatgcaagcgaaaaaagaacggaaagttaaggtatcatcccagatttctggggggacgataacaggtaacgaatggtcacagacagctctgacgcttcagggtacttattattattactccttaactgtgaggtgatgtctctatctttccaccatcattagaaatagcatgttatatggacagtccttgaggcaaattctcctgcatcttttacctctgtgtctgtcaaactgctgggatttagtagaactgaataaaaatgagtgaattgtaaaagtttctctcttacagacaacattctttaactataaataaggcaaacactttcagagtacccattctgttaactgccttacagcaaacacaaaagccttgctctcaaaaaacataccatctgacattactgcttccttctgtggaaacggtatccaacacctaacatgtattttattttccaatgggatatttaagcaaaaatttcaagttcttggtatcttacttttctaagctgtctctttacaaacaagatattcaaatattcactattcaataggaagcaagtacttgttttttgtttaatggaaaagagttatgatctgaagctaggacatccttactagtgtgaaggaagacctggctgacttccaggctcttaccccttgtgttcgtggagaagtctgaacactgcacagcactctggttgcaggcccctcaccttgagagctttcataaggcagtcatgcaagctcattccattccgcacgttgacctacaaacgaaggaccaccattagaacaaacacaggctgtgcaagcatactcctcggaaagtaagcatagaataaaggcatcggtccgtaaaggtgtatggagaaaatgtaaaacagagttgctcggacagctgacccttgaacaacacggctctgaactgcatacgtccatttacacgtggcctttcttcagtaataaatactacagtactacatgagtcgtgatttttgatccaaaggctacggaacaggaaatacatagcaacatacccaggggctgactataaattgtatttgaatttgcaattgcatacagggagggcacccataaccctcaagttgttcaagagccaaatataacggcaaatacatacacaggggaaacaaccaggatgcccagcaacaggcgagagctggaataaagcactgaacattagcatgtgtcacgctgtgcagttactatactacttctaatgacctgtcagaagggggacaggtccccccatctaattgggggaaaatatttttcagaataacacaaagagtagtattagattcaaaagattagatctgacagagtgcctgaaaaactatggacagaagttcataacactgtacacgaggcagtgaccaaaaccatcccaaagaaaaagaaacacaagaaggctaagtggctgtccgaggaagcttcacaaatggctgagaaatgaagagatgtggaaaagaaagggaaagatatactcaactgcatgcagagtttcagagaacaaagagagataaaaaggccttatgtgaacaatgcgaagaaacagaggaaaccaagagactggaaaagattagaaatctcttcaagaaaactggagatatcaagggaacatttcacgaaaggactggcaggataaagggcagaacaggtaaggacctgacagaagcagatgagatcaggaagtgacaagaatacacagaactattttaaaaaaaggtcttaatgacccagataatcctgatggtctggtcactcgcctaaagccagatatcctggaatgtaaagtgaagtgagccttggaaagcatgactacaaacaaggctagtggacgtgatggagttccagctgagctatttaaaatcctaaaaggaggacttctctggtggtccagtggttaggactctccacctcggaactctccacttccaccataagggccataggttggatccctgatcagggaactaagaaataaacacatttttaaaataaatacataaaatccaaaacatgatgctgttaaagtgctgcactcaatatgccagcaaatttggaaaactcagcagtggctacaggactggaaaaggtcagtcttcatctagaaaaggtcagttttcattccaataccaaagaagggcaatgttcaagaatgttcaaactaccataaaactgcactcatttcacatgctagcaaagttatgctcaaaattcttcaagttaggcttcagcaatacgtgaaccaagaaactttcagatgtacaagctgagttcagtaaaggcagaggaaccagagatcaaactgacaacattcgatggattacagagaaagcacaagaatcccagaaaaacagctacttctgcttcactgagtgaagttactcagtcgtgtccgactctttgcgaccccattaaccgtagcctaccaggctcctccatccatgggattttccaggcaagagtactggagtgggttgccatttccttctccagaggatcttcccaacccaaatctcccgcattgtaggcagacactttactgtctgagccaccaggcaagtccaattaactgtatgcttcactagctatgtgaaagcctttgggtggatcacaatgaactatggaaaattcttaaagagatgggaataccagaccactttacctgtttcctgtgaaaactacatgcaggtcaagaagcaacagttagaaccggacatggaatgatagactggttccaaattgggaaaggagtacatcaagcctctatattgtcaccctgcttatttaacttacatgcagagtacatcatgtgaaatactgggctgaatgaatcacaagctggaatcaagagtgccgggagaaatatcaataaccttagatatgcagatgatagcacactaatggcagaaaagtgaagaggaactagagtctcttgatgaggatgaaagaggagagtgaaaaaggtggtttgaaactcaacattcaaaaaacaaagatcatggcatctggtctcatcacttcattgctaatacaaggggaaaaggtggaaacagtggtagattttattttcttgggctccaaaatcactgcagacagtgactgcagccatgacattaaaagatgcttgctccttggagggaaagctatgacaaatctagacagcacattaaaaagctgagacatcactttgccaataaaggtctgaatagtcaaagctatgtttttccagtagtaatgcaggtatgagagctagaccataaagaaggctgagcgccgaagaactgacacttttgaattgtggtgctggagaagactcttgaaggtcccttggctgcaaggagatcgaaccaatcaattctaaaggaaatccactcccagtactcagtggaaagactgacgccccagtactttggccatctgatgcatagagccaactcactggaaaagaccctgatgctaggaaagactgaaggcaaaagaagaagggggtgacagaggatgaaatgtttagacaacatctccaactcaatggacataagactgagcaagctccgggatataatgaagcacaggggagcctggcgtaccgcagtccatggagttgcaaagagtcacacatgacttagcaactgaagaatgccaagaagattatttaaagggtggggaacctatatatgtttatatatgtcatacgcatgtgaaaaaatagctcttacccctaagagaagtggtttcttgttgtttagtcgctaagatgtgtctgactctttttgactctatggaccgtagcccaccaggctacatgggatttccaaggcaagaatactggagtgggtagccatttccttctccagaggatcttcccatcccagaaaaaaaacccacgtctcctgcattggcaagcagattctttaacactgaaccaccagggaagccccaagagacagtagttgggagagggaaaatgatcaactttccctttctacctgtatgcagctcaggaagcaacagttagaaccggacatggaacaacagactggatccaagtaggaaaaggggtacgtcaaggctgtatattgtcaccctgcttatttaacttatatgcagagtacatcatgagaaatgctaggctggaggaagcacaagctggaatcaagattgctgggaggaacatcaataacctcagatatgcagatgacaccacccttatcgcaggaagtaaagaagaactaaagagcctcttgatgaaagtgaaaagaggagagtgaaaaagttggcttaaagctcaacattcagaaaactaagatcatggcatccggtcccttcacttcaaggcaaatagatggggatacagtggaaacagtggctgactttattttcagttcagttcagttcagtcactcagtcgtgtccgactctttgcaaccccatgaactgcagcacgccaggcctccctgtccatcaccaactcctggagttcactcagactcacgtccatcgagtcagtgatgccatccagccatctcatcctctgtcgtccccttctcctcctgcccccaatccctcccagcatcagagtcttttccaatgagtcaagtcttcgaatgaggtggccaaagtactggagtttcagcttcagcatcattccctccaaagaaatcccagggccgatctccttcagaatggactggttggatctccttgcagtccaagggactctcaagagtcttctccaacaccacatttcaaaagcatcaattcttcggcactcagctttcttcacagtccaactctcacatccgtacatgaccactggaaaaaccatagggctccaaaatcactgcagatggtgactgcagccatgaaattaaaagatgcttactccttggaaggaaagttatgaccaacctagacagcatattaaaaagcagagacattactttgtcaacaaagatctgtctagtcaaggctatggtttttccaacggtcatgtatggatgtgagagttggactataaagaaagcttagcacaggagaattgatgcttttgaactgtggtgttggagaagactcttttagagtcccttggattgcaaggagatccaactagtccatcctaaaggagatcagtcctgggtgttcactggaaggactgatgttgaagctgaaactctaatactttggccacctgatgcaaagagctgacccatctgaaaagaccatgatgctgggagggattgggggcaggaggaaaaggggacgacagaggatgagatggttggatggcattaccaacttaatggacatgagtttgggtaaactccaggagctggtgatggacagggaggcctggcacgctgcggttcatggggtcacagagtcggacaccactgagcgactgaactgaattgactgaagttgtttgagtcaatgaaatattcatgcaaacataaatatccaccagaaacaaaaattaaccaatccaatctatgacatgagttctttgtattaaaaatttgtatttcaacttattttcaacaaaatggttcatcttcctaaccaaaaagccatctcacgtacactgcacagtagaggcgggcaagcaggaagtagaggaaataaagtctctgccgcgctgtcagggcaaacagcactgctggtttaaacacgtgtgcacacccatccagtagtctcagcagtatagaccccttcatactcccatgtacccagtcctcaggagctcagtaggcacttcagagcctaacagaaagtgtgagcacccagcaagctaatatcagcagctagataaacatttcaaccaagattttaagcatttcagtaagagccctatacagtgttttaaaagccaatgaacgtaatcaaaagtaaggcaactagactcaggatgggcagcagggtgaccagaatgagatttgcggtgcttgcaaactgcacacagtggagtccttctgctgaaaatgagacagctgacagtggccaatccagcccctttccagacagaggtaagtgattttttattttaaaggtttagaatattttcaactgtccatcttcaatgtttcacaacaagtttatttttaaggtttcttgaagcagtgatacccttagaaatatcccaccaacttccagcttttcagaaacaaaacaactcagtaaagggggagagactgatctgaactgtgaaggcaccaaggatgaagacaatgaaaagtaacaaacactcagcagtaagagccaggacctgtgtcacacactgtgcagcagtacattgaaaactgaaaagtgatctcagtgatatttaatcttcattagaagccagaactccaagaacgagacagttctttaaatatcctctaatccagcggggttcccaaacgtggctggtattacagtcatccgaggagcctgggaaaatgtattttcccagcctgccccctctaacacactcatctgattcagttcatcctgaatgaagctcaggaatctgtagcttaagctgcttctgacatgattccaatggtaattaaagagcctgagctctgatccaatcactcatctaataaaaagcagcatcagtaagtcaaagacacatgtttacaaaacaaatgacaagaaaaactcaaaaaccaagcaactactaaaaattccttatcagacatacacgctctctgtcactcttctctctggactccccatgggtacatgctgtgatcagttacggtctgactcatctctggagcccccaaagtgattatgacagtcattctgggctccggcggtgaagcaacctggggaggactacaaacagctgactggccaagccagccagcacatgacgccttcctccttcaaggtacccctggagctgggtactcataccagccacgtttgggaaccccgctggattagaggatatttaaagaaccgtctcgctcttggagctctggcttctaatgaagattaagtatcaccgagatcactttcagttttcagagtactgctgcacagtgtgtgacacaggtcctggctctctcagcgtgtgagtgtttgtatcagaagcacacagtccgcctctggacaaagaaacgagagaaactagctttctctgatagaaccttctcaaaagctgctgtaggtgtcatgcgtttcaaatcggtggtcccagcccccaactacgctcagctgaaggctaccgaggacacactgatgtaggaaactctcagaaaccatcctgctgctgctgagttgctgcagtcgtgtccgactctgtgcaaccccacagacagcagcccaccaggctcctctgtccctgggattctccaggcaagaacactggagtgggttgccatttcctcctccagaaactatcataactaccattttacttgtgaaactagtcactgtagctagcatcagcctcatttcatgaaggtcaggaagagaggctcaaaatattatgtaacttgtcacgatacagcttataagaagcaatacagggatttaaatttgggcctcattgtcttaaaggccttaacatttaaattgttgcgcaaaactaaggttcccagtctgcaggcaaacgggtagatggggtggagaagacagggcggcaacacccagaagcagcgccagagggtctcagctcccgggcacactcacacttcccactttctcaaggtcagcaaattaatgagaaaactcactttgcaaacaaaagattactgctgaaataaggagattattattatttattttgccagtcttattaaagtttcatttccaggaaagagaacaaaaataaatttactcaaactttaaatgcctttgagttttgccttcagtttaaaaatgtaccttaatgtataacactgtaactgggaggctctctaggtttcacaaaagtaaaaggaaattttagtgaagaggagagagtggaactgttagaaagaaaactctggactgcacttcccaactttggaacctagaataaacacaaggccccaatttcacacaaagaacagagggtgggaaaggacggtgcctggatgttctgaacaaaggttttctcgcaccgtatcggtgtttgaaagccacacaccaagcacaattagcacagcttcactttttggtttcaaccaggtggcgttccctctgcctcccccagaaaaggaagaagcttttgagcagtaatttcttagaaaagttgagattttgtgtcagaagctacacaggaataactagctagtccagggccttggaaaaaaagcttggtttccaggctacctccagctttgccccagaacctaggaaatgtactaaaataattttttccaggtaattttattttcttctatatacttgactgtaatatcaaaaaaatttaaatgaacagtttgctttaatacactgaacaaagtttgtaattagcccgaaatgtctgaggggatttcttagagaaccctttgaaatacgtccccattaagaatgtactacattcacctgacaccagtcagaatggccattatcaaaaaaatctaatacaaataataaacgccgcagagggcgtggggaaaagggggcctcctgcactgctgggggacagaaactgatacagccaccgaggagaagagaatggaagctccttaaaaagctaaacacagaactaccattatgatccagcaatcccactcctggacacatctagagaaaattacgattctaaagatacagacaccccaatatccactgcagcactactaacagtaaccagggtgtggaaggaacctaaatgtccaccaacagaggaatggatacagaggtggtacatatacatacaacggaatattactcagccatacagaagaacgaaaccctgccatctgtagcaacatggatggacccagagattgtcagactgagtgaagacagagaaagacaaacacaaacatcatgatatcactttcacgtggaatctaaaaacagggtaccatgagcttatccacaaaacagaaagttacctataaaaaccaaatctatgcttaccagagggtagggaggaggaggaataaactggagatcgggactgacctatatacactaccccagacagactgataactagtaaggacctaccgctagcacagggaactctactcaatacgcgacaacgacctatgggaaagagtattaaaaaactggatctatgtgtatgtataaatgattcactgttatatacctgaaacacaatattgtaaatcaactatatttcagtaaatattttctttaaaatgtactatatgttcaggtgaattgtcagaaaagacccttctaagcaaggctaagtcgaaggaaagccaagagctaagaaaggaaaaagcaagggggtgtgaagagaatataaagcaataaaatctacaactagaaagtcaattaacaaagactctaagtagaaccctcttacactgttggtgggaatgaacatttgtacacacccgatgaaaaacagtatagacgttccttacaaaacaaaaaccagttactatacgatccagcaaccccactcttgggcatatatccaaaaaagacaaaaactctaactcaaacccatacatgcaccccagtgttcacagcactgtttacaatatccaagacatggaaacgaccccagtgcccaccaatgtattactcagccataaagaatgaactactgccatactaagtgaagtcagtccgaaagagaaaacagatattatgtaattatcatttaaatgtgtaatctaaaaacagatgaatctacatacaaaatcaaaacagaccacagatatagaaaccaagcttattaccaaaggagaggggaaagaaaggtgggataagtcaggagtgtggaattaacagaaacaaactacgatacattaaatagattagaaacaaggatcttctgtataacatgcagaactattcaatatcgtgtaatgacccctggcggaaagttatctgaagcacacgtacatgctggagtcactgtgccgcgtgcctgaaactaacacaacagtgtaaatcaacaacatctcaattaaaaaaaaggtgcaactacaaaacactaaaataaaatttaaaaagaaagactctaagtgacagtgaagatttttgctatctataagatgggcaacatgacctgtaacgtttttataggtgatggacagctgcattttcggagaggaatgttcacgtaccactgttctttgcttgtttggcaaaaacacacggatagtgttgcttgtcttagaagggtccgtaagcttgccatcatctgacgcccgacgctgatagccaaactgctgaactattgtaggggagatgcagctggcgccgtcaaacaccgtgtctttgaatccgaaaccgttgctgatcgtcttccaggcgccctgtatgtgctccattgatgcagcttacgcagcacttcaacctagcaaaaaaaaaataataataataattcttgagtaaaattagctcaacaatacaatatacagagtaactgtgaaaacagtactattgggtttttttgtaggtaacatattctgcttaaatacattattcaaaaaacttctattatagtacatttccatagaatatttcacagacaactcaaaaatgaacaagacagggactagagatcaaaagactcatcaagggttatacaactaggtaaaagtcaacgcagaacatagctaggtttagtctaatgctttttcaattccactttttcttttgttattgtatattaagcacaaacagctgcctttgaatattagtaacacattagtactatgagaaatacaaaaaaaaaagtgtaagccatcattttctgcctttgaagaaaaagaaattagtttttgtaagatgtgtgttagacactttatatgtaaattatctcatt

SEQ ID NO: 194 - DNA, 58889 bp, Hippotragus leucophaeus
  source 1..58889: mol_type = genomic DNA
tctgcttaaaaaagttgtaaaaatgaacttctaaaactcccaccagtttttaacagtatagtgttaaatatactgtgatttttgttaatctcaagtttgggtttttaagacagcaagtctggtcattcagtttaaatgaatggttatactatttttaatgaagtaagccattttcttgttattttcagttctgcatagtgggatttgtttgttaaaagtgtccccagctgttatcagcttactgtaaggtaaagcaaggatggttttttccaaaacttctgtttaatatatgtaattgtccttgaaaagaaagggctcagacaaattaggaaatgattttgattggctttaaattacttttgttggtgataaaaaattactgtaagtaagttttaaattctgaagttcagaatattttttatttgagttaaatgaagaaatggagtttttcttctctgcccttccccatcattcacactttccacataacactgttaacattaatcaccacagccccttattttgttgtttccaataattccaagttcatatagaactgataatgttgtaagccccaagtacagtaacagacagactgctcccaactttctgtctagtttccagccattgaggtgaactgctaagaaaaggaaaacaattgaaatgttgagaaagatggttatgtaagttagtcctctactgttcacttctacaggagcagatgtatttataaatgcagttttaataaaccatggaacacctaggcatagcatatcaaagacattggatcccacgatgttagacatagccatatctcctttgcctgcaaaaaaaaagcatgttgttaaatgtgcataccaatactgtattttattaataagcttcataagaaacactggatacattttctgtttgttttggaaaattgttgtattggagcaaaagtcttactgaatttgtatttttaaattttagggggttagtatttaaagtcttaacatttatttatctaataataattatttattaaaccatttttcagtaaggtatgtagattacttgttgcttttcattctaacatggttaattacgatttaattcacatttcaggtgaatattatttaggggattagatttagttgaaattaatctattaaatagtaaatgcttcctcttgagttcttttttcttcaaagtatgttactgaggaaatattttaaaggtatccttgctcagtgtgtttcagtcaggcttttaagaatgggcattgcagcttgagggacccagttcttaccttttcttgcaaccaacacacttgtgatcgtgtctggtatgcttgttcctgctgctaataaagtgaggcccattactgtatctggaatttctaatgtttcccctgtaacaaatataaatattatatattacaaatcttatagattcagtaactgttctctgcagatatttctttcctgaaaaagaaaatagacatatttagatttcagaaccaatatgtacttagatttcagaaccagtatgtacttagattttaggtagcaaaatatttgaataatattggtgaattggtaaccaaggtagcacagatttttcatgacagatggtgatatttaatacacaaaattctaccaagggataatttccctatctggtatgcttatagaagttttggatgtccactggtatcaaggctgttgcttaaaatatgccaataagattggtcattttctcttttcctttttaaaaacatttcctaaagaggtcagatttaagcaaattatttatagctgtttttaggctgtaaatgtgttaacatggtatgcatttttaaagttctactttagtgatataccttagtttaggtgtttcctttgggaaatcataaatctggggaaaacagaataggcttctacttgagtctttctaactttgtggtcctggtttaatacttctgttaaatctgatggcagttcatcatttttcataaatgtatccattttgggaaacagaactagaatgtaactgctcttaatattgtaattgaaaacttgctttacaattcctttttttttcttaaaatgttaattaaaaaaaagcttcaagtagcatatttattgcatgcttatatatattgctgttggaactgtaattggttgttaatttgttaactggtttgccagagttcatatgtacataaataacactaacatttatcgtcttggggactgttctgtgatctagtacttgattttgttcttttcttgatttcctaatgtcaaatgtgatctggctgagaacatttatggagagctttaataggcaggctattggatttttctatattactcataaaaaaaagaaatgttcttagaatagcatactattctgagtcatatattaatttgacaaaagtcagaggtcaggaaacctttttttgaaagggtgagatagtaatttttttaggttttgtaggctatacaatctctgttgcagttattcagctttgccagtgtaatgtgaaagcattcatggataatacataaatggatgggcttgactgttcagtaaaacttaactcgcaaaaacaggagactcagtgtttgggtacacaggtggtggtttgctcacctctgattaacctttttgggagaaattcctgatttttttttttttgtacattgcttattcagtttttccttctgaactaggagttctttgggactagagttgattatggccaggcagtaatagttaaatcttaatcataaaagtagtagaaactaaaatgagactttattttatacccttttaattcattttgtagtacgtttatattgccatattaaaaaacaaaatgtaatccagttaaacagtgaatacccattgttttctcaaaacactggcaccttgctatatgctaaattatggaatggcattcagtataaagactatcttgtggacccatgcaatgtgatttaattattagcaacatagaaattctgtgaatttgatatcgtttataacatgttcctttgactcatactcctgggctgtgtaatagtgaccatatagctgacatgtggtatacacctcacaaaacctgagtgagcttgttggtatattaatatttaatctttttgtaaatagcactaatctttatttttagtctttgctgaaaaacaaattttctctttaactagactatcttagtgaatatatgctgttcttatatacaactgattatttttaaattgtgctcttaagatattatacataccagttattgtgaccatccaaaccaggatatatgtaaatgcagatatccacagtgctgacataaaaaatgttatcacaaaatattttctccaaaactttcttctacaatctggtgtggttagaaaaagtagtataattatgggaagggatagtacccaaaaaattctttttaagtctgcttcaggcatgttgaaaacacttggcggatctgttaaggaaaaattaaacgattttgagttttctcaaatggccaattaagttagaatgtccatttaagaagctatattgaaataaattagctgtatcagtttttaagaggctatttaatacatttgactatctcattactgatattgctggcaaaaagaagctaattgagacttcagggctgactataaaatgtgatactcagcatttcttgatttggggtcttaaatccatcaaagtgtttagggtcattcactgtgttagaaacataatgtttctgaagtatcagttcagcatctcttgattttctacaatgtggatggtttttagtaactttgcttatgggattaacctggtgtcttcccttagcaaccccagttgtctccacttcccagtattgatgatacctctagcctgccctgtgtatcacagaatgtatacttagggagtaaaagatagctgtagcataatctttttattaagttgaatatttctgattctcaggtgattttacggggcttatttcaccattttgtttcattaatttactaaacaaaattcaccacaattcttagaactttaagaaaattggaagtagtattgaatctacagtgtaacttataaaacttgagtttgttttttaaattcaatttgttctattaacttggtggaagaagtcaataataatatattagataaaaaggagacttcactttagattgtttaaaatttatatggcacttataaaatattgggttggccaacaagtttggttggttttttccataccatcttatggaaaaaactgaacaaacttgttggccagtccagtgttttgcccatatattaggtcacattacaactaatactagtaaaataactcataattttttctttttgccacattgcatcaaatgggccagaaagtaacagatataattttattgtaataaaaaatgtttggactgttttttcttagtttcttattataaaatttaacttagaaatgtgtacttcttatacctgaaagactagaaactataatctttgtaagaaggtgaaaattcatgttttaattttttcagataataaattactaagttccctgtctaatgtactaaataaaatgcagaatctgtttcttaaaaccactttattaaaaaaaaatccctaaatttgtatttctggctgtagctgaatttgacttcctatatactaaacatgttaattgctcagtcgtgtctgactctttgcgatctcatggactgtagccctgacaggctcctctgtccacgggattctccaggcaagaatactgcagtgtgtaggtcatttttttccccaggcgatcttggaggaagagggcatgaaaacccactgcagtatttttgcctggagaatcccatgggcagaggagtctggtgggctacagtccatcaggtctcaaagagtcagacatgactgacgtgacttagcacacatgctataaacatttatttacatgttttgctactgcttcacatgtttaaaattcagctgtctccttcctactttttcttcacaccagctcttcttcctaaattcctggtttttgtaagtggtattctcatgttcttactttgtcatgatcaaaagcctcagaattatctctcctcccatgtagcccttcagttgcctggtcttggtgacgcttcctctgcattgtctcacacctgttttcttgtattcccactgccttcaccttgtctgctgttactgcgtctaagtcacttcagttgtgtctgactctgtgtgaccccagagatggcagcccaccaggcttccccgtccctgggattctccaggcaagaacactggagtgggttgccatttccttctccaatgcatgaaagtgaaaagtgaaagtgaagtcgctcagttgtgtccgactcttcgagaccccatggactgcagcctaccaggctcctctgtccatgggatttttcaggcaagagtactggagtggggtgccatcgccttctccgtcaccttgtctaagcatctgttaaacacatcagttggtttagtagcatgtcttttatctcatatttcagttctgataatttctctgcaaacctgcaaatgctattaatctagcatttaagattctgtcatattccttcctatccacctttcttctgcttccattctgcacattcagtcctccagttatgttagtacttgacaagcctttttcccatgttatttctttatcagtccatggaatgctttttactcttagctctgcatcatttacttatgacatatgaagtctgataaaacttcagtagccattaccataaatcaagttgttaaaatcttactagaatattctacaaggcttagtttgtctctgtgataatctttcctatctgaccatcctcatcaaattttttttaccatctgtcccatttaggaactatgtttatgctttatttctttctctttacattatttaaatgttcatattttagctattttgggttttttctgaaatattggaagcttctttgataggtctgcctcttgatcatctctaaattcccatagtatttttaaaatagtaagtatatagtatttgctgaattgaaatgaaattaagttttgctagtaatagacttaataatggtcatgatgtggttattaccttcacaaacctgactaagaccatgtaaacttaaagaaagctgggagtagccagaatcttcatgaaatattccactgtcagttcttgattgcctacggatgaatggttgatcctcatcttcccatcccatcagtggctgttgttcacttctctcttctattgctttggcaagacaggtacagcaaggactgcatttctttataatatattggttaattttaatgtcaaaacacagcaccacaacatataatccgtatatcaaaagcagtaaagttccttcatacctataaattagagaaattagtgtggttttcaatttaaagtgaaagttattttagagttagtagttttggggcagtatctgcttaattttctaatgaaacaatagaacagaaatattctagatacattttgattttgtagatgtgtccagatttggttacaacattataaaagacttaactgatgaaggttcgacactgtcctttttgtattttaaaaacaaggattgtaaactcattcttaatttgtagaatccttccaaatagcaggcatagaaagttctttgaaaatgtgtgttagtcacttagtcgtgtccgaatctttgcgacccaatggagtatagcctgccaggctcctctgaccatggaattctccaggcaagaatactggagttgggttaccgttcccttttccaggggatcttcccaacccagggatcaaacctgagtctcctgcactacaggcagattctttaccctctgagccacctgggaagtactatttgaaaataacagtaattataaattttcaaagtgaaagtgaaactaatgaatagtgatggggcttctccacctcagttcattgaaagaagataataattataagaatatagtataccttcatttcagttgttctggtataggaattctgtgctaaatcagaatatgttagactttggctgaagcttttcaatttgctatactgagattttttgatgattttaatgtaaattggcttgcactgttttcctatactctggtttgctatttagagaagtttgattatctgatgctatcacatttgaaccttgcatttaccaattattttatagctagtgaatcacttctatagcttgaaagcacagagttcttgatttccctaatgaaaggagcattaccttggatactcccacagtcattgtcccctggcagacgactgccaagtcccagaagcacttctgttgtaaccaacagtctttccttgggagacagactagatttcaggaagattcactttgaaaatttactccctgctaggtctgaagtttcctgatagcaggtattagagcagcactgccaaactagtattccagaggggtgccattgacctccaccatcaggcaatgtacagtctgtgtgtctgtgttttacatttattcatctgttaagactcatatcatagtgatcagtacctaacaaatacctggtatgtgttagctggaaaagtgactgtttccattttcttagaatgacaaggcatggggagattataaataaaacaaatagcttttagttttgaaacctaaaacatttttaatttttagaggaagaggcctatagttctcttactaaatgaacatcagggaaaaagttggaggaatttaaagggactttgtttatttctttgttatctctctaattgtgtgatcatggccacttctaactgaggaaaggtaaacaacccaacagatgaaaaagccacctgttggggctttaacaaacatcaaaagttcggaaactttctggaaggtagtcagtagggaaaaagaaggatggtaacatccactggttagacaaaaaggaagactgatttgactgaaaaattgcaaagggagagcaacccagccagcaattgtgatgaggttagctcagagatttacaggaaaaatgtatggaagtggtagataattaagaagtgaaagaagtaacatttctgaaaaaaaagttactaaactaggattttataaaagtactctctgtaattgttttacataagagtactgattgtttcaagcttaccagtaaacttggttgtcaaatattatggcaagaagtgctgctacactgatagcatatgctgcacagtctctgaataggggccaacatgatagtgttgaaacctgtaaaaataatgtttccattacactgttacttcttcaagtacttgcttagtgtaatactaaaattatttgtatatttgtagttaaacattgttatcttttacatattgcttttagagaaaggaattttaagaaaaattgtgtttctaagcctagtctgattttcataaatttgaccaagaggtatttgtgggttaacttaaaattgaatacatattgtttttctactgattaataaacttaattgaacacattcctagtgccttgtttgttccagactataaacagttcttttttttctttgtctttttttataaatttatttattttttaattgaaggataattgctttaagaattttgttcttttctgtcaaactctgtcaaattctgttgttttctgttatttctgtggatgaagctagagcctattatacagagtgaagccagaaagagagaaatattgtatactaacgcatatatacagaatctagaaaaatggtactgaagatttatttgcagggcagcaatggagaaacagacatggaaaatagacttatggacatggggagagggttggagagggtgagatgtatagagaaagtaacatggaaacatattaccgtatataaaatagatagccaacgggaatttgctgtatgtctcaaacagaaactcaaacgggctctgtatcaacctagagaggtgggatggggagggagatgggagggaggttcaaaagggaggggatatatgtatacctatggctgactaatgttgtggtttgacagtaagcagttcttataatttgtcaagacaatatattttgttgaataaagttttcttacgtaccacattagatagtaagccacaggctgcacagataccaaggaggttatagattgcagatccaagaatggtgctaatgccaatatcgccctttgtgataaatacacctatgagccagatagtagctaagttagtgttgacttggagaagatcaaataacaccaattaagcaaaaaaaaaaataaggagtggtatttacctaggaaagcagtaactaattcaggagctgaactaccggctgccataaaagttgcacctgcaacatcctgggacagtccaaaggctgaagacaaatgaaattatattatgcctggtaaagtgacaaatgggagagcatgttctcgtaactaaatatatatcaaagcaacattttcatagaaagccgttgttactaacttcaactggaaaacagccaatagaggaagccttctaggcattatttaccctatatcagaaagttaaaattagaatgaaaattcaggtttccaagccactgatagcaatcctttgtccatgtttattgttttgtatattattgatttttgagtcttcccagacgctcaaactctggtgtgcttggttgagtccctgtcacctgtagtcagtatttcctaattcttacctgtgggaccattacctgttgctcattctcctgtccacctcaacttctacttctctactgagatatctgcctttgacattactgatttctttttttgttggtggcgtagcaggttgaattttataaagatagctacaatatttctgcccacatggtttttgagaacctgtccattccctgtcaaacaaactaaaacaaaaaacaggatggagtttttatgtattttgagcctagatgagcctttgtgactgctgaaagtatggcagaaccatatgcctcaagctaggacataaaaggtgatttttcacctttctgattgttctctctagggacatttgcttcagagccctaagctaccacataaaaaccctggctgccatataggaaaggccttgtgaagagcccacatagagatgcctgaggaacccctgctgtttcggcccctcagttttgaatcctcccgtcccagcaccagacatgcgaaggagggagctttcaggtaattctagtcctttttctgactatcactgcatgaaagccctcaagcaagaaccatccagctgaggccagtaaacccttaaaactatgagaagtctgaaatgattgttcttttaagcctctagttttggggtgatttcataagaagccgttgataactggaacacctatttatctattttttgtatttattgaccacctaatgtaccagatgctttttttatgtgataggaatgtggcagtcacaaaacagacaaacatttctcttctggaatttaattccagtgagcgcaaacagacaagaaaatatatatattgtgttagaaggagcaaaagtcaggtttgaagttgctcagtaatgtccaactcttttttttttttctgtccgactctttgtgaccccatggactatagccttaccaggtccctccatccatgggattttccaggcaagaatactggagtgggttgccatttccttttcccgacccagggattgaacccaggtctcccacattgtaggcagatgctttactgtctgagccaccagggaagctagaaagtcaggagggggcatataaaatgtcatggaggaaagattgtaattttagattgggtaaccggaaaggacttcccgagatgctaacaaagtgagggagtagccacacatagacctgggagtaatataggcagatggagtgcgtgcaaaggttttgaggtagatgctagcctatatgttcaagaaacagagaaaggccaaagtgtctgcaataaagtgtgtgaaggagagctgtagatgatggagtcaaaggtgatagatggccagatcatataaagccttgtggatcctagtaagcacttgggcttttattgtgaaaaatatgggaagtgcttggaaagatgggcttccctggtcgctcagctggtaaagaatccgcctgcgaggcaggaaaccctggttccattcctgggtcaggaagatctgctggagaagggataggctacccactccagtattcttgggcttccttggtggctcagctgttaaaaaatctgcctgcagtgcaggagacctggtttgggaagatctgagtttgatccctggtttggataacttgtcccctggagaagggaatggctacccactcgagtattttggcctggagaattcatagagtcggacacgactgagtgactttcactttcacttttggaaagacatctacaatgttgctggtgatactagccacagtcatctttttttatccccatgaggctatctggtctcagtggtcaaaccagctccagtcagaactgttttgctacctgttatgcctccattgggaaaaatcctctcaggatagttggagttaccaaatccaggttctctatcctatttgcctttggtcatgttgcttgatgaacactacttgtggtgactaatgaagggacagaagtaataatttatgtaagttacatttcatagcatttctttaactgggagtggttttgcatgtatatgtagtatttatacttttactacaactctgatacatagaaggtccagttggtcataaaacttagaaaagatgaagcatattgttctattaacttcttaaaatttttatctatgaattaaataatatcttatattcatggcatacaatcactttcatatacataatttaatcatcttagctattccttgaaatgagcgttagttgctcagttgtgtcctactctttgtggtcccatgaactgtagcctgtcaggcttctctgtccatgaaattctccaggcaagaatgctggagtgggcagccattcccttctccaggggatcttctcgactcagctcaaacccaggtctcctgcattgcaggcagattccttaccatctgagccaccagggaagttcttagatatgagttgcggtgtttccatttcacatataaaaaacagataatcagaaggttaagttaacttaaagtgacatggaaagtaagggtcttaaatgtgaggggtttgggcgtaaaccccaagtctgttgattctaaacatgaaacatgaaagtgaaagtcactcagttgtgtcccactttttgtgacccatggactatacagtccatggaattctccaggccaggatactggagtgggtagcctttccctttgccaggggatcttcccaacccagggatggaacccaggtcccccgcattgcaggcagattctttaccagctgagctatacctaagtctagtgctatttctttttcaccacagaaactcaatatcagaaaggcaccgaggcaatttaagatgggaggtggttgagtcattttcttcccttccttgtggcactggtacataacttcccccattgtattcttttctagggggaaaaatagctagtgagagtaataatttagaagttttctactgtatttcagagaatgtataaatttagtgatattaccatgaattcttgaatgaaatcagggttaactaatacatggaggaaattgaaaaaagaacaaaatattttaaactgtctaaacttggggcagctgaagagtgattggctgatctttgtctagtgctggctgaagaatgcttcattggaagaattcaatctggagagagaaaaagtgatccatctggctgttgcgaggtaagaaaataagtgacccttctgaacactttctttctcaaaaggcattaacaataaagcttgttgctattcactgggctctattccagttatgaaaagaagagctctctacagatgaattataaaacttcaaagatattttaacaagttatatcttaaggttttaagcatattttgtagaatggtttatacctttgaactttagaatcgactggctttgtcttcactgacctttgggtagcatttctctatgttatagtttattattaaagataaattgttctgtccccgcccccagagctattactttttttcccctctctatgactctaaaggactaatcatatttccttgaggatgtagtagaaatgttcaaggtgagtattctttataggtttagatattacattggttatataaagtgcaactttatgataatgaactgattactaaaactcaacagactttcttaagcgtgttctcttctctgataccatgctgcaaagtttataaccatctttgtaaatctttttctggaaatgtagaaaaagagttttaaactaaaatggaaacctggcttctggccctgccagtaccttaatgtgagaatttagataagtcattcagacaaggcttgtattttgccatctgtaagagggttggaatatacaaatctttaaggtatcttctaatttttatcaaatttaaaaattataaaatatgaattctatgccttacacctctggaccacctcttattgttagataaattccttttataattaaaaacccctatgttaactgaaaatttagaagatagaggagaaaacagatgggagggagcatcatttatacttttaccattgtattttaaccactgctacctttttaaaaatgtattttcaattcttttcacatgtacatttaacagagttacaagactaggctataagcaatttggtgtcttctggcacaattttataaattcctcagtgatagcaaaatttttatgctttgtgaatggatttgagttttggaagcaattaaaagtcattcagacccaattctagtgactatggtgggtagtcatgctgagtaactctacttaggatgcaaaatgaagtgtgacagcaaaccagtgttttttatgatttgcaaaattggttctgacattaatttcagatatatttctagaaatattttgagtaaattcagcatcactggaataaatgcctagcctctccatgcacagttgcatgtatatgctctgtgatgcttctaatagtaaataaaaacattttgagcactttatagttatcatctcatatcttgtctgagccataacggaataaattctgaagctctctataatgctttgaaaagcccgattccactgaaaaaggacacccccatgccctaatctaacagctattagtttccacttgctgtaagtcaatcatataaagccacatgcaagactttttgtgtccaaacctcacaattatctgagttttgtctccatcacttgctcaaggtcacataggtagtagttgcagagatgggatgggcacttagatcttcctgagttgaaagagctgctctttctgttatccatgtaggtaactgaagagatttaatacagagccttattattattattattattgcctgtctctccaatagcattttggtaatatccagaccacttgacatttatttatctctgtatacctaaggtagatttagatgcaatccagggtaaccacaatgtatttatttatattttaaattcagattagtttagatcagaggaaaaagaaaagcaaagaggatgaaaatgctcttaagaggaggatgggtgcctgtgtggctgggaggaagcactcttcttagattctttgttcttaaagaaggctttgcctctgtaaatttcataaggattaagaatcaaacaatcccctgaaactgtcggctatccaaatgccatactcacagaattatttgactccctttcaattttatcaatttagaatcaattctacttggaattaaaacttgtatttctttcttattgtctgtttctgaaacataaaatagaacatggacaaatattagttcaaagcagtatgaataaaagaatttttaataaaaaagtaaatattttatttaagtatgtttcccaaaaccttattaagatcattttcacttaagacatgttatccttcaaaggatcaacatggtggagggattagagtatcaactgaatagcatattagtgtaacatttaagacaaaaagtttcataactagctcattgtggactttaggcggtatcaagtgaccgaccaatcactaggggttctcagttttccctgtagttagcctcagaaaagttaaagaaaggtactctaaacagtgattaaataactctagaagatcctcattacatattaaaatgatatgtaaaggatttgttttggctttctgctgaacttttgtgtttctaaaaatgaactgcttataaatataatatatttataagcatataatataatatataatatatataatatatatataaagatgcttataaagatgagaggtagtcatcctactatgggctgtaagttaatataggttctattatatacaaatgtgttcaaagaatctttagcctcttttcctttagaacttaaatggataaaagagaagataggattaaaggaaggtggtatagcaacagcgttttctcatattggatctacttggttaaaatgacaaaatgtctcagggtttgtgtgtgcttgctttcctagtgttgaggtgcgaaggagaggttgtttgactttaatgatcatgagtagagcaagaaagagaaaatccttagtggaagcctcaagtggtagtggttctagaggtaattgacagaccaatgtatatagaaccaatgtgtatagctacagacggagaaagcactcaggtgtctaagctgggcctgaccagagtatcggccagaggctctgtcttctaccacctccaacgtatcccctgcacggagactgcagtcccagccacttctagaattcaccatgctgaagccccttgtgctaataaccaaatgaaccactgtcagtaattggaagagtggatcatgggacgatggggctggggtgggccaggggccagccaattcaaccattgtatcctagattggaactcagacgtgtactccacagaatgtcattgaatcaaatatgatggtttggttccacagtacgatgctataatctcatgtgcattgtaaacaaaatgcttagttctcatattaattattgtgggtaaccatttataacattaatttacaacccctagtaggttgctgaaattcttaactgatgttttaaagtgactcagtagattctcattattttgtagtatacttcctctgtcattacaatgactatttgacgtattttttaatcaaaatttttggtgcccttgggtggacaccttttaaaattatttaaataacagttcttctgaaacaaccatattatgacagctagtctcaaataaggatgtgtaaaattatattatatagcaattgaaaacattcttgggttttgacattaaagagaccagggctttcctgtgtactggctctctctctgtgtgtgtgtgtgtgtgtgtgtgtgttcagtcatgtccaactctctgtgaccccatgaactgtaacccaccaggctcctctgtctatagaattttccaggcagtaatactggaatgggttgctatttcctcctgcaggggatcttcctgattcagggattaaacctgcatctcttgtgtctcttgcattggcaggcagattctttaccactgtgccacctgggaagccctgtgtagtcttgaaaacttatatattctttcagccccagttttttaattagtaaaaccaatctaatagtctctactttgtagggttttttgaagaactaaaaccttatatatttaatttagaactatgcttggtcttctataattgtttatgaaaaataactacaataaatacataagtagttaacattccagtacaatgtataatgctcagtaaattattttgaggataatattaatacttattagttgggtgggactattataactcatgttcatcaaagaactatggggaaatgtaaagcaattacagactttctgaagctagtttctgtggatgtaaacaaatttcagagaacctgttttttattgctgatgtcctaatttggacaggaccatgctaagaccttgaaaagagaaatgacagaattaatttataggcatttaaaaatgaatcaatctagcactatttctgtttcattttgttgccagtattttcaatactcaagacagggatcaattcctagcagctgaagataggcagtggcataggcatccatcagtcacacatccataatagctactgtgttatatttcagagcaaaaggcagttcacttgagaaaggcatgtttgctgatgatgttcaaggtaattccacaagtgacattgtggaagtcattattatagatgtttcatgaagttacctaaagaagattattttgaagtatcaatctaaattttaatgcagtagtttcttctgcagggctagaaaagttatttatttatttaccactcccaagacaggtttttaatttaaaaaaaattatgatggattaattctttcagtcaagaaagcaaaaaaaggggatggggatttattgttttccagaaaaagaaagattctaagtagagagatagtaccttgaattttaaatttcttagttttacataattaatatgatttagtttttctaatgaaaagtgtggtattggcacaaacattaatagatcattagagtatagagttgaaggtatagaaaatggatcaacttttggtaaaatagcaatgtatcttataacaaaacaaattcttagtggaaaaaaataaaaatattcaacataaataaataaatgttaagaaaagaaaaaactgtcagtagagagaagatgaaattttttccaacctagggataaaaggtatttctaggtataaaaccaaaaaagaatcataaaggaaaatatttataaatttacctatgtacacttcaatgcaataaacatacaaaatacaaaaccaaacaaaccataaaaagcatatgataggaaaattatgttagaagtttatattagaaaaaatcttggaaatcaataagtaaaagacaaatactcccctaactagaacatggggaaaaaaaaacccacaagaacaaaaccacaaatttcagtacctatataaaatgtttaacatcacaaataataatgcaaattttataaaataaacttctattttaaagcaattaacaaagacatttaaaattatattattcatggttttcgggaatggaagctaccacacattgtggaggtttttgttggcacaccttttgtaaaatgtttttggcaaggtataaaataaagcttaaaatatacatagctctgcatctttgttaggaaatggtcagcgaagtttgcaaagatttgatacaagtatgagcattatgcaggacaaaaaatttaaaaatcaaatgtctaatatactttggccacctcatgcgaagagttgactctttggagaagactctgatgctgggagggattgggggcaggaggagagggggacgacagaggatgagatggctggatggcatcactgacttgatggacgtgaatctgagtgaactctgggagttggtgatgaacagggaggcctggcgtgctgcaattcgtggggtcgcaaagagtcggacacgactgagcgactgaactgaactgaataaaattaataatttaaatttctactgagtgctcattctgtataaaaaccagtgttaggtgctaaaatcatttacagaagcaggaagtactgtgctaccattaaaaatcgtgtttttgaaggctatttaataatatggggaaatgttcacaataaaatagtatcttaggaaaaagaagcagtctcagactgtatgtgtagcaatatctaaaagatatctaaaatatctaaaagatgacaactgtggggatctctgggtgatagtaatgtaggaaagtctatgctttttctatttttcttgcatttcatcaatctaagtaaaatgttaatttctattaaagaaatgtccatgtcaaatataatatcaaagtaaaaatgtatatataaattaataattataataaacttacactgacctgttctataaatattttgaattagagaaataagtgttgagtgaaaacactgttgccacatcctgttttaagtcctaaggatattgctatactgcactaacaagagagaaaagagaaaaaatgacttgcatttccgcaggggtggggatggggccatgggaaaaagggaaaaaggagagtttacattcatgctctttccctctgtgaagaaatgctagcagtgtgtgtgtctggcagtggggaaggggcatgctatttctgtgcaatcctgggagtatgcagtgggaaatctaatcctgaatttcgaccttctctgaagtgagcatgctcaaccagttaaactaattaaacaggagatagagcctggaaatgcaggcacttttgcttagttatcataatacatcactggtatcctgattttagggaccagtgcacccatgtaaggtctatgctcagaatgctgagtgatacacatgattgaagagacagaactcaagggcttggcaggtcttatttcccagaaacaaataactgagcttaatttttaattacctaataatccctgaggtcactttacataagatgcaggacttatttatatatttgttggttcattaacatgaattagtttcctttccctccttataggagactggtaaaggaagaggtaggagggtggtccttaaaggcatttgtttatcatctaccatttctaaaaagttatagagatttcagagtgaaaaattttaaaaaaaattgaagtattcgatggcaagtattaggagcgccaaatgcatgtgtataaaattcaaaacagtttactaacaaatagctagacaatacagtagacaaactggcagtttttggacgtagtcggttggatagttgctttatacccattaaagatgccctgctgtacatgagctaccaagaaaaaccacagtcaggccattcctcacggatgccacaacacagacgttagtgtcctgcagccaggtaagatggacaggattgttactgagcttctccaaacacaagcatatatgtgtgtggcatcactattctgggaagttatagcggagatttccagcaacttacattcactgatgatttccaaggacggtaggaagtactcatcgcagacaaatgacacagccatgaacatgtaaaggataattaggaagtagattatgatgcctccatctgcacgttcctgtttcgtgaaaaacccctcaggaaactccgatgatggggatataacacactgggtgctatttcctggtaaggaaaaggaggtgaaaatctgaaggatattggagtcacgcattccaagcccacaaagagaaattccttaagaaaatagtaagtgtggggtttctgggtggaattttaagaactctggtaaaaatgtataaatctcttttgactatgatataattatagatccttaaaaatattagtctttgggaccaaaagaggtgttttaataaaataaagatagtggatgaatttaaaagaagaaataatgaaatcagttttccttgtctgcgtcaattctaaaggggaattctgaaccccttttcctcttaaattagaaactatatatctaaagataaaaatttctaatatccatgcaatatcattttcccatttcagagcccaaattgtccacaaatctcaaggcccacagagaatcattcattgttgcagacagaatttctaggatgaaagattcctttttctgtgatgaagtctccagcaataaaatctgaagactcttctgtttcatggtatctgtgggttatttcagagccattttcaagaacctacctgaaggactgaaagtatttgatatcctaccaaatgctaaaataatctaaatgctcagtcgtgtctgactctttgtgactgcatggactatagcccgccaggctcttctgtccaaggaatttttcaggcaagaatattggagcgggttgacatttcctactccaggggatctttccgatccagggatcaaatcaaattcgcgtctctggattctttaccactgcaccacctgggaagccccaccaaatgctaaaaatccgagcaaatacagcggcaagtataagcaaaagtgagtcaagtaagaattcccctctctttgtttatttgtatgtggcagtagcagcaggggtggctgagcccagtgtccacctacctgtagcccttgggagacgctgggccagggaggcccctgggggaggcaagtgtgcagtagcccagagaaggccgaggagcagggcgcgtcttgcccaccatgggccccctttgatctgcattccagtagcaatctttctgcagcgtgcagccttgggaagggagaaaaggaggattaagctggatcatgtgaggagtctccttcctgccccacgccctgcccagggcacatctcagcaaggccagtgcttgagggagggtgactggagtcagttaagctactctgatcagcagccgtaaacctcagagaggctggaagaggtggagaggagggggacagtcccctggcccatggtccctgagggcagattgaggcagctcattctttgtggactgattttattgtcttcatagtggctttgctttttttttttttttaattgaggataattgctttatagtattgtgctggtttctgccatacatcaaggcaaatcagtcataattctatatatatatcccttccctgttgagcctccctcccgacttccatcccactctctatgtcatcacagagttccaggctgggctccctgtgttgtacagcagcttcccactagctatctgttttgcatatgatagtgtatgtacggcatgatagtgtatgtacggcaatgccactttttcaatgtgccccaccctctccttcctgctgtgttcacaagtctgctctacgtctgcgtctccactcctgctgtgggctttctccagattctaagaacctgagtttacaagtgcttccacctctctctccagcccttctagaagttttggagctggtgtctatgtgttctttggctaagtttatacccttttatactgctgttttggggcctctcattctctctccagttagggctccatgcagggaggtcatgaaggaggctccgacaataatctcctggagaaaggatggtgacttgaaccagagcaacaacagtgagggagcagagaagcgggccgcttccagaactagccagagccgtagtggatgaagaccatttggtcattgattagctgtgctctctgccagaggtttgaaaatgcaaactggacacgccagtgagtgttcaaatataaactactatcctccctgcttaagcatttactgggcttgctggaatgttaagaacttctggcagtgtggttacatgtagcaaacagcacaggctctggagccagacctcttggtttgaatcctagcattgctacttactagctataagaccttgggcaagctatttaacctctctcctcttctgctccattctctgtaaaacaggaaggttatagtaccctctatttgggttgtgtgcagattacataaatgaatgcacgtaatctgcttagaacagcttctgccccttggtcagttttacctagctatctattatctatcatgttcagttcagttcagtcactcagtcgtgtcagactctttgcaacccatggactgcagcacgcagcttcccttccttcaccaactcctggagcttgctcaaactcatgtccattgagtcggtggtgccatccaaccatctcgtcctctgtcatccccttctcctcctgccttcattgtttcccagcatcaaggtctttcccaatgaatcagttctttgcatcaggtgtattattattgctattttattacttttgattaagatagaagcttggccataagggtattttttagttttgcaactcctgtggttcctttgctttgcagaaaacagcataaaaagtgttctatttgcttagttttaaatttagaaactgggtttttctggtggaaaggagtaagttgcttctgatgtttgtgatcttgatttggtgaaaattctcaaacaccccctttgttttgctgggaattgttacccattataaacctctcagaaaccatcatttccaggaactgactacccagatgtgtggtgtggttgtgaagctgggataatgagtcaccaaagtgtagcccaggaacagagcagattcccagcaagcagagttctggctgctgatacctgcaggaggtggcaccctggaccactggcctgtggtctcaatgccagcagtgctaaccccctgggaagagaccacttaactttgtgtgtgttgaagtgtctcatgaacctttcctctctgaaatgcagtggtttaactaattaataaaactaaacattataaacagacagaacaggaaaatgcaagcccagggtgaatacttatacaatgtatattgttaatccaggaaacagagcaaatatctgaagataaaagccaatgactatgaaacaattccagtggaatcttgtgcagagtaggtacttaataaacacttgttggttgattagattgtaataagtcttgaaaacacattcccagaacacacatatacttgttctgaacaaagtatctgataaaggatagttttaccaagaaaagagaatttaggaggctaattagatttacttcatacatttattcttcattttgcaaaagaatgtttaaaagctttctattgtaaaataaaacatacaagaagccacataaaataaatgtagagtttattattatattgttattgttattttatttttataagatggactccctcataaactcctcaggtcaagaaatagtttaccagacacccccagcaatcctttcatgtgcttcagtcccaacttatccttttccctgggagtaaccaggctcctgacttatatagtagtcacctccttgtgggtgtatttttgatagtttatcacccatccctaattgggtgcattcttaggatactgcagctcagccttgaaagaaggctcttaagtctcctttagtttacaggtttcctctcttttcttcttctcattatgggttatctgttagaaagcccccgggcatttggtctgtagagtttctcacagaccagattttatcggttgggtcctatggtatagctcaacagatgcgtccgttttctatatttttgttgattgacagctggatgcagaacttgattagactcagttctgcccctttggcaagactaactgtttgctcagaatctgctctgctactgggctacgctttggcatcactaaggtggtggtgaggtctttccttataaagcacacaatgtctgcttctctcttgtggtaatgttattaatcacagcccttcatgctcattacctaaatccgttcattcttttgcaatccattcacttgcaaaagaaagacattctacttctataatttcttcttcatttattacttggaatgttttacaatgagataatttctatcatccactgggtaggttcccaggggtatatagaaaagacaatatatgtgcttgactcttctgtatttatcacttctcagaatgactggctctctgttttcctcccaaataaccaactatttaaacaattattatgcattaatgtacttaaatattttgatgggttccaattatagttatcatttctgaagttcaaattgtctcatctttaggcagaaggagcctcttcagtatgacttctgagagccttaatagtttctgatagctttcttactgcccaatgtttaaaaaaaaaataaagatgtgctaggcttgtcttttacctcaaaccagccattgtcccaaatgtctctctgttttttcaaatgttaagtacctcaagaccacgatctaagaatctgggttgccagggatgttcatcctttctctctctctctctctcacacacacatacgcacacacacctcttaatacattgcctcatgagttcataccgatagttctcattcaaggttctcatgtactaaggtggggggggggcagtagaaaatccagtgcttcataattattcatttgctgatcctatttatgaacctcaaaatagtgatattgatattaccaccacatatatagttactgagaagagttttaaaatggagtatatgccctttccattctctttctatgctatgatctatagtctatattcattgcctgagcataaagtcattaaatatattctttttccctttaaccctcgtctaatcttggtactacaaacaaatacattttcaacccttgccaccattcttaggttgatatttctctagatactctgatgctcaaatcttatattctagtagattctttggaagggctcatgggaactatattccttgagttctttcattttgatgggattattaaagtttgaactgtgtcctgtactcacagtgaaaattaaaataaataaaaaaataaagaagcccagaacaagcagtctattgaaacaaccaactaagctaccctggtaaaatcagtgcagaggtagtcattgagtcaatgactagtagtcatttttttcttctgaggaataaaactgtcagaattactttcagctcttccttgctcactgaccagcttcagtttcacagtcttctcacagacacctggacctctgctgagttagcacctgctatatttggaatcaaaggtgatagtaaagttatgtttactaagcatgaggcatattcatgtgtattattcagtgtaattctccctctaaccctaaagggcagaggagtagtttttacttgttgctcagtagaagtatctgtggcttttaaaattgctgatgacttgacacttactcagaccaattgaatcaaaatctaaggggtggcttaggcatggatattttgttaaaatttcccaggtgattctaggggtgttgagaactactgggatggatatttctacccttgctttatagatggtagattgagtcaattgcctaagatctaaggttatatagttcccaactaagtgtcagagccaggatgcaggcaaaagtctatttaatgtcaaagtccaagaacgtcctcacctgctaagttgagccaactctttagagtgtaagtttcatgagggcaaaaccatgcctatctagtttcctccagcatttccagtgttcaacacagtgctgggcatgtggtagacatttattaaatattgttgaatggatgagtgaatgaaataaaatagggaattccccaaagacttttccttcacaacacccacaggataagaatccacagtatcttctataagttgacccttcgtgccatccagttccccaagcatctgtcaatcagctctccagctccacctgctgctacttcaaacaccatgttgggctttccaacttccttttggaggaaacacaggatatctacaatgaggaaccccgtgatatcagtcatttgataagagattttgacttttcttcatgagaaagagagctagtaatgttgtctttaattatctgcacccaaccctgaagtggaggcttttgtaggcatcccaactactgtgaagaaagaggaagggaaaggaaacagacggctaacactggtcctgtgctctgacttcagcttgtcattatcacctttttattccttaactttctgttataatatataatatacctatacaactaatatacaaaaagagggcacatgctttgccattgctttttcgctatttaaacacagagtcaggccagatgggggcctcttaacaagatgagtgattgatggtcaccatgttaagaacaatctgcaagggtggagatgcagcaagcattgactgcaggtgcatcctcatagagagccctctgaatctcagctgctgctgccccatgactggctttccctcaggctgctttcctaggaagtagcctaggaatcctcatgacaaggagctttcagctcagtctaccaagcgccttcatttttttgtctctaatcaacaaagaagttgctagctgggaccatagacatggccgtgagtgagcaacaatctgctcagtgtggttcacatattcccttttttacctgccaactttctcacaccctcatcctttgtgagtttatcagcaaaagtcgggatcatgcaccggctgcgagtatgactgagcatttccaatttctaacccagttcagattggtctcattcactgctgtatgggtcctactcagtgaaaagtgtttaaaacattttcagttcctagaagggcttcacagtcttctcaaaatttgtatttttttccccctggagggtatattccaattctctgaatatgctgatcctgttttacagatcaaatattgtttaataaaaaaacactttagagtgaatataattttaaaattagctaaacctgggttacagctgcctccttcattctttctgaaactcaataaatgggggtaataccacatgctttttaggctgtgagattacaaacctagagcatgaatattcatccccttttcctctggaatataactccatgagagcacattttatgtcactagaacttggcagagtgtttagttctcaatgaaattgaatgcattgggcaggccatgagttgggggaaaatgaatagataaaggattttcattagctatatttataaaaaaatgtttgctttttagcctgtattttggtacttgttacactttcttcatttgtgctagccttactctgtcttccttcaccaggtttaaatataaaatgtttcagaacttggtggtttaatgagtgatctgcaaaaaggcttgatccagcctattttttttttcacttcctcctccagctctatttcactgaggtgttctgagggggtggcaagtgtgaaaagtggagggcagggggccctgactcatacgtgctggagtggggagatttattttcttcactttaacataataaaccccctcagggtctgagttagcatcatcatttctccttagtctgctctgtgaaggctgtcatccccacatgaagagattgatgcctccttcactctaaataatagggatgaaggcatcagggattcttcagattttgctgggcttagagtgtctttcctaggctaggaacccaagagccctggtgttcatgaggactgaatgtataataccctggttttgaagaagggaagccagtaagcactttatagttctttccatactgggataggttacacacatcatgtcgtgtgtttgaagtccttccttagcaagtagagttggaggtggtcatagctctgctgctattgttgttgggagtatggagctagaggggaagtaggggagttgaccaagagggctaaccacagtaatacgagtagcttgtactccatgcccatgaaggccagggctgttgttggtactatgaccgtggccactctttgtgaatcgatctgtaggcatggttggcacaagtctctgtgaaaaggttccttgctttccaggctgtgagtcttcttagcctgctgcatctttggctggatattcccaaagaactagagttacactacttttttctggaacctaaggacacgcatatttcactgcttgctttctcttcctcttttccctcttcttccccaaactgaaagttctctgaaggagacatggacatgtacctcacagataccccttgaaggacttgctgtcccagcatgggggttgctgtcagcagatggcctccagtttagccctgtcatggactgcctgagctgaagagcctccttacataaaaccacaccatcctcagggcagcccacatctaagtaaggcagagacgtataaggccaatcatttcagtgccatgaagacaactctgatgggcagtgtggtttcagagctccccactgattggaccagggcttcattggacctgccttgaagttcagcttctttaacttccaaatcctgcttcctccctttcctctcaccccagctccatctaaatgacagtctcaaagaaccctacctgtgacaggccctagcctactttgtagcttagtttatgctcagaactccaaactttacccttgatatttgaacagtgagttttagatctgagaaaatgctcttttccttcaacaaaccttgactttcaaaattgttgcctatagatggaaatacagattgaatttgaagctcacagttaaggaataactcctttgttctttagtgtgtctatcgttttcttgaagcagtgaatgccactgattccttgggcaggtttctggaaattttctaaagcatgtgctacatgcagcccattttccttccaactgaatctcagtgaaagatactgcctggttgtcatccatgattcctacttctcccctcctctaccgtctctatcaatcaccgagtccaaataactctttttactgaacatctcttgggtccacagttcagttcagtcgctcagttgtgtctgactctttgcgaccccatgaatcgcagcatgccaggcctccctgttcatcaccatctcctggagttcgctcagactcatgtccatcgagtccgtgatgccatccagccatctcatcctcggtcgtccctttctcctcctgcccccaatccctcccagcatcacagtcttttccaatgagccaactcttcacatgaggtggccaaagtactggagtttcaggtttagcatcattccttccaaagaaatcccagggttgatctccttcagaatggattggttggatctccttgtagtccaagggactctcaagactcttctccaacaccacagttcaaaagcatcaattcttcagcgctcagccttcttcacagtccagctctcacatccatacatgaccacaggaaaaaccatagccttgactaaactcttctccatatccatgctaccattgtctgttgcccagatttctgtaggagcctcctgacaaggatgtcatctcaatcccccactcctgctgtccttccaatacctgtgtcaggtaggcagtagaagatagtacatgcttcctaggtggtgctggtggtaaagaacccacctgccaatgcaggagacataagagatgtgggttcaatccctgggtagggaaggtcccctggagaaagaaatggcaactcactccagtattcctgcctggagaatcccactggacagaggagccgggctgtacagtccatagtgtcaaaaagaatatgatacaactgaagcgacttagcacacatgcccacagctcagaggtgcagccaggtagaggagaaggagccagccagtgaatttcagaaagagggtcactgaggcaggaggaaaaccaaaggaatgtgatattgccagagcagaagatgggaagctggcactgaggactggttagggttagggtgaaatacgtaacagtccataatatttggcagcacagagatcatgggtgattttcaagagagaagtttcagtggagtccagtggtagaagttaagttagaataaacgatgaagagggaaaaagtagagggttttggattgttttatgtatgtgaaagggaaattgagcaactggaggagaatattgggtgagggatttggggttttgtttgaatgtcatgggatattctgtagcaggtttttgcattgatttggatgatccaaaaacaagcatgacttgcacatgctgaagagagaagggaatccctgagaaagttctgggggtcagggtttcagagctccagagggtaggtggacttttgctggagaaattctgcttcttcccatgaaacagaaggaatggagaagatggatatagaagatggatatagagtcacagattaggtggggaagaggatataaacattcttttctgatggtttctatttttaaatcataaataacattttaaaaatcatgttttaattcatttttgaggaaggtttgaaaagagaaactgtagaagatatgaaataatcatcttgatattggaaaagctaatttactaagtaaatgtaagagtgttttgttcaggtttttgatcatgaatttaaagcaaaactggttacctctattctgtgtgtatgcattcattctccagtaatattctatttttaaaatgcaggtgtggggaaactggactccactaggtgtgttttattccaagcaagtgttgatagacaagagaggtgtaaaggaggagagaaaattttcaaagaagtgattataaattatggattatgtgatctaaatgaattagaaagaaaattgaaagagggactgattggagggtaatgagaacatggctgatggtttagggatattggtgaggtgaaaaaatcatgagcatgaactggagttgaggatggggggtgtgagttcgaggttggtggggagattaagtggggaggaggctatgtaaattcttagctgatgtatttctatttttaatcataaagaacatttaaaaaatcatgtttaattcatcttatatttggagatttgcagatttggaaatggcgctgattgcagtaataagcagttagtgtgtgataataagactagacaagcaagtggagatgagaagttcaaggaactgaaagtccagttgggtgtcctctcatcttgcacacatcttggcgttttgtaattgttagcctatctttccaacaatgtgttatttaggacaggatcacatttgtcactgcttcctccctaatgcccagaatggtacctgacccataaaatactcaataaacatttacagaatgaacaaataagtctattcttttaaaaattctgaaagttattcctgaattgagggctgcgtcctgggataccactgtcttcactccttgtggaccacttcttatgggcggccttgtgggtaataacatttactgctgctgtggatgctgtgagaagcactctttgtaattctctgtggtatttagtgtagggggttgctgaggaagtaattcactcccttacacaatattccttccattaggacccacaagggaaacttttctaggatttcattgctaggaagacctgtgactctcctgagtgaactgacaatttgtgagtctcataagtgaatgtgttttcctctttgctttgtctattacagcagatttgtggtggaggctgaggctcagcttcagcaattatgcagaaaaacatgatatccatttcttatgaattattttatcctttgctttatctgattatcttttcctgatttcctcatcttggtgatttcttttcatgtttctttttctattctagaatctttcttgaatatttaatattaaaatatgtctccccaaggttcagctgggtgaaattttctcctgaccacttcaattggtgcaaattcctggtgatcctggggaaagcaagcctgttaaaaaccttaatagtgaagattaagattaggtccatttataaatagtacatgtttctgaggatttattgagttaattagtgttgagaatttctataatatataatattcaaaatgtcatctatcttagacaataccaggtacaaaattgtttataaaaagaaaacatatttctgaagatttatcaattaaatttaatttatcaattaaaacctctggaattccagctccccacatcaggctttgctgctccctgaggctcagtggccccctgctctgaccatggccatttggagaggctccagttcctatctgagcctttattaacttaattaaggcactttatgaatttttgaaatatatttgcttaatcaaataatttaagaaatgtaagatgagctaaatcatgtctaaagactctgggagcctcataaaaaatgcaaatatggtagtaaagtggagatcaagatgacaaatacggacagagactccgagggatgataagaatgaatgggaatgagaagatgagtgaaactctacaggactaaccacaagggaacactcaatgtagagatctacatgctataaagaaaatgaaaggcaaaaaaagaggaagcgtgttatagctatgagctttgcagtacaccatagtggacagtcattaaatacattacgtacactaaatactgtcactgtgggaaactgtattccagaacactcgttgatgcctactgtaattttataagagctgctttcctcagatggaagtgcgaagttagcaggacagagaatgagcacaactcggcatgggtgctctcacagtggggcggaaaccaggccactgcgtgcattgactgagggtaactgaacgtcctctcaggtttgatcactagtctcagtaagtattgtgcataagaagagtgagattgttgaatgagattgttcaaagtgtttgctgtgaaatacatgaataagcaaataaaatgcattaaaaatttattaacaattgtaaaaatatttgagaacaatataagttatgttggtatagctagttttacatatttttgtaaactacctaaaatccttttatgggagaagctgagttattcattaaacataaaataggactataccaagtcatagttctactattgaattgaaaaaatgactctaggaatggaatgtgtattattagaattattagaactactagttaccacacacgatgcgcattgctgttgtttaagtcactaagtcatgtctgactcttgcgaccccagggactatagcccaccaggcgcctctgtccatgggatttcccaggcaagaatactggagtgagttgcaatttccttcttcaaagcatcttctcgaccacctctggaattccagctccccacatcaggctttgctgctccctgagcctcagtggccccctgctctgaccatggccatttggagaggctccagttacatagtgaaaagagaaacacttatttgcttaaagtcagtttgaaaaacaacaaggtatctgttttgctgtgtgaaaatcagctgaaggggagtgtcttgagaatcatgtgtgctgagttagcacttctaaagtgttacctggagaatgtgcacccacagaatgttcacacggcttgagggaaattcacattgggcccttgcctgagtcctgtaagataaagttgacagtagaaacacgtttctgtttccctgtttagcctcctctcatttgttttctctgtcctgctatagtagcttctggaacaatgtacaaagactatgtccctcttacactcagcagaccactttgctcaactagaattgctgcaatcttccctctctccctggagccctccctgtagatggcagatagtccctggctggtcccatggtgttgtgtgtatgggctgggtttaatccctctctttctcactccaggaatgagcatcagtagtaggttcttgttcttaagaaggaaggaagagcatgctattgagagcagactgggtctgggataattcccagaagaaaccctggcgccttgaggtacaaagtagtagtcttctacttgacacagatttgagcagatcgctgaattttgggaggtgtcagagactgatttagaagaactgtaacctgtgagctcatttgcagcttattatcaagtgcttataaaaagtacctttaggggacatacctagtggtccagtagttaaggcttcaccttccagtgcagggggtgcaggtttgatcactggtctgggagttaagatcccacatgccttgcagccaaaaaaacaaaacataaaacagaagcaatactgtaacaaattcaataaaagactttaaaaagtagtccatattaaaaaaaaaaaaaagaaacttttttttaaagaaaagcactttgaatatgcacatcacagttctttttaaataaaagatattaatttaattttaatttgatagtatgatatttcacatcacagttcttaacccaagaaatacagagagtacatggtctcatgggagagacagacattaagaagatcattgctctcagggttataagtggtgtaaagtaggcaaaacagggtgatgttgaaatacaaatggtaactggagggattccaaaagagcttcaaagagatggtgttattgggggtgggccttgaaggaaaagaagaatttgccatgagagaaagaaaagaagggtaatattccaaggtagaggaattctgtgtccaaagacatggaatccggaagtagcctggcttcctcaggaaatagcacacaggcaggagggagctgctcctgtagggaattgggggagcaatggctggagaggaagccgtgccacacaaggtgcctttggttcccagccaggggcccggggccttttcctctccctctgtggaatggaaccatagattttggaaaaggaggatgtcttagaaaacatctggctgataaagaacctgagagccacatggtgaattgattaaactgcatatttaaaaatagagcatgatttaagagttactgccaaatgagaatctcctgcagatttttgtcttgcttgaacacatatatattatcaacataactattttgtttcttaggtgtgcttgtttgcaaatgatggacagtgtgttgtggcttcgtgttcttatagacccaagaagttgggtctgtcagtgtgtttactgtgaagaattaagattaatgctttggacactcactcataccatgcaggtgggagtatacattggaacagttcttctgaagggcagtttggcaatgtacgtcaaaacagcatttgaaatctgaacagcattgacctcaaattcctttttaaagaatttgttcaaagggactggccagaaatgcatctagactatattcgttcattgtaggattgtttataatgtcaaaaaactggagataacatacattttctaataaaataattatggtacagtggagtattctgtcaataataaaatgattaagtagaaatttttgaaatatgaaaattttatatgaaagtatattcctaaatgaaaaaacaggttacagaatggcatgtataatgaccctaattctgtaagagttagatatttttacaagattaggtttatttccttttacaaaaattagtctacttatgtgtacgtatgaaaaaaatctggaaaaatttataccaagatgttaatagcagttattactgggtggtaggatagtaggcaatttttaatttctactgttgtcttatccatataatttctaggattttggtttatcaataaacaagcatcacttgattacttgtgtaattaaagagttatacatcatttccccatgtgagtgcagactgattatttgcctgtttgttgttgttgtttagttgctaagtcgtgtctaactcttttgcaacccatggactatggcctgccaggcttctctgtccatgggattttctaggcaagaatacaggagtgggttgccatttccttctttaatttacctgtttactacacctatttaagatattttgattgtttcttctgcaactgtttgccaaatgattggggaaaatgaagaagtttggggataatatataatggctggaaaacttctgtcttttgtaggttgtgtctgtgatgggaaagataggctaggtttatcactactccattttggaaagcacaaatctttaggttaagcatggctggctgccttccagaatttccatttccttagtgactgaatggcgtaataaattggataaaagcatctgctatttttcagatcatctatgctgtgcaaatgtctcaccggacactgggatcccccttcaaaaactctgatttttcatgttctgcacatagagatggaactaatctggggttgagccagtcctcttagggggtgtttcatacttggtttgtccacttaatttggacgctggtgttcaagtgggcgtcacccacatctagaatctgcttctaacacttttagaaaggattctgtaccttgggttttatgaagatggttaatctattgtgaagaatgaactaaaacaccattcattgttcttacagatagacttcaagctgtaaaggaaagatacacagcaggttttgcccttttcttctctccttcctccctaaggaacttgaagataactttttactagactagttttggtccaaactggtttcttttctgcctgtttcatgttgctcttatctgaaaagctcccatctgccctggggtatctacatcttgctcttgtctttattatagtctttatttatggcagaatgaaggaatgacctatcaattggtgtgagtttttccatttttttctccttccctgtttcaggtgggaagcaaggtggttcttatttctttaccttggaaacttctgcagggaagagagaagaaatgtcagaggacaagagctcttctaacacgtttgaagatcttgagcttttcacagtgatggcgttgggtgttctggggaagacagatgcagagggaacatctttaagcacaaggtggagcaggaaaatccagatattaagaagatctggagaatggccagtctggagagtagttgggacccatgccctgctcctagcagagctctaggagggcaagctttctgaggtaccataggagatttaccaaattgtgtgtgtgctcatttatgtccagctctttgcaacctcatagaccacagcccggcaggctcctctgtccatggaattttccaggcaagaatactagagcaggttgtcatttccaccaccgggggatcttcccaaccaagggatcaaatctatgtctctgtgtcccctgtgatggtaggaggattctttacctctgtgacacctgggaagccactatggggaaagaggctggaaagaagtctgagagacactgcatctctggctctgaatgacatgcactttgaggcacacttaagctgatgagaagaacatgctgtttctggctctggtgtcactggctctgagtccatcagatgtacttttttaaaaggccttggtttcccttcgatatccctccaacatgctgcctatggttcatagagatttctgagggttttttggctctaagaagagatggaccagaccactgcattccctttgtgaggattcatagtttgggggccagaagctgaatatttaagggctgtggttagtaataaggtttgcactcctttgtgtgaaaaagtcacttccaggttggagctaagaatagataacccattttcataactgcatgagatttcctatttcacattattgaacatcagccctcccttctgtagcagctccagctgtaatcgtttctctatgcttaggagcaggtaatccatttttagttgcactattaaaaactatgctattgattatttcttggtttgtgtcatggtttcagaggctgtgatgatataaagtcactgtatgtttggatctctaatcatcgttgctcatgtgtcaaatggggctgtcgatgcagactggagcaataaggatgacacaacatgaaaatgaacatggatgacaagctgcagatgagaaatagaggcagcagcactgacctcaggtctctgagagctcagcgggaaagttagagcatagtcaccaggacctataatacacgaataacataaaataaggcaggaattaacaagggccagaatcgagttacaaggcattatgcacacttagagaagggagcatttatacctggatgaagtattttagtcttgaatgatgtataggatttgtgtatgcagaaggggaagagtaactcatatgtctattttttggtgaagtattgcaactaaagcctgaggatctggttcttaaggtaagttacaggctacacaatccatcatgcgccacgctttcctaccatatctaaagcctgagtttggagtggattggaagaaggtaaaaatcatgtttcatttccttttaggagaatttaactcaactttctgtttttaaaaaatttttaattggaggataattgttttacagtgttgtattggcttctgccatacactaatgtgaatcagctttaaatatacatatatcccctccttgctgaggctctctcccaccgcacccgccatcgcacccccctaggtcatcacagagcacccggctgatcttcctaagctacatagcaacttcccactagctatctattttacacaaggtaatgtatatatttcaatgctactctctcaatttgccccaccctatctttctcctactgggtccacaagtccgtgctctatgtctgtatctctattcctgccctgcaaataggttcattaggaccatctttctagattccatatatctttctgtcattcctcttaattgaagatttcactgagccagtgatgtaagttcaagcattgtccagagatgagggatggctggggatgagggagggttttgtggcctcccttatcttccactggtccttgatattctgcctgtgcttaagagcagttatcaaagcagagtagaggaaaggatagaaaagagttcacatttccaggttgttcagttataaatttctggataccaaacatgggaaacacccaaggtagaattgatcctgtgaaacgtgggggacagtgatcaacagaaatgcattctacgtgcactgatcggatcatcagtgaggccaaggtgaaaaggaaagcacctggataggaaagtctccagacatgatagtaccaagtctggttgttgttactataatctcaatatacttgtaagagctaatatttactgagtacttacttgctgccaagttcctgacatgcattatctttcttactgcacataactatcccataagagagacacaactgttctcttttacagatgaagaaactcaggcagaaaagttaaagacaattggccaaggtgattagctaggagttagtggagcatttcagtctggctcttgagcctcaacatgtaattcttagccagactaactgtctggtttcaagagagcagaagggagtatgtataggggatttctgctggtgctcccagtgtcctggttgggggagggggggtgggtaatggaggcattgctgagtttacttgcatcatcagggataatttaatgggcttctctggtggctcagatggtaaagaatctgcctgcaatgcaggagacctgggtttgatccctgggtagggaagatttccctggagaagggaatggctacccactccagtattcttgactggagaattccatgggcagaggagcctggcaggctacagtccatagggtcacaaagagtcgggcacgactgagcaacaaacacactttcattaaaacaagacaatgctgtgctcacagaattcatgtctcacatttcctcagatgttttctcttttatcctctgccatcaatagagttgtgactgtatggtggcatttgtgagaagcatcaataatgaattaaaatagctttttgatggaaaaatctattgataacctataaaagagtaacacttaacaattcatttgcagttgattgaagagagcaaatgaaacaaaatttgtagcatgttagattttgctggtttagtttctgaaaaataaataagccaataaactcttctactgaagattgctggctgtgtatgttgagttacaggactgtaatatttattcaccaatcaggaaacatgagtttgcattcctaaatactcctttgcttctcagacacacatttgtataattctttggcttcctgtaggagaagtgatgttgaacctatctcttatgttcaattgctgtttacaagttcacagccaattcttgactctacctccaatactagaaaagaagaaacatttctaagaaaaccttcaggttttcatttccaacaaagctgtggcacaaacactggaattaattggatatttaaggttatgccttcctagagttggcatgcactattttctaggaccctggtacattgggtctgttaagagcacatagaaccttaaaaaaatgttttggcaaaaaggtaatgcatgcacacaagacaaactacaaaaggtgtttatcatgtaatttgaaaactaaggatatccccaactccattccatggccataaaaattactggtttcctttcttgtatcacatgacatcttgactcagataatttaatatgacaatagtttgatttgattgactgaaaaacaattaaacttctatctttaaagaaattactaaagaatagtcatgtacaatgcatcatggcactcctcacttccttccttataaccagttctttctttaccacaactctgctgctcaccccactaagggtgatacaaggaagaagagaacataagagagattggattgtggggctcagataaaggcaaggacggaggggtatcaagtctagataagatgagagatggagtgagagctcagactgtgtgttgtataattaattttttaaatccaacttttaaaactcttaatttgctggtttataatgtgttttatgttaagtaaagctttagtgacagcctttagttgagcttgaaacctgattaggacatttggttgtttaggtcacatgacaggctttgtgatgaagccctgatggtgagtaggcatggaaggtgatatatgcatccaaacctctatggccagtgggcttgggctgcaccctcagtttaagcagagtgaatgtgggggatgcgggggtggggggagaggaggctgatgtcagataagttcttggaattctccaaaggtcttccatgcccacaggctaggcatatttttgcaaaacttgctcttatcgtccccaccaaaaccaaaaacaaaataagcagtttaccatggcttctagttctgactcattgcaatgtagtgcgctggagatttggaattctccaggcaagatcaatgaagtgggttgctattcctttctccaggggatcttcccaacccagggattgaacccatatctcccccgcattgcaggcagattctttactgtctgagccaccagggaaacccagtggatatataattgcattttccagcaggacaagaggaaggtggaggtaaaggtaggggactaacatgagccaaggcgtggaagagtgacaccctctgtgtttgagagatgggcagtggagggggtggtagagtgtgggtgaggagcacagaaagacatatttctctacaataagcttgggctgtactgggcacaacactgtatggccttgggccatttgaatccatagatcaggagttcagaatgacctccttggttacaatgtggagggtgaagtggagagggagatcaaaatttttagtttgtaccatgcatactgactagcagtcctaaatgctactgcaccaagaatacaggaatattcgtaaagcaaatcattctctgtcaactttcaccagagacaagagaaatgtgaatgccaattgtcttcttatacgtcaggcttcttgagaagtgaattcagatatctggctcactctttgaacactagctggctgcattaccatctgtttggaggttagaactcagatactttgggcttctccatcttgcctcggttgtttatgttttttggattgctgagttaagaatttagttaatctctgtgactgggcaggtcaaaactgtcagtttataggtaggtgcaccatgttccaagcaggctgaaaacatgcttgtacaataatattggcacagcagaaatgacaagggccaaggtgcaatttctaatgttggagctaactcactccttcagaggtcttcgctgatggctcagcagtaaagaatctgcctgcaatgcaggagttgtgggtttgatccctgggtcaggaagatcccctggaggagggcatagcaacccactccagtattcttgcccagagaatcccatggacagaggaacctacagtccatagggtcacaaagagttgggcactattgaagggactgaagatgtacacacacacccattcagagccatgttcatgtgatcagcaccccccccccccagcaggacatgtgaggacagtgcaccatgaacctggctgactggttcctttatggtgagtacaggtgagtgagagtgatgaagacaaatgctatgagaaaatgctgtagaagagtttcaagcagtgcaacacaaataaaacatgatgaaagtgaaagatgctcagtcgtgtctgactctttgtgaccccatggaattctccaggccagaatactggaatgggtagcctttcccttctccagcagatcttcccaactgagggatcgaacccaggttgcccaaattacagggggattctttaccagctgagccatgatgagtgagaaactataagcgcagagcaagctggctctcagcactcagtatggcccattgagctgaccagggacatctactgatgtcctactgtgttctttgtacacaagaccaggatggggagagtaagatgtgctttctgcttgcaagcatctctccatcttagtgggaaacagactaggtggtggatacatgagatgatttcttcctcagagcctccggaattgtgagaaaataaatttatgttgttttaagccacctatgtgcatactcagtcacttcagtcatgtttgattctttgcgactctatggactgtagcccaccaggctgttctgtcttagggattattcaggcaagaatattggagtgggttgccatttcccactccagaggatctttccaatccagggactgaacctgtgtctcctgtgtctcctgcactggcaggtggattcttcaccactgagccacctgggaagtcctttaagacatctactttatggcaatttgttacaagtaggaaactaatatccagatgaacttgtggtggtacagcctcgttttcaagtagaaatccgggtctgatgtctcaatgaaaacaggttggaaatttcatgatgccaggcacatggtagctttgctttgcatgcctgggctctggggaggaccagggaaggggaaaaaaggctaccatatgaggttaccaagaggaccacatacagaattcaatagcatacagcactttgaaaaataagggtagcatgcagggcaaaaagtgttaatttcattacatgaagatccactatcaaacaatcaataaaaagataaataccttttaggaaatgacgaaagttgagaagcaatcactatacaaaggaaacatggcaaatgatgagtggctcatcacctgaatcgacctgggctcactgagcatcctgcctcctcgtaaactgttacttgagatttgctctttcaaatgtatcctaatgatgcatgtttagcacccagcttgtgaggaccagagagagagggggcttatttcagcccagatgaagcaaaggtgggtgctgcacagcttgctgcatcagcaggagtaatgctgaagcatggaagcaatcctaacctggagcaaaggggtgttgtgaaacaagaaagcgtcgtcaattgaagaatcaaacacacgcatttgttgaagacgtatttgactccagtggggagcacaaaaacaccaagccgtgctcctactcccctcccctctaccccccacccccaccccgtcacagaggagaagtctgagggattaaaaacaacaacccaaggaggaatgaattgtttggcgtagaatttatgagtggttttcagttctggctgcacattagaatccctggagagcttttaaaaaatacagatgcctactggaatgttcatagcagcactgcttataagagctccaaactggagactatccaaacgcacatcaacagtagtatggataaataattatggatcattcacataatggagtgccacttagcaatgagaaggacagattgactacatgcaacaacatggataaatctcttcactgtaatgttgagtgaaagaaaccagataaacaagtgtcacgcttaaaggtaccatcacaatggaagatgctaacaatagaaaaaagtagatgcggggtacactggaattctgtattatccacacttctttttttgttgcaaatctggactgctccaaaattcagaagtctatttaaatatgagttatactgtatgattccattaatgtcaaagacagatagcattcatcctaagctattagaattcaggaagatgcttaccctggaaggcataagtctgggaagggaactggggtggtatcttttttaaaaaattgtttatttttggctatgctgggtcttcattgctgtgtacaggctttctctatctgcagcaagcaggggttactctctagctgcagtgtgtgggctgcttattatggtggtttcccttattgcagagcttaggccctatggcttgtgggcttcagtagctgaggctcacagcctcagtagtggtggctcacagctgcagtagctgtagagcacaggctcagttgccctgtagcacgtgggatcttcctggatcagggattaaaacctgtgtcccttgcattggcaggcagattcttaaccacgggaccaccagagaagtcctgttctgtgacttaatctatgtgttggttacatgggcatgttccattatgaaaatgtattgagcaatttctgtatgtaatattttattttgataaaacatggaaagctatgctaatgtctaatcctacctagaccaactaaatcagatttcttagaggagggcctgggcattaggatttttaaaaacctccctagattattgtaatgtgcctccaggattgagaaccagtgctatttgtcctgtgggcagtgagaggagccagaaaccagtttagactggaggcatgggtacaaacttcccagagaagcagaacatgcatgaatcctgaaaggctgggagagattgtttgaggccagcggggttccactatacatgaatgtttcaagcccaggaaacattcaatttccaattctcatttttcagtttttctggtggtggctacacttttgcttagaaactcgatttcccgtcttaaatgctcttgtcacgtggtgacccgttcagttcaagagctgtgaatagggtgtcaccgggcttcatgcaaatggaattataaagcagttggttttgtgcaccttacgcactatattttatctaatttgtagtctctcgtattactgctgaagcctcagtaagccctgaaaaaagcatgcttataataaatgactagaaaaacaagccttggcgtttaggttggatcgcagacgcattccctatagtgccagtaatcaactgctaagacataatacatttaagtgttccaaacggggaaggaggcttcttggggaaaggactgatggattcctggcttgtgcagaaactgatatctgagtgtgtcactgctgctgtgattattattctagaccatccactgggctctctgtaagtttcttacttgtaagggcgacaggagccatatggaatattcactaagagtatttgtgaatttacagtgttgttttgttctgatagcctttacttccttgggctcattctaggtaatgaacaatgataacagctggcctttattgaatactcacatcatgccaggcactttgccaagccccttccatgaattatttcatttaatcctcccctcaatcttaagaatccccccttgacagatgagaagtctaacaaccaggattaataatttacccaaggtccctccccaccgtcagaaacaaagccagttatgtcaaagcaactgacattcagaccctgcttttaaccatggtgtggcactgcctacaagggtccaggaaagttgaggtgaggggaccttgtcacgatctgtgctcacagccagtgcctcccctcgtccccacctcgccttaagtctcacggtctgtcacctcgtcctctcctctccctctgtccttctctgccctctctcctggtactttgcctctcagctcatctccagaagagtggatgataaatctcacatttgcgatttgctgagtcatttctctcaagagtgacagcacatgagaaactcttccaggaggacagcgcctgccacccgtgagtcatgaacgtgacataagctggcccaggagacagcaaactctggcctgttgaccagatcccgttttggtaaataaaatttcaggagaacacagctgtgccccttcgtgtatttattagctatggctgctgtggcactacagtggcaaggttagaagcttctgacagagggtgtggaccacagagcctaaagtatctgctctctgaaccttctggagaaactgcccaccccagtgacactacagaaaggccctactgcagagcgtggggcatagggctccatggtggctatttccccttccgcgggtttctggcagcttcctatggtggattccggcggtgggagcattctgaaatcacatcacgtgggtcacggctgcccctgaccattcatggcaggcagcggaggccacagtcctcgctgaatattcatctgcactttggcaagtgaaacagtgacaagtgtcctcatagaaacaaaacgatgtattattcattctgcagagtacttccaggaaatccccagctggggtggaagcagcctgggactgggagcaacatcttggtaccaggaccagtgagaggactacagcgatggctgtttcagtgtggcagatactggacaattatgtgtcctgacagctgttgccttaccggataaaagaagacacttatttatttatttattttttctttcagaatgtgtttgaaatctcaaaaactggaattagtcatgaaacacttcaagttaactgcttgtctgcttcattatgatatttttggttaaggaccactttccatcaggcgacccttgttttccactggttagtggcaggggtggcccaggattgctgtggaagtggagtggctcagtcatgtccatctctttgcgaccccatggactgtagcccaccaggctccactctccatgggattctccaggcaagaatagagtgggtagccattccctacccattcaggggatcttcttgacccagggatcgaacccaagtctcttacattgcaggcagattctttaccatctgagccaccgggaagggtttctgtagacaatatcaaacggctaggctgcactgacactgcctctaggtccagttcaggaagccattacatgcaacctcccagagtcatgaattctactttctttaacttggggggctggaggccttgcatttgtggaccattttatctaggagctgtatttccccttctagggatacccacataccgggatctaatactttctcctgaatgacttagagggtcttaccttcttaaataggtaatagatattcctcatcgtggctcttggcactctcagtaaaatctagtctctgtgaggttggtagagtgatgaagactggaattaatatgaaattaaccctgcagtgttagcctggcttcccccaaagcccaggtttactggaagaacataacgcctggagcaggactgagggcagagggagggagacagggacgagggagggcgaggtgaggctgggctgtggagccagccttctggaagttgctccacctcctaaggccattttcctggaagagatacaagatgcctctcagttcagttgaccctgacaggggggagaaggggagaacttatctcccagcttttgtctccccaccaggacctggctaccaggtttactccaggattcttagtgcctcctggctgcatgcgcgggccctgagggggcccctgagaagaccccaggctcccgttgccctctggtcaggccttgccatgcccctcagtgcacctggctttctaggggagcacacttatagctctccccagagagttaacatcatggagagtggagagctcagagtccatggctaaataagccagtctttatccttgtgtgaaccaatgatgaagcctgtgctgtccattattccagaggcttccagtggttgaacctcagttaccactgcaatcacctgctcattgtcagaccatttatgggctttcttctcaccccatctcactcccctactcgcctctcagtgttccaatctttatttcaaagtccacttctgggagaacccaaccaaagaccacagagaagctgtggaggaggtgagaggcccagggaacaagcatacagcatgtgccaccctactgcgcctgcgtgagtgttccagctgctgtgatagtggagacgagagtcaggggaggcctagcggtgaggtggtgcagcaggcgtctgatgggtgtctgctccacctgccaagaagggttacagttcactgatttgaaccaggccctgggtaagtatttaccatgtgcagaaagagtgctgagcactccctggggatcaatgcatttaaggctcaccattgggaagcagccactattattattgcccacattttatgaataagaaaactgaagctcgggaggatgaagtaacctgccatcatccttcaccattactattaatatttaaaggtttactatgacctcgtttaattttaggggacagagctattcaggcatctggttccattgatctctcaccagacacagtaccttagttgggtgtgtgagtgtgagtgtgagtgtttgactgtgtatgcattggatggtggggacctgggagctgggggttaaaatgtatagacccatttcccctcaatgtggcccaaagaaataaccccccactgtttgcagtccaagaagaagcttgtctgggtcttgtgtctggtttgggtccttttccaggactagaaactgtttctaaactaggctctaacttactgaccagcaaatagcacaaaacaaaatgtttttttgatgatttaagtgtaaatgagtcagaggcagagagattaaattttccctcaaatacacaggggttaaaaaaattacagtctccagagaggctggctctttgaggactgagttttcgccaagtcagcacattcaagaaagagtttgtgactctctgccaaaccccaagcgccactggcttctttgctttagtttcttgctgaaccctggagaaatctatcttcctaaatcctcgctgtctgtcagaactgaaagcccatttctgtgcaaatgattcattgttataatttgtgccacctcctcacagaccttcagacttttcattttttacatcaattcctatgtaatatttcaacaagtctcttttttctcctctgtctccctcctgtccttccaccatcagctctctgccaacagattcaaacaggagttcaccgcagagctttctttgattttagccctgaatctcactctgcctcttgactgtgtatttctgacaggtgcagagcaggcaggagaaatgacagcatcatgcagaatgtaagcagatgcagtgtcgtgcgccactgtttttcctgctagtgtccctttgggttacagtgaaatcacctagcaggacaagttttattcttttccttgaaggagtcactgtggacatcattcatccccccattccatgtctaagaggattctaatgatttgactatcttgattcctcccattccaagttttggggtaacactgtgtcccccactactgggaggtccatcagggtgtccctgaatgttagcagcagaggatagcaggaccagctgattgccgtgagtgcagcacaatgcgggtcagcttgcctccgtttgctcagttgcaggcagttctagttccaaggtgagtgaaatgaacaactgaggaccaggaaaataaatctcttctttctgcattttaaagaccagtgaatacgatttccaaacctgagctgctggcccctgccaattcctttgcgtttggcgtgagttttaatgggcacccagagtgtcgttgtctctcgcaagttttttgcagagtatccaggtgatgcctccagagaactccacttgtaaaacctacagtgtccccacttgcaacactctagagagctggtccactcagacactttttgttcggtggattctggaaggctgttagctctgagagggggacaagttccaggaaagatgcacatcaacctgtcaaacgttctgctggattgatggcatacgccggcatagaatggtgcccatggaacgacctgtgagccactcatgaaaggattctgaagtgcagcctgctgataccgagccacccgtgcggaagccatggtaaagttgaacagcagatgggaaactccaccgaaccttttattggccatatgtcacttctgagtgttggccaacaaaccaaatttgcagctaatatataatgatttaaacagctaaaagagcagctgcactttgatttctgatgcctttcctcccagctttcctagctcactggaatttcttaaactactttccttaatcctgtgcgcttcactctgaatcttcaccaggtggcaccatcttcagatggtggtgttgctggttctgttgttggctgcatccagcttagtgggtccatctctctgctccttctgccttgtaggcagttttctaacttctttggaagaagaaagtgctacacagcacaagactcaggtatgttcatatttctgcctgctgggctctttttttttctaagcccctttgatttccaagtcccaggcttccctggtggcccagtgttaaagaacttgcctgcaacgcaggagatgcagtctcgatccctgggaggggaagatcccccggagaacgaaatggcaattccagtattcttgcctggaaaattccatggacagaggagcctggtgggctacagttcatgggatcgcaagagtctgacacgtcgtagcaactaaaccaccaactaccacctgattacagggacgcttgcattctcttttggggtgcctgggctggtcttctgctgagcctgaagggctagtccttggagtagactgtgggagggcagcttgttctgatttatgaagacatgacctgggatggagcttctctggaaaaattcagctctcttactgtcagaatcatctagaaggaaatgattgatgtcaggaataagcagaacaggcctcctcttggctctttagtctctctggctcttctatcccatgtagtttaagtgccaagtctctactcccagccatggacatgctaagctggcttagtgcgtgaagcttcatggaagaagaggctccttgttataaattgagggttatatagttgtttctgggatgagtgtgctggaaactgccaggaaaggagagagagaacaatgccaatttaaacttgcatgcctgccaaccactaaacctgataactcaattttgggatagaagattctattgctgaagctgtacgaccataatatggctctacagttgtcactctaacgaactccagctcaggtttctgtgtattaattcctgcaaaactcagccacctccctaatgttattcaaaagactttgaacagcattgtgaataaaaattatcacagactacatcaaactcaatgatttctataacatctggagccaagcacattaaatggggagtgaaacgtacattcatcatgggtgtttgggtttgttttctgtttttacaaagagaggaagtaagaaatatctttcctatacggatttttagttatctgttcctgtgctaaactggacacctcatgaaagaattatagccttggtttctgtgtttatgggttgatcctctttttaggtctgattaagactttgtcctgcaggaacttcatcttagggaatttatccaaagaaagaactgctgtgtggaacaacagtgtacatggttaaccatcctagcgttatttatggaagcaggagattggaaacaacccaaatgttcatcaacagagaagagattaaattataatattattcatacagctgtatgaaagaaggacgatgttctgtatatacagagatggaaagaagtccaggacacttgttaggaaaggtcagatgcagaacacagtgtacaaaatgcatttcagtttaatccatgtaacatctgtctacacgttaagacactctgggtttccctggtggctcagtgataaagaatctgccatgtcaatccaggagacatgggttcaatccctgggtaaggaagatttcctgaagaaataaatggaaacccactccagtatttttgcctgggcaatcccatggaaagaagaggctggtgggctgcagtccataggttcccaaagaatctgataggacttagtgattaaacagcaacgacaaagaaactgtagaaggatacatagaaataggctaccaggagagcaagaacagagcccacagaagggaataaaccactcatttatttatttaagtcaaatatatttgacatataacaaatggtcctaaaagtgtcatatactttaaagtgtacaacatactgctttgatacatttatgtattataatggggttgctgttattatctatatttatcacagtatgtagttatgctattcctgtctatattcattctattgcacattagatcactatggcttatctactactctttgcaagcttgtagccttaacatctctcctgttttccagtgaccaccatttttttgccctatttttcatgggtttgactttattaggctctgtatataagtgatacagtacttgtctttaacttacttcacttagcataatgtgctcgaggtccaagtggcaggataccctcctctctcacagctgactaatattccattgcgtgtgtgtgtgtgtgtgtgtgtgtgtgtgtgtgcattttaatccattcattctttgataaacatttaggttgtttccatatctttgcttttgtgaaaaatgttgctataaacatgaaagtgcatatatatctcttcaaaatcctgtgttcatttttctggatatataaccagtagctgtgcagttcttaagctggcttttctgtccactgttctgaagcagattttccttactgatccccctagtatgtcctaaatgccaaactctcaacctccttgatgtcactgactgccgtggaccatacattcttccagaatgaggtaactccagttatggctatcagcgattctgccgatccttacctctgtgtgcatagaatgcctgttaacctttatgaacttcagcagacacagagaagaaaggagggagctagtatttctgagtgttagctatcttttaaaagaagtatctcttttaatcatacaatggcattatgaggtgggcactcattctctccatttgacagatgaggaaaccgaggctcagagagcttaactgactagcctcaagccatacaactcctaggtgatggagcaagatctgaacctcagatagctggtcactgaagcgagggcccctggggaggggcaagtgcaccagtgctttccttcaccactctcttcccttctctctgactctcaccagactccttctttcactacttgagccactgctcattttctcattcctttgctggcccttctttcttcttctcctcaaacaagattgtctccaaggtctgtcctcatcttcctctctctagctaatcccactttccaggagagttctgactctcaatcctattggtttcactttctgggcatttatttccagttacttgatggacgtttccacctggacatcttgctggaccccaaaagccagtatttcccaaaccatatagatcatttttctgttcatcattggattcttttccttcttatcatttcctgataatactaccccaacatcatcattcttaagctcaaagccttagagaaggctttgattccttttttttttttctccctggcttccagtttctaatatagaaaaaaattctgttgttctgactttgactgccttcctatataactcagttgtgcattaaatattgcctggggagtgatctcttaactgaccaccccaccttcagttttgttcatctcctaactatctaactagctgacaaataatctttttatataatatgagactcataacattttaagaggaaaactttcaaatgctaatgagagacacacaccccaaaaagacttcataaatggaaaggccaggagcacaaattattataaagctgccaattcttctgaaattaatctacaaatttaatggggctttaataaaaataccaatatctgagaggtgttatggaaaataagtatgctagaatactctaagataattctgatatggagaaataaaaaatcctaaaagatattataattatttatatatatacaatttatattatcattaatatagttaaacccatgcaggaataaacaagcagaacaatagacaaaacagaatcagaaattgaacccaatgtttttataagaatttaagatttgatagatggggaaacagtggaaacagtgtcagactttatttttgggggctccaaaatcactgcagatggtgattgcagccatgaaattaaaagacacttactccttggaagaaaagttatgaccaacctagatagtatactcaaaagcagagacattactttgccgactaaggtccgtctagtcaaggctatggtttttccagtagtcatgtatggatgtgagagttggactatgaagaaagctgagcgccaaagaattgatgcttttgaactgtggtgttggagaagactcttgagagtcccttggactgcaaggagatccaaccagtccattctgaagatcagccctgggatttctttggaaggagtgatgctaaagctgaaagtccagtagtttgtccacctcattcgaagagttgactcactggaaaagattctgatgctgggagggattgggggcaggaggagaaggggacgacagaggatgagatggctggatggcatcactgactcgatggatgtgagtttgagtgaactccgggagttggtgatggagagggaggcctggtgtgctgtgattcatggggtcgcaaagagtcggacacgactgagcgactgaactgaactgaactgaactgaagatttgataaagtttgcctgtcttaatcagtgggaaatatttacagttcagtaaatggtattaggacaattgggtcagttcagtcagttcagttgctcagtcgtgtccgactctttgtgaccccatgaatcgcagcacaccaggcctccctgtccaacaccaactcccggagttcactcaaactcacgtccatcgagtcagtgataccatccagccatctcatcctctgtcatccccttctcctcctgcccccaatccctcccagcatcagagtcttctccaaagagtcaactcttcacatgaggtggccaaagtactggagtttcagctttagcatcattccttccaaagaaatcgcagggctgatcttcagaatggactggttggattgggtagccacttgtcaaatatataagttgtatttctcctaagtctttataccaaaatgagtgccagatggactaccaacatgaaagccaaactatcaaggttgtagggaaaaaaatggaaaaaattaatattcttggaatagagaagaaatgtctaagcatgataaaattcaggagacataaaagaacatataagtttggctctaaagatcaaatatttccacatggtaggaaactacaaattgagttaaaattaaaatcataaacagggaaaaatatttgtaacaaacttgtcagacaaagcactgaatctattaatatataaaggacttatgcaaatcaataagaaaaagatcaacactcttaatagagaaattagcaaagaacatgaaggaatctatcacaaaagaaaaacaaatggtacagatagtttaaaagatacttaggttcccacatagtaagtagatataagctaaaactgtatttttcacttaatatccaaagtttcttaaatgtatttttgacaatttattttcaacaagggtataggaagacagacatttatacatttttgaggtatgtaaattgatgccacctctaaagacggcaatctcagaatatttatcaacatttaaaatgtgcataccctttcacacatcaattccatgtttaggaacttctcctacagttacgtttaaggttctgcctggaggaaaaacataaggatatttactgcagtgttaagcataatagcatattttaccatctcaaaacagaaatgaaaaaatagtaaagcttgtttaccctgtaatcctctgattgttccccatcagttattgaaattctcctgatctggccccagcatactttttctaccttgtatcttgctacaccccttacacttggccaaatgagcactctgtttgccctgccccttcactgtctctgtacctctctttgctgatcctgtttcctgttccatgatttgcactgttcccagcctctcctttcttccacgtgaatcctgactacctttataacctgactcacatgctatctttttctgaagatatccttggacactggagcctctatgatttcctatacttagtcgaaaatttctacctgttctgacttttttttttttttggcttcccataaagttgctttagattctaaaccaaagcagagagaagagacgacacccaagttaacccagccactagtgagttgagacctctctcccggaagtgcctgactccacccaccggaagctgctggcagggcggggcgtggggtggagtgcgggtggtccaaggccccaaggcgctgaccccttcctctgtcacctccctgctcaccttctccccggtctcctcctccttctggatccagagcatcagcttagcagtactgtggccccccgggcatgaccgcaggcagggcggggccttccccccaagcagaggaagtacagggagaggggcccagggccggcagaggcaccaagaacccacacggtgggagcagctgaggtaaagttcttaaagcttattcatggggacgtggtgtcagcaatcctcctggctcagctgtgggcctcagcttgggcctcgccatcctgaggtcgtggtggtagaagaagtctgagccctggttgagcagcggggggtcttcacgctgcagggggccggaggtgggaccttcacgccctttcacccagcacccacccttgtccccaggacctgcctcctgatgacgtctgcgtgctcccaggcctgccttcgccctcttctcatttcctgtgcctcccagaggcgtccaggttggcaggtaagacgatgttgaattcggtgagtatggagatgatgctcaggaggatgatcccatgttctgggcc

SEQ ID NO: 195 - DNA, 33813 bp, Hippotragus leucophaeus
  source 1..33813: mol_type = genomic DNA
tgacagaaaacaacacaattccgtaaagcaattatccttcaataaaaaaataaattttaaaaaaagcaggaggagaataaacagagctatgtcaagtatagaagaaaaatattgcactgctgtgggagagttagtaatttagaaggggcagcctctcactgttttaagtctagttaattgacccgatgtgtgtgtaagtagaaaacctgtgtccaaggaaggacagaatacttatatccagaaaaagtttagaaaaaatattaacccccttcatacttaacgtctacattgtagggctttattgtctcaaagttatgtgtgattgtgtgtaaatgtgtgtgtgagagagagagaggcagagtcagagagagaacagtacaaaggaagatgcctttaggaacacattcaaaggagccagggggctcccagctggctaatctccatcatgctttcctggcccctcccccttccttctcatcataacttgtgatcttagaggcatgaaagaatttgagccccgcccccagcctgaccgtctctgcgggccgtgcagccaggctccatgtcaaatccacctgggagcgcgaaccccagggccacggagaaggtggtgggcttgccggcaagttcctcgcccagtggccatgggagacaagagtgagcagtctgccctatgcacctataaatcccttgatgaggagggcctcttcggctctgcggagctgcccaaaagacccaccgggaaactggttatgcacagcatggccatgttcggccgggagttctgctatgcggtggaggcggcctacgtgactccagtgctgctcagtgtgggcctgcccaagagcctgtacagcatggtgtggctcctgagtcccatcttggggttcctgctgcagcccgtggtgggatcggccagcgaccactgccgggcccggttgggccgccggagaccctacatcctcacgctgtgcctcctgatgctcctgggcatggccatgtacctcaatggggacgcgatcatatcaggtcagtggactgctcctgataggctaggtaggctgggtgggagaaggtcctatttgcaactcaggacaaggagaaggcaaagttctttctgtgacagtcaaaaaatggttaaaactgattccttatcctaagttacatggaatttccacctttgtgtgccccagattctgtagttaggtgcctttacttttagaaacttcagttacattattttttaattgttgtgagaacttaaaaatgggattatatttttacctattttattatattatgtattgttacatgtttatcaattatggggttttatgtgtgtgcccaccataccttatttaggactttttcaaattaaccagctgcctaatggctccataaatttttccaataaatgtacctgtgtgtccaaagaagagttaatgacgttcacagctttatatggagtcttgtaacaggtatagggcatcgacctggcagctcaaggggacattttttcattgcaaatcatggacatagacctgatggagggcactttttctagccattaaacagccgccaattaatcagtaattggtggtagtatatactgtgttgaaaaaaagaattgttaaacttaaaaatagcacacattttctgaccattaactcccaggctagcagaatggatgataatgagccgtaataatcagttatcatctctatatatttaaaagtgggtataaatctataaaggtagtatatttctggaagaatttatttaaaaaaaatacctgaaaagaaattttgcctctaaggaaggatgccaaaggcctgggagtgagagggggaagttaagcttgtttttcgcttatttttcgtactgaatttttaaaatcaggtgcatatagtacacattttcttaagtttaaaaaataaactgaaagcacgagaagtagttatgagggcgtgaatgaacagtggtattgtcataggatgaatatcatttaggtgttaaaactgtgacattgctcttcatccactgaaaggcaaagatactaagagagttagttaaggatgctcacttacaacctggtcccattagtcagtgctcctccaagccaagccctccagcctgtggcatcagcctcactgcaggctgatagagatgaaaattcccaggccctaccttccacctattgaggaatcataggagactcatggtaggtgaggcttaacaatgttttaacaggtcatcccggtaatggttaaggagctaaagtctgagaagcactgcatgagggcacagatgcacacctctctctatttttgtgcataaagggatgtctgaaggatgaccatctcttgggcctgggatcttgaagtatttccccagctttcctatatggttggagtggttgacagtcagtacatataattttttaaaccggtttatttaaaagagagatgattcacataccataaaagtcaccatctaaaagtgaacagctcagtgcttttcagtatattctcaaagttgtataaccaccaccactatctaattacacgtttcctctctgccccccagcagaaacctggtagccattagcagacactacccatttccttctcccccacagtcctaggtaactgctcaatctactttctgtctccagagagctgtcttttctggacattcactgcatgatttttaaaacttgaaaaaataatgaagccattttttatttggaagagcaaacacaacgaaaggatagggaggtaatatgatgacaggaagtttgggtagaaataaaaatgtggctcgttctaaaccaggatttaggagaccaatggttgtttctcttttagctttgattgctgacccaaggaggaagcagatttgggccataagtgtcaccatgataggtgtggttctctttgattttgctgctgacttcattgatgggcccatcaaagcctacttgtttgatgtctgcactcatcgagataaggagaggggcctccactaccatgccctcttcacaggtagggaatatccagaaagtctatgcttcagctctccgggcagggaagcccttccactgaagccatccagtgtctcagcactcagattttttgaatgaatggatctgttgatgcatcgctcccatcacgcgggctgtgccttccagggcgttcctcttgtgaccaggctgtggagtttctgcaaaggaagtttgtaggagagctctctgaagagccatgtgtggagacatttacaaatgaaaagaggccttgtagacttcatattttgttttttagtcagtaatgtgtagcatcaacattatttagaagcttgcagcttcttgggccctcttcctgttattttaattcagcaggtttggggtggggcctagaaatttgcgtttttaatgactttcccagatgattctgtggcaagtgtcccaagaatcacatgaaccacatttaaaaacagaaataggaacaaaccaagcaaattaaaagacgtcttagagacgtcttcttcttcttttttttttttaatttggctgcactgggtcttagttgcaacaagcagggtctttagttgcaacatgtggaatctagtttcctaactggatcgaaccccaggcctcctgcattgggagctcaaagtcttagccattgggccaccaggaaagtcccagagatttcttagttatagaaagagttagcaaatcctcaacctcctgttttggaaaatgccatgccaggaggacacttcttggggccattgctggccttctttggtagctgttgggcccttcatgtagagcaatgctactaacgttcaacatggatttctagagctccgtttgttgttgttcagtcactcagtcatgtccaactcttttcgaccccataggctatagcatgtcaggcttccctgtccttcactatttcctggagcttgctgaaactgatgtccatcgcgtcagtgatgccatccagccatctcatcctctgttgtccccttctcctcctgccctcagtctttcccagcatgagggtcttttccaatgagactgctcttcacatcagatggccaaagtattggcatcagtccttccaatgaacattcaggattgatttccttcaggactgactggtttgatctccttgccgtccttccagttgggactgttctaggattggggtgtcatccacaagacaacagcatgatcctgtcctgggagcattgttaggtctagatgtgaggactttatttgattttctccaaggcccagccgaggtatttttattttatgttttgtttcctcccatggtcaagtatgtcccacaagaaacagaatcttgaattttgttcagattatatccccatagccaaaagcaggccttcccacagaggccatttggtcaacaatttgttgtttgtgcagatatttgaatggtgaacgctgggaagaatggggctgcccggcagagaggggcctggaggagcgggagaccagcccatctgtctgggactcctgaacactgtctgccagctggaaagtcccagaatagagatttaaactgcattctcctaacttaaatcccataattcctactgctgtatcagaatctgctgaaattaattatgatattgtgggaggctttttggcttttgaacctgacacgttgagagttttgttgctctaagtactttgggcaatgtggtcacttcttcccagcttatatcagtgttagtcttggcctaacaacctttgttttgctgcttctgatattaaaagactgagctctgtattttgggaacttttccagcgttaatacatggtagtatttctgttgagtttgataaaatgtcttgaggttatcttttgatactagtgtattgtggtttcagcaagcatataattcatgtgtaattttcatgtgacctcatttcaggctttcactgtatcttgtctgagctttcatacttaccctttaactgattttccagtctctaattttttcctattccaattgtgctaacacacggcttccagggtcacattcctaaaagacagctctgaccgggacactttcatgttcaatgatccgcagtggctcctgttgacaaaaaaaaataattaattaatcaatagtcagtttaagaaagagagaattttattcaagtcaacctaaagattataaattgggaaacagtctctcagagagctcccagaactattcctcccatcagaggtcaaaacacagttaaatatgagacaaagtgttatacatctaatgacgtgctgacagtttatgtagtccaggtctgtacatacaaggcgagtagtgggtcatcgtgaccgcttaaaggattgagagaggactgttatctgctaaggagttcccttgctggtgccaggagaaagttgctgccatcaaggaagtatccctgtacttctatggctgtggtctcattaatatgttaatataatgcagatgcatgttgcacactccaggggagggaggcagcccaaaggggaaagtgttatatttaaatctaggcccagcaattccaaatgttttcaaataagtgtcagagggttcactgcgaaaatgttctccagcatgtttctgatttttttttttttttaaaagaaaagactctactggcttctgggaattttagtcctccaacttcttctgtcttatatttaaaggtaactctacctgccctccacccgtggtgtatgggatagccatgctgggtttaatggatccatctcatcccttctggattccctggtagctcagttggtaaagaatccgtctgcagtgcaagagaccctggttcacttcctggatcaggaagatcccctggggaaggcataggctacccactccagtattcttgggcttctctggtagcttagacagtaaagaatctgcctgcaatggggaatacttgggttcgattcctgtgttgggaagatcccctggcagagagcatggcagcccactccagtattcttacctagagaattcccatggacagaggaggctggcaggctacagcccatggggtcacaaagagtcagacacgactgagtgactaggcacagcacagcctcatcccttcacctcttgcctttacctctgggtgcgcctgggactgtggaaccctcactcaccagaaagaaaggaaattccttccttgagtcagaatgcttgtaactgagcatctgttgctattaataaattaacccgaggccttgctctcctgaacagtggtctctgttccacccaaggaggctgggatgagggctgatgatcagtaaaggttgtcccagttcaaatcctggctcctcctcctgcccagtccctagtatttctgaacttttgtttcttcacagggttgtgaatctatccactgtgttagttattaatatcctggcaatatattggggcttccctcatagctcagtcagtaaagaatctacctgcaatgctggagacctgggtttgatccctgggttgggaggatcccctggagaggaaaatggcaactaactctagtgttcttgcctggagaatcccatggacagaagagcctggcaggctacagtccatggggttgcaagaattggatgcaacttagcaactgaatcaccaaccactgccaccattctggcaaatggtcccaagcaatggttcctgagcaaggaaccctttaataggattcagcaccaaatgcatatatttactgtatattctccattcccaccaggtttgcaaaacttgtctttgtttgtaatgacttggtaaggaactcaccccatgtgcatctttggaagaagaatgggtaacgtgttaggcttagcttcttttgacttttctgtttctttaatacttcaaagtttgcataaaaattgcttgggaaacaaatactcagactagaaataattaagagctaaaaaaagaaccctaaaaatgtagtttagatacgagtccctttgaccaaatgtacataagtggaaaaaggctgtgtttcatggtagagtcgattttaactcctccttcaggactcattgctgcatgagtggatttctttcattagctgaggttcctttgaagcttctgcccccagtgaactttcatgtctcctcactcaggcaggaaaggatgtggccagtgcagaaaccagggtacaggaatttcagctttgagggtgacatgaataacttcgggcaaaacagataaggtctacaaactgccatttcttatcccaattcaacacctacctctcaaggaatctcaaagacaggttagagatgggagcccctgaggacattttttcatttactgaatacttgtgtatgtgcttaatcactcatctgtgtctgactctttgcaacctcatggaccatagcccaccaggctcctctgtccatggaattcttctggcaagaatactggagtgggttaccattcccttcttcaggggatcttcataacccagggatggaacctgggtttcctgcagtgcaggttaattcttcaccatctgagccacgagggaactgtctaccagaaatctcttccccagataccaactggctggcttggtttgcttcctctctttgttacaatctctggtcacataggccttcctcagtgattcatgattacttgataatatattatttattcatttgtttattgtttattgtctgcctctagagctaacatataagctatctgaagacaggaatatttcctgtttgttccaaaatcactagtgcttagaatagttttggaaatatgctgaagaaatattgatgagacaaatattctattttaacatcctccttttatctgtgaggaagctgtgttgctgagaggtaagtgactaactcaaggtcacacagctggatgtgtgtgctaagtcacttcagtcatgtccaactcttttcggccctatggaccatagcccaccaggatcctctgttcatagggttttccaggcaagagtactggagagggtggccatgcacttctccagggcatcttcccaacccacagatcgaacctgggtctcttatgtctccagcttaggcaggcatgttctttaccactaccaccacctgggaatacagctagtggaagatattgaatcaatctttatgtctgaaatgcaagtgaatccccaacccaagggcttccctcatagctcagttggtaaagaatctgcctgcaatgcaggagacccgggtttgatccctgggtagggaagatcccctggagaaggaaatggcaacccactccagtattcttgcctggagaatcccatggacagaggagcctggcaggcatcagttcatgggcttgcaaagagtcaggtacaacttagcgactaaaccaccaccccaacccaaatgtaatttaattgtgtctgtgttgagcctcattggcccaggatggtgaaaacttagtgtcagtcccttcagaatactctcctacacttttccctgagtcttgcatctaaaaactgggagcttagagtgaaaaagtttcaggcagcaaggatctgggtttcagtatcatgtgttctcactggcatttactgggctgtcctgggtcccgcgtttcccagttgtgaggctgaactggtcacagtcgcattctcgctcatccttgtccacaaggaccccttcagaacccccaggattctcagctccccaccaccctcgtggcatcctgctcttccaaggccagaggatgtgaggtgggctctgtgagctgcaaactctccatgctctagtttccttgtctctaaaagagaggtggaaatttagttgagccttgttattcagggattccatatttgtgaagtcatctgcttactaaaacttactggtaccaccaaaatcaatacttgtagctcattctccaacatttgaaagcatctgcagagtggaggaggaaaaaaacccaatgtgactcacccagtgtgcttgctcccagctgtggttaagcaaggtgacactctgccttcttgttttgatacttacactgtaaacagatgtcctttttgtgatatatttagtgccatttttgtttcttttttcttggttatttcggtatttaaagtggctccaaatgtgctgaaagcactgctttgggtacataagtgcaagaatgttatgatgtgacttctggagaaaatatgtgtcctaagtgttgttccggtgtgagttacagtgccgttagccacaggcgattcaatgagatatctttaaacagaaacgcatgtaaaacaaggttctgtgttgttccactgatgaaagtgaagacttgaggctcacaggaacttaatcctcagagcaggagtttactattcaccaattcagggtttttggaacctttctggaatgtaactactgctaatagtcagatgcagcggtagtaacttcctcaaagggctgttgagtgagttgtaaacatcaagcacctagaacagagcctgacactagggttcatctatctccacccactgcagagcccttgctcccttgaagtctgaatgtccccctggggtcttcctaggaaataaagtgttgatcccttctgctcttgggttctccaagccatctgggaggttctgctccccaccccccatcctcccatcccagcgaggtccaaggatcgaggagaagagccactacagctttagggacacaccaagtcacccttcgtgaatgctttgcctgccctgggaagccttgttcttaaatctttttttttttttttttactgaatctgttgcagtaaaaaggagaataaaggaatgagtttttcctcttttcctttcctgagaaagtgaagtcgctcagtcgtgtccagctcctttgcaaccccatgggctccatccatgggattttccaggcaagagtactggagtgggttgccatttccttcttcagggtttctacccgacctagggatcaaacccagggctctctcattgtaggcagatgctttactgtctgagccaccaggaagtccaatgaagaagataaaagagaatagtgagcaggcctgaacattcctaactgttcctaactctgcatgtctataatttcagattgcttttctgccccctaactctgcaggagctacatttcacaccgattttacctttgaccttatgctaaatacatcctgcatctagtttttacccttacaacacccttccgtttgtacttacatatcagagccaccaaactgccagacccaattactgggttactgacaccagactccgactgtctttgaaatagtgcaaagatcctaacacctttgttcctcatccctgactcctgactaagcccctagactcccatggagagggagcaatgttcttgaggcatgggcctattgtctttccctctctgccggctgagaattaaagccacctccctatttacgccatacttggtctccgtattttttattcagctccggtgggctaagagagccaaggttttggccaacaacaaatctaccatcagtgcctttggagcctaagggcatctgaaactcagaagcaaggagacacgttcttatttctctgctttctactttcatgttcttccccaaaagcaatgagcctggctcagtttgaacatgaaggaagggcccagggaaataccagggcagttgtggttggacggaagccgtggtcagcactttaaatatattttctcacatctcttaggagatgagttgcctcgcaaatctcaagaaatgtcaggtcttggatactcagtctctagaagggaagtcatgtttgcctggttcattgctgtgtctgcagtgcccagcgcagttcttgatgagagtaggtattcccgtccatttctattgatttaaaaaatatctctcatacacacacacacacacacacacacacacacacacacaccacacacgcacacacacactcctagtagctggtacttatattaactctctgggattttgtgtgtatgtgtgtgtgtttggtgtaggtaggaactaatctgataccttcattgctattttctcaacatatagaaaagaattggaaggacttttccatgaaccttccaggaatgcaggatctttcatctgtccccttgctgaggcactgaagccggcagcacactgataactctccccccttgagctctttctccattgctgttgaagttgtttagtcacgtggctgaagcagggaaacaattacagatgtgtggtaggtgccgagtttgactgacagactctctttagattccttggtcctgaaactctcccagtttccagttttacctattacatgttgtgttagtcacccagtcctatccgactctctgtgacactgtggattgattgtagcctgccaggcttctctgtccatggaattgtctaggcaagaatactggaatgggttgccattcccttctccatggatcttcctgaccagggattgaacctgggcctcccacattgcaggcagattctttaccgtctgagccaccagggaagccctttacttaatatacttgtagactacagaaagaaataatacatatttccgtatgcttggacttcttccaggaggagccattgtttaagctatatcattagttatgaaatacaatgctgagccattcattccagggagttggctctgctgtgagtttgacatcacagcctggctctgtcaggctaggacaagagccagctcaacccttctttttgcagaggctggttatttaatgtggtggcagatgcccttgagatgttccagcttatcatccggccaatagcctggggactgactccaagagccccaggaaggctgatgttggcagtagagataaatgtaatcttgatgtaaacaagatttgcgtgggagttgatgttagcctttgttggaactttgataactaggctttgtttaggagactattttgaaggtaaaattcttagtttacgtggaagatgttaaaaggaaagcattcagtaaattcctacagccctctgctgggcctcatcagatctgaaggtgtgaatagataaatgtttccatccagagttttaagatgctgcctagtagaaatggcatcccacttcagtattcttgcctggagaatcccatggatagaggagcctggtgggctacaagtccatagggttgcaaagagttggacactactaaagcaacttagcattcagcatggccccactattcatcaaggcgtactgttacaagttttagctgtgtcccacagtagtgctgagacaaatgaattagtttttcttgttttgtttgttccccttgcctgagagaagagaggattggaaaattttttaagatacgtgaggcatgttttacttaactgattagtggaggaactgattgggaagacaaagaacagtttccccaagttctttcaggataaattgtgtgtgtgtgtatgtgtgtgtgtatttagcaaaagaaagaaaaatgctatattagatacaaatctgattaacattctacaaggtaatataactgtagctcctctgtaatagtcctaccaggttttgaaaatatggttacaaaccttattaaagtctgcaaattatccttagttttacaggattgtacatcattgtgctttatcagttgtggcttgttggtcagtgacaacaaagtctcattcccaagaatatcagataagggtggtgcaggttgcttagaaattgctctatcccctgagcgctcaaaaagtgatatttggactaacagaggtggattgtcactggggagcttgaaaggaatgcagagtcttgggttctactaccatctttaaaatcagaaattatgttatagacttccctgtggctcagacggtaaagtgtctgcctataatttgggagaccttggttcaatccctgtgttgggaagatctcctggagaaggaaatgacaacccactccagtattcttgcctggaaaatcccatggacggaggaacctggtagggaacagtccagggggtcacaaagagtcagacacaacagagcgactacacttcacttcacatgctatagattgaatgtttgtgtccccctcagaatccatatgttgaaaacctcatgcctaatgtgatgctgttgaacacagagtgcctgatgaactatggatggaggttcatgacattgtacaggagacaggaaacaagaccatccccaagaaaaagaaatgcagaaaagcaaaatgactgcctgaggaggccttacaaatagctgtgaaaagaagagaagccaaaagcaaaggagaaaaggaaagatatactcatttggatgcagagttccaaagagtagcaaggagagaaaagaaagccttcctcagcaatcagtgcaaagaaatagaggaaaacaatagaatgggaaagactagagatctcttcaagaaaattagagataacaagggaacgtttcactcaaagatgggctcaaaaaaggacagaaatggtatgactctaacagaagcagaagatattaagagagggggcaagaatacacagaagaactgtacaaaaaagatcaacatgacccagataatcacgatggtgtgatcactcacctagagctagacatcctggaatgtgaagtcaaatgggccttaggaagcatcactacgaacaaagctagtggaagtgatggaattccagttgagctctttcaaatcctgaaagatgatgctgtggaagtgctactctcaataggccagcaaatttggaaaactcagcagtggccacaggactggaaaaggtcagttttcattccaatcccaaagaaaggcaatgccaaagaatgctcaaactaccacacaattgccctcatctcacatgctagtaaagtaatgctcaaaattctccaagccaagcttcagcagttcatgaaccacgaacttccagatgttcaagatggttttagaaaaggcagaggaaccagagatcaaattgccaacatcctctggatcattgaaaaggcaagagagttccagaaaaacatctatttctgcttcattgactatgccaaagcctttgactgtgtggatcacaataaactgtggaaaattctgaaagagatgggaataacaaaccacctaacctgcctcttgagaaacctgtatacaggtcaggaagcaacagaactggccatgtaaccacagttcagttcagttgctcagtcatgtccgactctttgcggccccatgaatcgcagcacgccaggcctccctgcccatcaccaactcccggagttcactcagattcacagccattgagtcagtgatgccatccagccatctcatcctcagtcgtccccttttcctcctgcccccaatccctcccaacatcagagtcttttctaatgagtcaactcttcacatgaggtggccaaagtactggagcttcagctttagcatcattccttccagagaaatcccagggttgatctccttcagaatggactggttggatctccttgcagtccaagggactctcaagaatcttctccaacactacagttcaaaagcatcaattcttcggcactcagccttcttcacagtccaactctcacatccatacatgactactggaaaaaccatagccttgagtagacataccgttgttggcaaagaaatgtctctgctgtttaatatactatctaggttggtcataactttccttccaaggggtaagcatcttttaatttcatggctacagtcaccatctgcagtgattttggagccccccaaaataaagtctgacactgtctctactgtttctccatctatttcccatgaagtgatggtaccagatgccatgatcttcattttctgaatgttgagctttaagctaactttttcactctcctctttcactttcatcaagaggctttttagttcctcttcactttctagcataagggtggtatcatctgcatatctgaggttattgatatttcttctggcaatcttgattccagcttgtgattcttccatcccagcgtttctcatgatgtactctgcatataagttaagtaagcagggtgacaatatacagccttgaagtactccttttcctatttggaaccagtctgttgttccatgtccacttctaactgttgcttcctgacctgcatataagtttctcaagaggcaggtcaggtggtctggtattctcatctcattcagaattttccacagtttattgtgatccacacagtcaaaggctttggcatagtcaataaagctggttccaaataggaaaaggagaacatcaaggctgtatattgtcatcttgcttatttaactgctatgcagagtacatcatgagaaatgctgggctggatgaagcacaggctggaatcaagattgccgggagaaatatcaataacctcagatatgcagatgacaccacccttatggcagaaagtgaagaggaaataaagagccacttaatgaaagtgaatgaggagagaaaaaaagttggcttaaagctcaacattcagaaaactaagatcatggcatctggtcccatcacttcatgggaaatagatggggaaacagtggaaacagtctcagactttattttttggggctccaaaatcactgcagatggtgactgtagccatgaaattaaaagacgcttactccttggaaggaaagttatgaccaacctagatggcatattcaaaagcagagacattactttgtcaaccaagatctgtctagtcaaggctatggtttttccagtagtcatgtatggatgtgagagttggactgtgaagaaggctgagcgccaaagaactgatgcttttgaactgtggtgttggagaagactcttgagagtcccttggactgcaaggagatccaaccagtccattctaaaggagatcagccctgggatttctttggaaggaatgatgctaaagctgaaactccagtactttggccacctcatgcgaagagttgactcattggaaaagactctgatgctgggagggattaggggaaggaggaaaaggggacgacagaggatgagatggctggatggcatcacgaactcgatggatgtgagtctgagtgaactccgggagttggtgatggacagggaggcctggtgtgctgcaattcatggggtcacaaagagtcggacacgactgagcgactgaactgaactgaactgaggaagtcattagcacactcaatttgaaacctggttttccggtggctcagatggtaaagaatcgacctgcaatgcgggagacctgggttcgacccctgggtcaggaagatcccctggaggaaggcatggcaacccactccagtattcttatctggagaatcccatggacagaggagcctggtgagctgcagcccaccaggttgcaaagagtgagacacgactgagagacagcacttcctgcttcctgccttctgccgctatctgtgctgttgctttacacgtattgtcaggttaaccctcatgagaccctataaggaggcatcactacgcccacattcagagaagtgcccaaggtcacgtggttagaaaacacacaggtgggaactggaatcagcataattatcaatcctcccttccatgtggtctgctgtcagccactgtagcctgcagttctcttatctaattcaactagaccagccgcaaacatccttccacctctaaaatctgtggattccttgatttagtgaactcttaggagcttcgttgctaactaagaattctataataattagcaatactaaactcatcaaagctcctctattctgtttgaatatctagctcacagttctagcattatttgttacagtttttatttttttaagtagctgtttgtttatctgcttctccttggaactatcttctggggaggagggaatgggggtgttgtgtcttatttatgtttatatccccagaagccagtagaggttttctacataaatttagtactcaaatatttattgaagtacatgacatgggtagacacaaaactagactaggaaaccctccaattgtagcactcaagtgttcaagccaatatctaatataatccaccattatgattatatccttatatttatattcataaaataaaaccaacattctatttgcacagtggaaggtttatttcacacagcagttctttcaaatgaacagaggtcttctgctctgtatttcctctgctcagtggaagaataaatttgaagaaaagaggcatacacgataggagaacttaatggcagtataacaaccactgatctagtcacaaatggtagttttgagaaaagaatgtataaattttgcatagggtcagttaagatcaagggttctcagttggtgcccatttgtccccctgggggacattagacaatgtcaggagacatttgtggctattaactagtggagaggttgtactggcatcacgtggaggaggccagacatgttgcaaaacatcctacaatgcacagaacagcctccaacaaagacttatccagccccaaaatgtcagtcatgctgagactgagaaaccctggtctagacagaccctccaatagagctaggcttttactacattttgtttggttgactgcttggctcagcacagggcctctgacatcctcggcatctccatgattgaataaatcactgtctaatggtgatccattgcatcacatgtcccagtactgccccctgaaccagcaacaatgtgaccacctccaaggcttccctttcttcctggagcctaccagggtgcctaccatccaaacaggtcactctatgtaccatttatctgtttaaacacatgcacctcacccataactagactacatattccttgctagcagagaacatatgttgttgttgtttttctcattgtaacccattggccactgttccccataattctgccttaaaatgctttgtcactcagggcatgacaatgatgtgcttggaattcaggggttaaacatttgttcatctgtaaatactgggtaaattgcaattagacagaatgtgaggtgactagaatcatccattcttccaacattctggataaattaggattcatattacttggcattcagatttgtgttcctgggataagggtttaggtaagtataaatgtttagggtttgagaaaaacttccttaagctctgttttattccctaattctctgatttgtaagaatattatcttttttaggttttttaaacatttttcatttatttatttggctccaccaggttttagttgcggcttgaaggatcttcaatcttttttgcagcatgtgggatcttttagctgcaacatgcaaactcttagttgtggtgtttgggttctagttccctgaccagggatcggacccaggctccctacactgggagagtggagtcttagccactggaccaccagggaagtcccaggatgttgtctttacctgggagataaaatggagacttcactaacacaagaaaaagaaaaacaaacacaaagctgatctgactaggtagatagatatttctctttggtaagacaggatggaaggttgatgtttaaaggtatttgcaggaggatcagccctacgcttcgttgtaggtagatgtgtttggcatccatctgcttactcccctggacatcctcctaccctatgctatgctcccaccgcagcccagcactctcagatgtcactggtgccgacggccaggcagaccatctgaaaagcacttactacttcagtattgagacctgcaatagcttgtctgtaccaggagcacttgctttttaaaacaagaaccccaaagaatgaatcactaatggcagaatttcaaatgttatgctgtacgggcaggatcatttttgagaaatcccttctcaatgtccctcagatcacaccgtccctcagatcacactgtaagcaggtaaggcaagcaccagaaagacttcaggtcgggatcctgggacaggattacaagatttttaaaaattcatatttagggatttacctggtggtacagtggctaagactccatcctcccaatgcagggcagctggatgaaggaacaagatcccacatgccagagctaaagagttcaaatgctgcaattaaagaaccctcatgccacagtgaggactgaagatcccaggtgctgaaactaagacacagcacagccaaataaacaaataaatattttaaaattcatatttaaatttttgcttttattttttctgtggctatcaactggtaccaagcacctttagcttttgttttctattttatcttattgaagtatagttgatttatactatttcaggtgtacagcaaagtggttcagttatacaggtgctttttcaggttctttttcattataggttattacaagatatggaatatagttccctgtgctatatagtaggtccttgttgtttatttcttttatatgtagtagtgtgtatctgttaatcctaaactcctaacttgtcccctcaagtcacacctttaccttgccataggggaaagaagaaagattccaaggctgtttgatctttgcaaacttgtgtcaccctaagaaacttattaatggatcagtgacaatgcaataattatattttattgcaatcagaaactagggctcttaggagttttagttcttaagccatgttgggagtacagtttagaaaatcatgggaattcagatggtggcaatatttactaggtgcttactatgtgtctagcatattactttttttttaatcatcatccccatattatgaatgaagaagttcaagttcacagcaagtgtatactagagccaggccttgaacccacacatccagcccaggtgtcttagcctctccctgtgttacttctccaattataaccaggccacctctgctgtcctcagggaactttcccactgaagtagagggcctgcacatgatgagagagaagacagttctaattaatgctaatacaactccttctttctttgcaggtttgggaggtgccctcggttaccttttaggtgccattgactgggcccacttggaactgggaagactgctgggcacggaattccaggtcatgttcttcttctcctcgctggtgctcactttgtgttttattatccatctgtgcagtatccctgaagccccacttacagatgttgcaaaggacattccctcacagcaagcctcccaggaccttgccttgtcatcagacaaaatgtacgaatatgggtctattgagaaagtaaaaaatggttatgtaaaccaagagttggtgctgcagggaggaaaaaccaaaaatcctgctgaacaggtaaagatgcaagttcttttttatttacttaggaaaaatagtcttattctttccttgtgttcatgtttttaacattaatccttgtctttgttttgcttgattatttgatgtaaagagttttgttatcctcaaattgaaattctgtgaatctaccaattgaatctgcaaatgcccaggagctattatcccttggaattaaaactttacacctaatagaaaaatgtgtgcatttccctcttgtccttctgcttctgactctttgcagaccctcaaatcagggaagactaagctggctgtaaaatgttaggccataagagcaggctggaattatccatcctcaggctagattaggattataaatttgttattccaaataacagcatccccagttgggaactggaggaactaagaggctattgggatggagccttcattttattttgatcatacagtgaatagagaaaatagtagaatctaggtctccagagacctgctgagaccttggggctccagactgcctgtgggaaaacatttatactccctgctggtatctggtaggatggagcccctttgctgtgtggttctgcaaggcagcagcatgggatttatggaatagctacacaatggaagccatttgatcattagatgtgtgtgtttttgaagctttatttaagacataatatatcaggtagaacacacatatatatacaaaataaatgttttttcccattccctgagaagagaggattgaaaatttgccataaaggatatttacagatgaacaactgtttaaccatgaaattccaaaaagacagcatccttatcatgccctgagtgacaaagcattttaaggtggaattaaaggaaacagtggccaatgggttgcaatgaaaaaacacatatattctctgcctacaaagaatatgtaattatgggtgatgtgcatatatttaaacagatcaatggcacatacggtgtcccgtttggttggtagatgccctggtaggcttcaggaagaaggggaagccctggaggtggtctcactgttgcagcttcagaggacagttctaggacatgtcctgtgactagatcacctcaccattagtcaacgatgctctttattcaatcatggagatgccaaggatgtcagaggtcatttgcagaaccaagtgtttaactacgaagaattttccacaatggagattgtgggaaaagctacgcagacacagagaagaaaacagaaaggatatacacccaaaatgctcattgaaattattgtctttgtgtggtgggctaacaggtggtcttcattttcctttttaaacccttcagtgaattcaacatttctgtaatagacaagtattactttgaaaataaagcaaaaataatgtcagggttaaaggaataaaaccagacagtttaattaagataagtagatacaatagattatgcctgcctctttgccctctttgcatagactggccctcaaagagtcacccaacagaggctgtctcagtctgccccaaggctgttgtgatgactgaatgaatcaaatgtgtggaagtcttttgaaaggcataaaaccctctacaccattaggagaagaaatgcatcaaatacaattatcttgtatcagcatatgccacttgcacaacactgtaggctctgaatgcttctattatgtgacaaaaaataaaagaaaaactacatagggaaaaaaaaagaataatgtatcttaggctcaaagtcaagcacccaactgctattccaatagtgcatctggggagcttccagctgagcagtgggcatctccacagagtcaggtcctacctattcttgtttgtcaaagtcactactttccaaaatgaaggtggctgtgcaatttgagaactgggatttttttttttttaatggcaagaggcctgaattatttcattgttcaaactggataccataaaaatacatctctatttcttccccaccattagttgctcccttcaacatttagtctccttctgagggtacttttgtgcagctctgtctccccctcatggctctgttcatttttcatttataaatccatcattacccaatctccagttgacaaatgcatgcagtaaaacaactcccaacagctcaaaatcattgcaagggctttactaagggaactgatgagtcagtgaataagatgctagctgaattttcattctgagttaaaatatccagaaagactgaatatttatattcacagcttttacagaaaggcataattttgcagcttttatttattttggggagaaaggaaaaaattaggttaacaatgaaagcaggttgaaattatatataagaccaaagcataaattaatatttgaaatgaggctgcatacttgctggtcagattcactttttaaatttttgaatttttggaaagaagggaaagaaagatgaatcgcttggtctgagatatgaaaatcaggctgttattcctcagtctataccgttaattgtttcttcctgtagtcaagggaaaaagtaatagttctacattggatttctgctgtggtcaccatttatttagacaaatatcatgttctacatgcagaaaatattttttccttactccatagtaatgtctatgtatttttttaaaatactgagtaagtataaaaagtccatggagtcatggtcattaggttaaatactataaaatccacaaaataaaaaatcaactgtacaacaaccctacaatgagtgaatataatttcctgcatcaaagaagtaaaaagcattatcatagaagattaagaattataaaacaattttctcttatagttaaaatggaaaaatcttgggagactatcttgtaaataaactagctaagatccagttttattatgtcaagattcagaacaaatagaaatcagacagaaggaaagacccatcaccctgccatggttaatgtttaccgtctcagtgtcttcagggcagctgatttcttaatattcctgagatatttttcttctctcatatgataaggtattaaaggctgtttcttttacttcaaaacagttgtgtcaatagttcattttttttcattctctcaaagctactgacaccaataaattatagcctctggttttaacataatttaagtctaggttaaagaattggcggggggcatatgtattcatttcacatgtgtctagttttgtgtgtatgcgtgtgttctacaaagttctcacttctgactagactcagggctcatgtacacatgttgactgatggcaagatccagagaaataaaccgggaggaggtacctgacccagagcagggagctgattggctcgatgtagtaatattctactgcagcgtaacaaacgaccactgggtttagcagcttaaagccacacccatttataatctcagagttctgtaggtcagaagtctgggtgggctcagtcaagtgctctgctcagggtctcacaaggctgaaatcaaggtgttggtgtagctgccttctcatacagaggtttgaatggggaagaatcagcctcgagctcatgcaggtagagtctggcttcttgtgggtgtcgaggtccttgttttcttgctaattgatggccaggggtcagtcatttcctgggggtcacactcaagttcttccctgtggcccacttcaccttcaaaccccagcaattcttgtgtttgagactttctggcttccccttctgttcccagccagagaaaaatctgtgctttttaaacagttgatgtgagatttcattagggtcacccagataatctccctgttcattaacttgaagccaactgatcagtaaccttagttgcttctgcaaagtcgttttgccatagaatagaacagaatcatgaagacggagagtatagaggccatcttggaatttggatgaccagattttaagaatcaagagatctaaggattataaccatctagggggtcacttaaatccatgagcttcatccttatacagtggttctgtcattcaaagataggaagtttgatgggtggctcttacatcttggctcaaagcaagtctctttctagtcccttcgcccttatatcctcaaagccctgaaactgtgaagtatctgcgcatacataacgaaacccctcctatgagaacactccatggaaaccatggtgccatgcccagatggtgtgaccttgtgtgatcggctactaacagatatgtaacgtggctgtgtgctggctcccacagtgggctatgtgtctacactgaatgtcacacctgtttggtgttttattccagactcagaagacaatgaccttgagatcactgttgagagcattgaggagcatgccccctcattaccgctgcctttgcatcagccacctcattggatggactgccttcctgtccaacatgctcttcttcacagacttcatgggccaggtaacagacacgtctgcacgcactctttgtctcacacaccaatcactccatcagcacctgtggggcttctgagtacctctaggctgggcacagtaagagcagaagagagagtaccttccgggggctggcttatagacaagttccagagggaagtgtctacaccctgcacagttagaggacactatgggaccagtgctcgatcaaatacaacaaataaggaaaatttgaggtgagctgtagtggacacagcaggcttaataaaggaggggcagtgtgatttgggtcctgaagggtgagtaggaattggagagggaggggacggggaggaaacattccagttggagataggactggcatgtgtggggatgagtctgaagcctattggctgtaccagaataggggtgacagggttgcctaagtcaggtggagccagatggtagacaggaggagagatgttcaacatttgaaggatgttgtttagattggaggcagtaggcattaagtcctcctgagggtccttgagtggaggcgtgaaaggatgaaagggtgccacagtcctgggggaatgaggtctgtgcccccagcaaggggaagagacacagagcacatgagcaggggtccttaccaactcacacggggaactcagcggccccaaatatctttcttgcagattgtgtaccacggggacccctacggtgcccacaactccacagagttcctcatctaccaaagaggggttgaggttggatgttggggcttgtgcatcaactctatgttctcctcactttattcttgtaagtaagcctcctcctcttgagggtgtcttctgagggttctggtctagcagaatcttggattatatttttggtaaatatatggagatcaggaaaaccctttttgccttagaagagaccacatcaagtagccttttcccagtgaatcctgggtatcattctccatagcaattactttgtacttagaatcagggggctcctgatcaagatactttgggaaataagaggaaaccttggaaacaacatggtaaaatattggatgcatgcgggatcgtcacagtcaagatgattgattaacagcaggtctgggttctgctacagtgagatcaccaggggtttcatagatacacttatcaatctagacagaaaataggagggatggttagtatgataagtgacaaaagtaacataaaaataactttagctctgatcaatagggtggtatgttatagcagccctgttctagattgaggacagcttttcttctcaggcatcagctttccatgggatctattaacttcaccccccacctccaaccttggctaaatttatctatggggacactgtattcagagggatttctgggactggatttaactatgtccaaatggatgtcctctaattttagggcattacacaggctcattttgtgccagctaatttgtatggaaatctccaagtgctatacacattgagttaaatgaaaactcaggcctttaaaatgtatgcaggtccctcatttggagtggaaatttggaagcttcttccgtattgtgggaaaaatagctgatccgcagggcagaggtccaggctttggacagccccaggggacagcagggttatggcccaggtggaagcaggggaggcaatggaggacagtccatggtaccattcccaggggcatcatgctgtcactgaagtgtgcttcttgttggggaggaaagtgaatgtacacagtgtcccctagcctggcatttagccctttgcccagctaaaacacagctgaaaacctgttttgaggtcaagaaaatctctttaaagtatagcacagctggggaaaggggacctaatataagcctatccaagaaccccgtaatcataaaaccatagaattcattattttaaaatttatggtaaccaaacagtggtggcttgaagcttacgtttccttagcaaaaccctttttcccccttgttgtttagttgctgagccgtgtctgactctacaactccctggactgcatccaggcttctctgcccataggatttcccaggccaagaaaactggatgggttgccatttccttctccaggggatcttcccaacccagggactgaacctgcatctcctgcattggcaggcaggttctttaccactaagcccaccaggaaagccctttgcccaccatgggcttcccagatggcgctaatgctaacgaactcgcctgtgagtgcaggagaagtaagagacacaggtttgatccttgggtccagagtgtacaaattaagaagaagaagaaaaaaaaaaacttgcaggaggacaatttcaaatacctagaatcagggagcattagactgaaaggatttaataacttatccatctcactttgtgctttcaagatgtagagcaattatttactaccatcctcattcttttaagaggaaaatatttttctaaaagtcattagccttttaattttatgtcaattttaacttgttttcctcaaaaaatccctcccagggacccttccattatctaggttgagttcctacatgaatttcatggcttttgaaaattcaagagcatgttattttttaggacctttctacttaaaatctctctatacaagaatccctcccattttaatagtttttgaaagttatattaatgtataaacctgtgatattcctaagatggtgagttagaactaaaatgttctttataaaataccaaccagccctgcctaaagatcttcaggggctcccataagatagagtggaggtcctgaccttggtgctccaggactcagagtctggcctggctcatccttggacctcagtcactcccaagcaggaactctcccaatgacccacttcccagccggtctcacgtctgtgtgtttatatttgatttcttccacctgagctgctgtttctccctccgtacccagccagacccaactccagtatgcccctgtttgtgccatctctcaagtctttccctctgcactccaacccactctgggcagaatcagtcatttgcagcaattccagagtgcactagataaccctggattttggactcatcacataacactaggttgatgacccagaatgtctatccagagggactttggcagggcaatctggctgctgaggtaagagatgggggatggtgataaaggattgttttcaagctcctttcacactgccggtacatttagatcgatgagtgtagtcacactgagtactgaaatatagccaattgttcatagcatagactactgttcaaagctggggcctaaatcaaccatttctctccaaccctaaggagaggcaccatgttatttagtatcagaaacagcatagggcaagtcaacttggctgacagttattgatttcgcttcataaataaagcattctttgccagattttcaggcttggtagtgaagttagttgtgtttccaaatatctttttatcaccttttgccttcttcctggttggcccatctacttggtgagagcatttacctaatgaatattgatggtatctttcaggtactgagacaacttatattccattttctgtataaatgtaatgattaagcaaactagatttatattgcttttattcttagccttgacaacacccctccaaacatggcatgaatttaatagaggaagcaatgttgttcctttaacattttcagaattccaaattgataccaatgtaatacataatagatacaaatttaattcacctgcaatgcaggagaccctggttcaattccttggtcgggaagattcactggagaagggatggcctaccactcaagtattcttgggtagctgttgtggttcagctggtaaagaatccgcctgcaatgagggagacctgggttcgattcctggatttggaagatcccctggagaagggaaaggccacccactctagtattctggcctggagaattccatggactgtatagtccatggggttgcaaagagtcagacattactgagcaactttctcttcacatatttaatgcataattgatataacaataatacaaatggaatacagatgaggtttcttgtctatgcaatgtaaatccaataattatttgaaaagatatgggaaatttcactcttaagtaggcacatttctagcttctatcatttatctatctcctgggtacatctagcagcgtgaagcagaggaaagataaaactatggattaaaataaatgattaaaaaaggaagataaaacattcttagggattttccctaatgtggtgaaaaacataggaaaatattttaaagcaaaattttcagttttaaagaatgagctctaccatgagtcttttatgagcaagccaagtttacccgctttgaggagaccccagtggaaagtcaaccatattcagcaaagtctgtgtttttggaattatgatagccaatgttaacttgatgtcttctgtgtgcttggcatttggctgggggatttcacagctattttacttcatttgatcctagtaacaaccgccagcaaggattttactagttccgtttttctgatcaagaagctgaggttttggagaagttatagagcttgtccagagtatgagggtgccagcgatggggaggtgcctggcacaggagggtcccctgactggactgggaagggctggtatgtcagggccagtgtctgcaggtgatgtggttctcaggttgtggagacagcatttgggtggggtggaaaaactgaatgattcagcttattccataaactctggttatgttcatttcctccaacctgactttgggtcaagatagacctggattgtcattttggtcctgctgggatagatccctgtgaattagaactgcattttcttgcatgtcctgcagccccagggtcccaaaacaaaggtgggcttttcaatcatctcttctgcgtcttgttgctatatacagctgcccactacacagtccctggtccttccctgcagaaaagaaaatcaacccaggaaggcaatctccagctctcctttaggcaaaggattcaaagctgattcccaaaaccagctgttttcaagcatagataagggggttcttttgctcctgactcaatatcaaaggaaagattaaaaaaaacaaaagtgaatcttcaaaagcaaaggttgtctgaaattatgagatgttgtgaggcactgccagctataatttctccctctcttctccccacagaccttcagaaagttttggttccctgcgtcggattaaagggtctttactttatggggtacttgctgtttggcctgggcacaggattcatcgggctcttcccaaatgtctactccaccctggccatgtgcaccttatttggcgtgatgtccagcaccctgtacacggtaccctttaccctcatcgctgtgtatcaccgtgaggagcaggtgcgtggtcgaacctcagtgccaagtgatgtctggagccacctgaaggcagggggacttggtgggagagtgtcgagcagagctggaaaataggggttctcgaaactgcagtactaaaatgtccagccagatgctacgatggcctggccagggcatgaccacgttcccagcccaccctctcctccttactctgaagcccagtgcacttgggagcagtcagacaggcaccattactcccatttgtcacattggaaaagggagggttggtaatgctgagaagccagcccacaatcacacagagacaaagcaggggaaactctgggcttatggcacgtgccatgtacctgcagccgtttctgggtgccacagtgagggccccagccctcaaccactacagaggtccggtgccatttctgggagttactggttgagcaatattttccttggaaatggggttttggtaagtcatgcccggtgtgcagggaggaaagctggtggcagctggttaactctctagctgcctcaagggaggcccgccccatctccatttccatctggaaattcaagccagagggcaagactccaagtggctgggagtttgggttgggtttttttaaaaaagcattaggttgggtatttctgctctaaaattaccaccttttcttatcaaaatatgcacctttccccctgaaaataggcttacatttcctcaactgtaaaagctaaagagaactattagcttatccatcccagcaggaaactgcaaataccctgaacacatgtccatgtgactagaacactggccttctttttcatcatttgatctggcaagcgcagtgcggcagggttgcactaggtgttaaaacctttaaacaagagttgtagctgtccttactcctggcagacatcgtcactaatgtttcaatgcatggcaggcacttagctgctagaaatacagctggcattgagaacctcccctccaagacagagctgtatgatactaggccccaaacacagaggctatggactcagaagaacctggattcaaattgtgcctcccccatttggcagctatgggacactggggaatcataaagtggagaaaacagtcactcagttgtatccaattctttgtgactccatgaactgtagcccgccaggcttctctgtccgtggaattctccaggcaggaatgctggagtgggttgccattcccttttccagtggatcttcctgactcagggatcgaacctgggtctcttgcattatagggagattctttgccgtcttcgtcaccagggaagcccggagatcttgtccatttatttactaagtgtcactcaaaatgagttcatttttagatgggaaatacaatgacatggttcagcagccacaatgatatgcaagtgtgaatcaaatggcacctgcctccctctcccttcactctttccctatgtcttccaccccctaccccaggcccctacatgtaaccactttctttagacttttgtctatctttctagtatttttgagtgaaaatctagcgattacaaattgcattttctcattttccttttcttattcaaaggatactatgcattttcctgcacagtgatttttttaaatttaatagtgtaggaattatctttcagactcatagagccttagttttctaatcaaatgggaatgatacacccaccttatagaattgttggaaaattaaatgaaatgagatagtataggtaatctgcttagcataatgcctacctggcaccttgcaaagactcaaaaaatggtaggcagtagtattgtattattgttattaagaggttaatgataataatatgggcctccctgatggctcagatggtaaaagaaaaaaaaagtctacctgcaatgaaggttactgaggtttaatccctgagtcaggaagatcccctggagaagggaatggctacccactccaatattcttgcctggagaatcctcatggacagaggagcctggccggttgcagtccacggggtcaccaagaactggacgtgactgaggggctaacactttggggcctccctggtggcaccatgtgcctctggaaaggtggtaagcatgaatgaaataacgtaagtgaaagagccttgctcaagccctagcacgtatatgatacctgataaatggcaatgctatcagccaattcagaccaaatgtcaaatagtaatcaaacattaatctactaaccaaacaacaaccctattttaaaaggtttaattgcttttttatgttgcctctcctaacatatatctgtgattcaacgtcctcctgaaagtgtatgaactttcaactctaaggaagggatgaaaagggatatttattgtttctaatccactgtatttactgaatgcttaggaagagagaattttgtgttcttcatcatttaactcccatagttaatattcaagattttgtggcaggtaggggtaacaggcagggggtggagcttgaatcagatagcagtgtcctaaggttgtgttggaacttgtttgtgtgccatgactactttggcactgcaacggcagagttgtgtgtttgtaaccacggctgcaagtatctgttatctggctttctaaagaaaaagtttgcttgctgactctgccctatggaacagctggcatagatcaaatgctgtccctgttcttgccttgcagaagcagcgggccctgggtgggggcccggatggcagcggcagagggcagggcctggactgcgctgccctcacatgcatggtgcagctggctcagatcctggtcggaagtggcctgggccttctcgtcaacacagccggcagcgtcgtcgtcgtggtgatcacagcctctgcggtggcactgattggctgttgctttgtggctctctttgttagatatgtggattaggtcaataaagagacatggtccctaacctcagacaccgtggtgcacacagcacgaaatcaatttttatctagctctgcgttttttgtatctgccctttggatgccacatgttttgacttcaactgcagttgctgctgctgctgctaagtcacttcaatcgtgtccgactctgtgcgttgctaccccttattcccagccagctctgtccacatcagtctcagtatttcaagcatgacttgtcttaggagagactgggccatgcctccattcactggtggcaaagggcaagtatggatggcagcacctccttgcaactttctccctgagtcactgcagtggaatggggaggcagggtctgttttccacagggcattttaggccttgataaaacctgagacgccaactaacacacacttgtgatgctggaatttatcctgtgatgtgatttcttaatttttattttttagctaggggtccatatatagtcaggaagattctatt

SEQ ID NO: 196 - DNA, 76236 bp, Hippotragus leucophaeus
  source 1..76236: mol_type = genomic DNA
tccactgtccataatgatggcacacacttttctttacccaaaagagtagaaacaattttcacagtacagtcatctacagtatataaaaattgtttttacaaagcccttatatgcagaaaacatctcagtcttcaatttgaaggttcttagccataagatatcttacagacaaagatgagtatagtaattatacattctatagtcttttcccctaacttcaacaggtaggtatagggaactcaatgatcgtatgaacatatggtatatctgcatatcagctttctagaactacatggagtaataactaaatttcttagtaatcactttgaaaacactggaaaactaaatagaaataaccaattcctttagtccattcccaaagttgcaatcctctggattttcataaaatggagtgaagatccttttttttttttaattgtttcagcctttgggcagaaacaaagccaaggattgaatgccaagatttcacaatcattaattcataatttatggcaatcttcttctggcacaacttccagtattatttgtaatgttctggttataatgtctataaagaaataaagaagaaaaaatttaaatgcacagatatcagaaatgcatataaacaacaaaatgcaagttatttggggttgaatattgaaaacccacaaccaccaatttcatagagcactttcaagaaatatttatttcattagaatcctatcatgctcaattaatttacacgtcacctctgtaacttcctatgatggcttctcagcaagagtacattaatattttgttttcagataaagacttttattcatgaaccatgaataaaatggctgaaaatctttgagacaataggaccaaggtataaataaatgttcaaaactacacttcatcttgtctaaaattggtttgttgtttttgcacctatgagagtacatccaattctgcagcaaaatcagaaaatcagaatataatttccagtctcaatttgtagtatattattgagcaaatatattatctcctaggtagggcctcatttgcttcatcaatagaatcaaggacctgggaatgacatcagcaagacagagggcagggatgcttatcttctcccccgaaaccaagcaaacaaaaaaagaaaaccaagaacaataaacagctacaaatggaagaaaacagctcaggcaaagctctagacaataaagaagcagtagcaaaaatcatgatgagctcaaaaatcaaggatggccacataggaaaataaaggaagcattttgctcccattaccccatctccctggagggaactgctaggcaccggaaggaatcctttcagaggaagatcaccacatgaggagaaggagagcagaaggaccacagcaagcctcaccatcgtgggtgttagcagctttgggtacaagggtatctcagtcttcagtgatgctgaccctagctgatggagcagtctgtagtatcaaagctctgggctctggatctactcccagaggctggagctgttgccgaggtgagacctgccctcaagggtcccagttgttgctgtgccccactctcacagattggtaccacagcacacctccccatatgagaccagagccgccactgttctttgcccaccccagtcccagcttagggctttgctccaccattaccaaggcaaccttcctgtcctgagccctgccttggcaggtaggggggttcaggctcagatcatcattgctgggactaggctgcctgtaccctgagcttcacccccatcccagattgaggctcttgaagcatcactgccggggggctacccatcaggtttcaggtcagggctctgacccatcaaaactgggaccaggctaccactgccctgaacctcccaacccaggttgaggctccgagctgtccctgccagggctttgctaccactgccctgtgcccagttccccggagtctcaagatatagctctaacaaacaactactggggttgtaccacggctatcctgtgagtgttctgcatggtggggaggggtgggggcagacttgagactttaacctaccattccaaggctgcactactctgcattctgccttctgagcccaagccaccagtgcaccttgtcatcccagggcccttgtcactgccatatcccctcccctcctcacaagtcacagcagagagcctgtgaaacccaagtatcagttccataggctatgtgcacgtcgacaccctagacacctgtgccatgcccacagcaactgtgcctatgctccagggccctggcactgtagtagttccacgtgtgcctggtcctatgaccccagttccaatatagctgtgagagtcagcacatcagaccaagcaccaagagggtctcctcaactagacctctcccacaggcaaagagcaacctcagactctgaagatactaatagccccatctgctgcctgtcctctgtagccttaggcacaaaagaccccctattctggccaagatcagccagtggagtagcatggagtctgaatcactgtgcctcctcaggaaccaaagacactgcatctcacccagcaagtgctctcacagctacctccaggggaaaggctttccctaccgaagccagtctgaaaaggccagaagagatgacttcacctcaaaggcataaacatcagaacaaacccatcaaaaatatgaaggaaataagacaccaccaaaataatgcaatactactccagtaactgaccccaagtaaatggaggtctgtgaccaaactgaaaaaaaaaaagccaagtgatatatgagagaacacagacaagtcaatgaactcaggaatagtccatgaagagaatgaggaattcaacaaatagaaatcatttaaaaaatcaagaaattctagagaataaaatatatgaaatgaaaaatgtgatagcttcaacatgtaggctcaaaagaatctgtgggcttcaagacagatctcttggtattatccagtcagaggagaataaagaaattaaaataaaaaagaagcaagcctatatcaactgcagaacatgatctaaagaaagaatatccatattttgggaatcccagaagagaaggagatgcaaaaattttatttaaaaatataatggggaaaactttcaaatctggggagagatatggccatattggtgtgagaagttcaaagattcccaaacagattcaacccaaagagatctttattggatgcattgtagtgaagctctcaaaaatcagggacacagagaaaatcttgaaagcagcaagacgagaaagaatcatcacatatgaaggaatcttgatatgactatcagcaaatttatcagcaggaatcttacagagattgggattgggatcccaggagagaacgggattatatatccaaaatactcagaggaaacaaacaaacaaactaccaccaagcaggaaagctatcatgaagaaatgaaggcgagataaagacttacccaggccaacaaaagctgagggaatttttagccatcagacatgccctataagaaatcctaaaaggagttctttaagatgaaacaaaaacgcacaaatcaataacatgaaaatatgaagaagagcgaacactaccaaacatttaatgaagccagcattgccatgacgggcttccctgatggttcagtggtaaaaaatctgtctgcagtgtgagagatgcaggtttgaaccctgggtcaggaagatcccttggaggagaaaatgacagctcattccagcattcttcccgaagaattccatgttcggaggagcctggagagctacagtccaaaggattgcaaagagacggatacaactgagtgagcccaattaccctgaaactaagtacagacaaagacactgaagaaaagtacattacagacaaatatttctggtgaatacagatgtaaaacttctcaacaaaatattagcagtccaaattcaacaacacattaaatggatcattcaccaagatcaagggggatttatctctggaatgcaaggatgcattcaatatagtaatgaaagttctagccagagcaattcggagaaggcaatggcaccccactccagtactcttgcctggaaaatcccatggatggaggaggctggtgggctgcagtccatggggtcgctaggagtcggacacaactgaacgacttccctttcacttttcactttcatgcattggagaaggcaatggcaacccactccagtgttcttgcctggagaatcccaaggatgggggagcctggtgggctgccgtctatggggtcgcacagagttgaacacgactgaagcgacttagcagcagcagcagccagagcaattaggcagaaaaataaataaaacgtgtccatgtcaaaaccgaagaagtaaaataatctctgttcacagacaacatgatcttatatataggaatccccaaagaccagtaaaaagctattggaactaataaatgaattgcagtaaaattgctggatacaataccaacacttagaaatcagttgcatttccatacattaacaatcaattatctgaaagagaaattagaaagcaaactcactgacaactgtatcaaaaattaaaacacctaggaatagataaaaccaaggaggtgaaagatctgtacactaaaaactacaagactaacgaaagaaattgaagaaggcaaaccaatggaaagatatcccgtgtttgtaggttgagaggaggtcatattggggaaatgtccacataacccaaagtgaactaaagattcaatgcaatcccaatcacaattccactgatatttttcacagggaaaaaaaaaaaactatcctaaaatttgcttagaaccacaaagtaatcctaaaagataaggagagagctggaggcattacaatacttaattatatatcaagccatattataaatagagcaatcaaaagagtatggtgttgtcataaaaacaggcctacagatcagtggaacagaatgaagagtccatacataaacttccatgtatacagccaactaatttttgacaagaaggccaacacaccatagagaatggacagtttcttcaataaatgtatttgggaaaactatatatatatatacaccaaaaaaataaacgaataagtaatatgaaacttaacttatacctaataccactcacaaagattaacttaacatagatccaagatttaaatctaagatctgaaaatataaaactcctagaagaaaacatagggggaaagatccttgatattggtctaggcaatgatttcttggataagttaccaaaatcacaggcaacaaaaacttgttgattgtccaggaaagctgcaggcctccaattgcatccctacccatataaggtctttggctttcgagataaatcagtcccacaatatttctttaaataaagttgagccactgagtctgcattagatatttttagttatgtaaagccaaacagcaattgtaggatttttagctttgcctttcatgttcagtaattgtttctgaaatcagatgaaacaacttctgaccctgcaaatctgatttacccaatcatgcctggtacaagtataggagctacagccaaatgtgaataagcctattgaagtatgggcacaaaaccaagctttcccagaaatcataataagaataacagtatttatgtttttttgaaaagccttcaaaaccctttcacaggcctggcttcatttcatccttacagtgaagatgatttgacctcctaagaaatgtagacaagcttaaactcattgaaaagcttgcactgcaggtttcatgaggagtctgtcaaatgcatgtagcagctttcagtgaaataccataaacaaactgatcacgacacaccatatgcagactatgctcttaggactctgattttgcaaaatcactgtccatcacgatggactaccgtcactctgctggtgctgcccagtgtgaccctctataactcaagattctgtttaaatacagctgtcctccacatcatgcccggagccagaagcatcagcttctagtcatcccattcagtctcagctggcatgagctttgactgataaagagaggcagccaagtaaaagggctgtggggaagcctggctggtgtttgctggctctagctagctccatgaatttcactacatcggtggggtatctgttcctttttccttgggtgagaagctcgtgactctgtaaataaataaataaagatccagaagaattaaacactccatcacagatggcggaaaaaaagctctctgcacatctgactgttcccttaagagcacgttttttttcttctcatcccaggaacgctgtcaaatgaaacgtggttcaatactggcatcctgtggccacagaaattcatcaaatctctgaaactcagctcctccagttctgaagttccctgcctatctgaactcagcagtctatctccctgttttctgaaggctgttctggcgacctcttttttttttttttttaatggaagcatcctcggtaagatgtgttttgataaactatcatttcacaggcctaatctgttcatgtatatttgggtgaaaatacggtatcaaggctaaagaatgttccccaacagaacaatctgatgttaaatctgtacacagggcaccaagcagaggctctctggcctctgagttcacactgagtttctctcgccccaaacagaaatagttgggagaggaggtgagacagtggttcagactctgctgtgttgtctgtgtatgtgttttgttttggccaaaggctaggaaaatacttgctacagctgcaataaatattatgaactttctttattttactacaagaatgctgcctaagaggaaaatcaaacaaaattacggaggattgttgctttttgcagactcactttcaaggcagctataaagataaagggttacaatgatcgcagtttagaggcagatttgccatgttccctggtaagactctatggcgttgttgagaaccaaataaccattatgggacgactacttgctgctactttcccaaatggctaacactacatttagagtccttggagatgttcaaaatgctattcgagacagaaaaataacagaaaacttcaaaattacatgagcacggaaaaacatcaaagaaggagcaagcaggaaaatcagtagttaatatgcaccagcaaagaaatgagagaaaatacgcacatgttagcagaaggaaagctttgttagcgttttggcgaactacaaacaggagggacaaaatgtttattcaataaggaaagtaaaaggaactccttctctcatgtaatctctctcattgttcaactctaaggcaacctgctcttcctaaaattctcaaggttttccaggtgttcagggattttaactgtctttagctagttattctgaaatggacaaagacctcccagtggtaaatactcatctactccaaaaattaataacaagcaatcctaatggtaaatattgtgtaacaggacttggatttttttttttttttttcaggaaaagctctatatttactgcctacagtagagaaaagtttactaaagctattctacagaaaactagtgtgatctgacaagaaacaaggattaaatacattgctaggcaatcagtgttcctgtgttagcgttgaagaacctaacttttatagtaacacttctttggggaagaatgttgctagctaggaaacaaaatgcaggtataaatagtagtataaggttgaaagatatcaaatcccaagctaataaaaggtagcagctaaagtctatgttaaaggactagcttctaaatgagtttgtgcagcacagtagagatgcaaaatgtacacaaagttgtttgtttttttatatttagtaacactgacattatttattaataattttactagaacgttccctgaacttttcactaggctttaaaaaattaatgatggtaaagtaagtaaattaaaatgaatgagaagaacaaaagaggatttctaaactcaccagcaagaacacatttgctcctctggatatatttttttacttctttctctcttcccccaggcactcagtataaaaagaacatgaatttgaagtccagcagctatggcttcaaatcccaggttaataacacagaaacatatacactaccatatgtaaaatagatggccagaaagaatttgctgtgtgattcagagaactcaaagtaggactctaacaacctagaggggtgggaagagatgggggaggttcgagaagaagaggacatgcctgtacctaatgtagaacattactgattcctgctgatgtatggcagaagccaatacaatattgtaaagcaattatccttcagtcaaaaaataaataaattaaaaaaaagctacatcttcctgcaatctggttgtcccatctgggtatagaaatcaacaaattcacacatagatcttgtggaggaatgaaacagatgataatgtaagagagaatctcccagcccctgatggagggttaggcttttgatggctttttgcagaggctattcctaagtactcttcctacctgctgatttactatattttctcctccctcaacacacctggtcaccaagctctgttgatttttcatctttaatatctttcgttttcctctggaccctgccaacatcacctgtattcagacttttctcagttctgtcaggattactgtgataaccactaatcactattcttgagaatgtcttcagcctcatgctctctgttccatcctcattgtccctctcttccggatgacttctggaaagtgcaaatccgcccaagttggaattctaggtctcctacttaatatcttcatgacttggaacaagatatatggattcttccataccataactcaaaatctataaaatatggataatttttttctagctcagaaagttgatataaggattaaatatggttatatagaatggttatggattaaatatggttatatatctgtatgttaacagaaattactcagtaattgtcaactgctcttcttttcttgattattcttgctgttcctatgattctccatgattcaccagttgggcagtgttataataaaagaaatcatgatacttgagaacttttcagactctacatgacctcccaccaaatctcacaccactcattaagtagtgtgttatcacatagaatcaataaactgcattcagcccaagataaaaacaattaggtaagtgagggattcagtagaaaaattgggttgtttatagtattgcttataaaaattctatacaaaaattggtacttctaagaagtgattaaagaaaatcaaactaaataccatcaaaggattcagtgactctaccctaaatatccttcctgccttttcttcttcaagttctcattagaatgcagtaatatattcacattagcagtttcccaagtggtattttcagactttaaggggtgtaccatatatgtacacagagatgggctttctacaacacagtctctcaaaggtcctaagagtgcttaaaaatcttacctgacattcttctgaaccatctgggtttcttgtcccatataataaagagatagtaggcaggaatcccagtcagagtgatggtgaagccgacccctgtactaaatggatcggaataaagggaaagggccaccatgaagagacacgtgaaggaaaacaaagctgggatgaagagcggcacctagaacacagcaaagaagaaaagcacttcaaccgtggcttcagaggcagaaggcagattcgagctgagcactgcagccaccaggccaggtgacacactctgatcccgcgaccaggcgacaggcaccgtcccacttacctttctaggaaaatcccttgactagggcacagagcagatactgatttgaaaacactcctttaaattaaaaataaatctttgggtagaacaaaatctaaggataaataagtatgtttcattagagacgttctgtttgaatgattttactacttaagtaccattatgatttatgtttctgattgtaaaagagtgcttctttgataatgatgattagaatccactttaatgtagagccaagagcacaggctgcttgttacatgttaaagcctttcagtgcatattgattttctgttggagattcacaatacgaactgacagggataaaataggccaactcctattcaaccactaataaagatgtcaccagcattaggtaatgaatataattagaaagaaattctgacaccatgatggacaacattatctgtgttatttcttaaaagcaaatacatagtgagttcaaatcaaaccataaacattcaaggctgaaggagattagaagcatattcgtcagccttcccaaaaggaaatgcatcgttatggtaaatggacattctattaagtggtaaattcagacatcttcactttcttaagtattttacatctctattacttctggagtgcatgatgcagaaaagggccaatgtaacaagtcataacattcaagaatactcaaaatgccttttttgaaaagcagcatccttttcagaggcttccatagtaatgctagtggtaaataattggcctgccaatgcaggagatgcaagagaagtagttttgatccctggtttttgaagaccctctggagaaggaaatggtatcccactccagtatgcttgcctggaaaatcccatggacagaggagcctggcgggctacagtccatgggatcacaaagagtcagacatgatttagttattaaataacaataattcctttttagagtattagtgatgatttcatatgtatctgcctcactctttctcagcatgactgtccacaactattcagcataaaagagtagtctatactttgaatgtatcagatcattaggcacattaatgaaaaatcaatgtaacgaccatttaatattaatactccttttcaaaagtgcgacatacaaagctcagtacatcacaaacaagctaatcaaccatttttccaaactgaaataaatcccatatgaaggcattacctgcaagagttaaacgttttattttagaggattctgccctctgcccaagcttctcatcatcaagttatgacaaagagaggaccagatattaggaggaagatttatgtaaacccatgaagattgctgaggttaccttgaaaggacgatgcatatctgggcgtttgtatcgaagataaatcagcccagcaactgccagcccaataaaaagccacctggcaaaactgaggaaattcagaagactgtagaggtctccagagaagagcattatcattgtcaaagggtgctgggggaaggaagagaaaaatcacactcagtgagttaaaagggaacaaacatgataataagcaatgatatcactatacaatattattgtattttccaaatgactatttttactgattaactaggatcgtgattaaaatctatactcaactaccctcctagctataacttactctttactcctacatacacacatacatggatgtgttattttttgttgtttttcattaagagaatatgttttccaagagtaaaacacaggacactcaataactcaaaatttaaagatccagagggcagagatggttaataactaccaataaaaattaaaagtgtatccaatacaaaaatttacagaaagctctgtgaatggtgtctggtgctatgcacacacaggaaagacagccccttctaggtgactgtgtgatctcctgaatgcaaaacatgacctttccttcccccacactccctttccccatgtggctgccacgtatgaccctcaagaccacagaaaagaatgaagcgcagagatccgcacagcaagtctctccagctgcacataccaaggacggcacgactgatagcggaagcttaaagggaaaaaaccctctttaccaaataaatacattctgttcccaaagtgacgtaaacttccagatgccacacagagtaaacatacttgacaaagaaatttcaaggagacattttgaaacaaatgaaattcataggaaaaaaaaaaaaaaaaagatgtttcaatgcattctatggtggtcctggcagcagattccatcagagaaaaatgttacaaaacagtaaataaaaaggaatataacattgccaatgaggatttgaagacttgcacaccttacatagtcttcgctatcccacattttgcgaatacttttctctgcataaagaatcctacagctcaagtttaaatcgtggtgcttttattttttccctttaggctgccctcaaaagtctcacttttaagcacagaatcacttcagtgtctaggatttcattgactttttctataaacttgtatgtgtttcatcatatggggcctctggtaagacatctggatatttgaggactgtagcttttagctccactttcagtaagtagaattaggactttttactcaatatcattttctgcgaaggctctaagtcattgacaaaagcccaggtaatcatttcccttccatttcacaaatttttacaaagttgaaagagaagtgatttggttattgctccaaagcatcaaatatgcatcagaactgataaagaatctgcctgcaatgcaagagaccccggttcccttcctgggttgggaagatcccctggagaagcgataggctacccactccagtgttcttgggcttccctgatggctcatacggtaaagaatccgcctacaatgtgggagacctgggttcaatccctgggttgggaagatcccctggagaagggcatggaacccactcctgttttcttgcctagagaatccccatgaacagaggagcctggagggctatagtccatggggtcacaaagagttggacacaactgagcaactaagcacagcacagcatactagataaagggaagcaatggaaagcatcctgcctctctaattccaccatgatacaaagagagccaatttagagatgaatgagaacagaaagaaatcctccttactaacctgtcctttgaggctatatctagatacacatgttaatatgcattaccaaaacaataacagctggcagaggagtatgcttccggatgtgaatcatggagaggatttctggaaggtgaccctcccgggatgcaacatagaataacctgatgggagaaaaatgtataattgatcatttccaagggggaaaatccagaaatctaagagaaaacttgcaccttctttgcaccaaatggtgattacttaggttttgctttttaaagtagagtgcattatgagaaatcaaattttgatttttataaatatctgccaaaatatgattccttgaggagaaacaatagcaacatccgactcagtatagctgtgcccccatatacatagctggtggggaatttaggtctagattcctattattacctgtgtgctgtcaaacaacatacacacacacaccaaatattcatatttatctgattgggttttcatcatattaaatcaaaaggaatttctagatgaaacaaaacaaaagggatgcagatggtgggatgatgatttcttgtgtctattactttactttttttcttgtcatcttttctttagagaaaccaaagattttattactagatataaaatgctgttgttatagacatacatccaaaaaaaaaaaaaaaaaccccaaaacaaaaaaccctcgatgcctggcttcagagtaggctatgagcagacaagcagtgccctctaatggacagagtaggacgtgctgcggaagatttcaatctcgcgtgtgactttaaaaacaacagatttggaggcactatttcttttcttcttaaacttatccttatcacatcccatctcaaaaacagaaatgcctttctagaaaggcttgaactcactcacctggagacagcaaacacaccaccattcatggagccaaagcaggagagggcaacaaagatcggaactgctaatgagaaatttcccaggagccgctcagaaaaggtctagtgaaaggcagaagcgagcaaattaatgctttgccagaaagtagaataaaatgaaacagtttaggccaaactcgctccatgactctgttcacctggtgatacgtgtgtgttttacaatccttcttttgggttagggtcagactaacctcttaggataataatgaagggcaggtagcctggcttgctacaaaactatggacagcggtctaaacaagcacctttcctctaccttcaaaaagcagtgatccatttatcaaatctatcaactatgatatctattgtctctgactctgggaagtaaaaaaaaaaaagctcagttcagaatttctccttttggagacagaaatccttctgtatgataccttctctttagtcgggaaagccacatgtttatagtgaagtacaaaggcagattgaggagtgttgcagatacttattccatataccaatcctagtgttatgacttagaagtgtgatgaaaaataagtgatgacttaatatgtgtatcatagaaaagaaccgttctgaaaatctttcgccccagaaaaatcacatcagctgcatctctgtttatcaagtcaatcccaccctctcaggtatctgccaattccttctgtagtttcctattaaaaggttagaataccaatacaagtctgaggaaatcaagtcatagaaaatataaaggagaaacgaagtttatgacatttccttttattctatggcatgtgcaagactgcaaattttcatgaaggatatattaaaaaaaaaaaaagatgtgggattctttacttgtccttgagcaactggcgctatgtaattaatggaccacattacgctcagggactaagtgctgccctttgtctagtaagatgagatgacgacctgacatcagaaagctctgtgcattcggttgtctggtagaagttacagcagtgggcaaagtctactttaatacagtgaactcgtacataggttcacgaaatgggataatttgttccctgtggatgttccctgcagatgattattatgaggtaatagtgactattttaaaaggaactgacatctagtggtggaaagttctttttttccacccttcactgttacaaggtcatgaatgagagctctcttactagctaagtttttataccagaaagtctgtgtcacagaagagcagtcccataacatgacctctggaagcaaaagatggtcttgaagtcaaataaattttggaaaatgctgtgaaattataagtatccacttctttaggagttaaaatacacattagcttctgtgatattctgagaagtacaataaaaatgacatctgtttaactttgaataactctatttccccaaattaataatatcctaggagctagtattcaaaaagatatatatactaggaaaaaaaaatgcatatggtctacttggaaattctaaagtgatgctttgggagaaagatttagcatttaaaaagtgtctaaacaggaaagagtacagaataaattacaatttgcatatccccaaaatgaattcatttaaattcagtaactgcccacctgtacttaaagacacattggaagaataatgccttctattcaatgtgtatgtgtggaaatgtgttttcaagctggcatatgtggacatattttacatgaaattaataaaacagaaatcgtataggattgtagttgtatcaacagctacagctgtagctatagctgtagtttagttaaatggaatatgctaaggtatgtcctaaatttttaaaatattcattatcattcagttcaaaaaaattactaaattaccaaaacactttccactggaggaaactactgtaaaactgcatcaattcattagcctaaattcaaactggcattagcccagcttagacttaccacggccactgcatttgaaagcatcagttcctcggcactgatggttgtgaagtaggccacgtttgttagcacgtagccaacagtgacaacggtcatggatatacatattgcaagggggatggttctgaaatgcacacaggagttgcttattagtcatctcttgttagccacttctctgagaccaaagaaaacagcaggctcattcaaagaaagaaaacggtatggataattacaggctctgttcagccaggtgaagtaccacatagtcctttgtaatttaataaggtccacgaggggagacactacatttgtcgtgtctactgctctgccccagaacacatgggtctgtcccattcttttactccatagatcttagagcagggtttcccacactcgagcatgcatctacctggagggtttgttaaaacacagattgctgagcccacctcaagaatttctgcttcaggaggatttgcatctgtaacaccttcctgggtgattctagtgctgctggccagggtaccacactttgagatccactggcctttcaaatgcctttcaaatatgacttcacttggcttgacaacctttctaaaactagtttccaaaaaggtcttttgcagtcagtgttttccccttcagtaattctccttaccatcaaattagtgtacagtattggaagcatgggaacaggatatatctacctttctaaatgatggcaataataattttgtacataacacaaaaagcctaaaagtgcttccaataatggttttgcactgccctgctgtgagttcaaaggaagctcaagatcatgagtatctattaaagccatagcacagataatcccatgaaattagaggtgacatgctgtgcagtacatatgaccgacagcactgacaccacacagcatcatgaagtatccggcacaaatgcaatgttatgtcttcatttaatgcacttggaaagtcaggaagttactgaccctaataatttgattccatgttaccgatacacattacttgcttaacataatcacctcttcagactctttccggttcaagcaacttaaaccttcagctccctgcacaaaggctgatggggtttttttaaccatagaacttatcagccctcatggagccttaacgctgctggatgccactaatgaagacctccatataatttcttccaagatgaaaatacagttctgaaaacaggcaggaaaaaaaaggcacagcctgcctcactccgcaggctgggtgtgttgagcacacgaagtcccagctcattatgctgaattctctatcccctgttgagaacaggcaaacccagccagtcagcaactgccattcattatggtgcttggagcctgacacttccactgatccccaaagccttaagcctcaatggggaaacacactgacctctaaaatcctggcatcctaacaggaaaggagcagatgtcccccttccccagtatgaagagggtcctatggaatttgctgttcacaccataacactcattgctcattgtgattgataaatgctaagtgtaagcaaaggaaatcactgggccaatacaaaacagaggggtaaatggcatagggcaatttaaagatgaatcctgtttctttgggtgcttccctggtggcactagtggtgaagaacctgccttccaacacaggagatataagagatatgggtttgatcctagggtggggaagatcccctggaggagggcatggcaacccactccagtaatcttgcctggagaatcccatgtaagaggagcctggcaggctacagtccctggggtcgccaagagctggacacaactgaagtgacttagcacacaaggatgcctgtttctttgaaagagaggaggcagatcaatgcaaaggcggaagcagctgagcaagaaggtgaataggcagcttttcaaccactcgctgtattcctttaaatttgaatccctaagcttctataatatcccaaatggggttctgagttctttctgtggaggagggaagcagagagggagagactctctggagattcctcgcaaaaggcttaagaaatgcgaaggctctgctaataaaaagtgaaatgatttattgttcagtgcagtgaaggcacctaacctgtccaggagtgggagtactgtcagtcacatgaggctgccacagagcagaaagaggtgagtctgaaatttgatggtggctctcccagcagagacaggacttccctggtggctcagagggtaaagcgcctgcctacaatgcgggagacctgggttcaatccctgggtcaggaagatcttctggagaaggaaatggcaacccactccagtgttcttgcctggaaaatcccatggatggaggagcctggtaagcttctacagtccatggggtcgcaaagagtcagacacggctgagccaattcactctcactcccagcagagaacttagcctcccaaggcaacttccctgtttcctgcccaaagattaccatttttctgaggggagatttctaaactgactccagcagaagggatcttaaaaaaaaaaccctgaagtttccaagttagtttccctttcttttttttccttcctcaacttgtcaataacaaaaacaacagcagcaacagtgctatgtaccccctactttacatatttgtctcattttatccttgggaaattctgtgatttaggagcaccatcaccattttatatatgagcaaatgaagtcttagttaagaactgttcaggatacacagctgataagtagaacctcagaattcagccacagatttagcctaccttgaagtcaaagcacttaaaactactaaagaatactctttctcatggatgtgggtcttcaaactcaattttcagagaaatcataactactgaatatgtataatgttcattggaaagctctcatcatggctgtattcttcatgtattcactgaaaatgcagtttcatgtagtatgctgctgctgctgctgctgctaagtcgcttcagttgtgtctgactctaggaaaagacttattccaggattttcataaattatgaaacattatagttcttaagagctatacttcagtgtgaactataatgtcaaggaaatgttttcaaaagtctcaatatttaggaaatactggttcctccttaatttaaaaacaacaaaagctcactaaataaacttccctagacaactcttaaagaaaaggaggaaaagtaagcatacacatcagataatttgaaatagattattaacagttttactatcagccaaatacactgtatagataccagagggggaaaaaaatctaaggagtttaaactataggataaaagaggaaaagggtctaaccttgcagcaattcacagtaagcccagtaattcctcttgaggtaaaattaaaccataagaattggagaggatgaggccagatagccagtggcttctgtccttaaggttccatttcactttcacaaagggaaggagaggtggttgtggctgccttggcataaacagcgatcatttaccaaggagtaacagttcatttgttcagaagggcttggcaccatgtgcgtaactcctggatttcaagcagcaaagcctaagagccactggatgagctgataaaagctcttaggccatgcagaggcaatctttctggaggctttagatgcagagggcagataagcaccgttagtacccaagattaaggcaaatggcatatgataacaaaaggaatcaagggaactggtaggccactgatatttcaaagcccctgtgttactgtgaggtatgcaccaatagtaaatgcaacagaagcattgtctttaagctgaataaaaaggatttgcacctatgacttatactttctcaaatgtttgtgcatttttttaatgattagcaagatactaattattagaaagatagtactgggaaaagagacttaatccttaagagctttttgtcatatctatctatctatatacttggcttcccaggtatggcagtggtaaagaatctgcctgccaatgcaggagatagggctttgatccctggatcaggaagataccctgaagaagatattgcaacccactccagtattcttgcctggagattcctatggactgggagcctggtgggctacagtccatggggttgcaaagagtcagacaagacttagaaactaaataacaacaataaacaacagactatatacacagatcgacagacagatggatatagtcttttcaattatgtattaatgggaagaattaagtgagaatctgatatttttattaattgaaaataatctccaattaaaaggtcttggatagtcttttgttgtaggcttattttaaattggcatctgtaaccagtctatgtaacacatggataaatgtttattttatcggaaattattaaatggaggtctctggaacatctgcttagaagcactctcattctagaggtagacttcctcagaaatttaaataatcccaataggaatggcaggtagattatatttgtataatctacaaagtgccggaaaataaattttatctccaaacacacacatggcatttcatatcctttgtgaaataaaatagaatatgaacaaatgacaaaatctaaaactcactgaaacaggaggcaattttcaaataattttcccttgtttgtattgtcaaacaagggaaccaagcctcagagaggttatgcgacttgacaggccaaggttacaaaagtactaagcgcgagagctggatcttgaaccttgatcttccaaagctaagttccacattcatggaatttatctcatccaggataacatgtctgctttgtgccttcctgaactctaggtacaaagttcctaggattcttacatgctgacaaacacatactccatttataatacaaagatcagaaggctgatatcttctgatgttaccatgtgacacattttaagccaagtatattttactctgcacttaatcatcacaaatgctgcagcatgggatgcattttcaatacactttgcatctatatgattgagcatcaaaaatgatcattgtttccagcttcatactggctaaaaagactcctgccatgcaaacagacttaacaaatctagcttgattcttcagagctgagaaatctgaaggtcacaaagatttctgatattcagacatctgagtaattctgtaatcacttgaatttctggatatttctaaagctgttttataactggcataaaatcttccgagatttatctgaatgaaagtaagtttcatacattcctctgtggatgtacccactggggaccacaaaactcattggtccccaggcatctaaaattgttgagccatggaactgggcatgatgacagttctgctaaaacctactcttgtgtatactggaatcttctaagagaagtgcttgattctttacatttttttcatttaaaaatcattaatattttaatgcaagtatttggcattcaggaggaagcagggaggggaaaaaagagaaattaagaagggcaagaacattagcatacgcaaaatagatagccagtgggaagtcggggcttccccgatggctgggcgggtaaagaatcagtctgcaatccaggcaacacaggagacacaggttcgacccctgggtggagaagatcctctggagaaggaaatggcaacccacttcagtattcatgtctggaacatcccatggagagaggagcctggctacagtccatggggttacaaagagtcggccaggaccgagtagctaagcactttccacttagtgggaagcaaagtgttgctgcataacacagggagctcaacctggtgttgatgctctgtaacaacctatagggtgttgggtttgggggatggaagggaaactcaagagcgaagggacacacgcatacttagagctgattcacgttgttgtatggcagataccaacacagcattgtaaagcaattatcctccagttaaacatttagaaaataaaaataaataaagaagggcatgaaaacagcaaacttcttaatatgagatacaaataaaaaggaaaataggatttttcacaaaattttaaaatttttagtaaagtgtttctgtataactgaaaaaaaagcatgaccgatgtcaatacaaaatattttatattataaacactttttttgcttctgagtacttattttagaatcatacatatttcccattttctgtataaggaccctgagtggaccttgaaagcctttctctagatttgacctggaagtaactcaagcatgtcttactaatccctttttgatccaccaatttaattttgaagaattactcagtttattttattaccactgctgttaattttatctcattccaaatatgttacaaaccaaaagataaataatagtatatatcaaagaaaatctatatttttcattcatgcgattcttctttcatacatttttacataatttccttgattctctccagagatgccctctagaatggaaatgtagtatctggctatgtgattgctgatgtttccagcagggactgtatcacaaagaagagttcttggattgttttccagacttgaaacagatatattacagatgactggaatctgatgaattgctttatatgttttctgtgattttgtctcattgtcatttactgctgtcatatctctatcatacaccgtgagtgggaactggactgttaataacactgtaagagaactgcacttgaggagacacagcaagtagttgggaagaaggtaagggttgtcactgaaaggagaaaatggagcaagaggaagaatatattcaataaacctatttctaaacattcttagaggtccacggttcacattctaccttaatgacaatttctgggccaaggctgaacacagtgatgtgacaagcagattgtcacataaaggtacacagtgatcccactgacttcaaggattaaacacctgccctctgcttcttaactgcactctggcaaagttatgcgtattttcactgagatgctgtaaatttcaataccactgatatctaatctaaatctcaccattttccattgtgcacagatgaagaactccataaacaaaaagaagacagagaaacctgtagggagatgtaagaaatgaacagaaacagattaaaagactgcaggctgaaggaggctcaaggaaaaatgtacacagatacatgaaagagagaaaagtgcagcaaaaccactcagaaaaatgaactaaagtggaaacttataattcaaaaacatagggtaataagcaatcagaagcattagtataagcattttcagccctaacaacacttgatttttttatcccactattagaataaattcatgcctaaataaaattattcagcaaaatgtaaatagcttgagagtaaattttcatttgcttgaatttcatatgaacaaaaaatttgcattgtctgcatctcaatttttctcattttctcaagatttagagtgtgtcttccagatgtattacagttatccatatttatcatggatgaatgtagagatattagtaggcaagtttgagtgcacaaaaatagaaacaaaattggtttttgataaaatgttagcaagtaaataaatcagaagataaaatattttaataacaataaattacatttcacactaatgttcaattcttatttttgttatattgtttttacagtatacttttaaaatattatattttccttgggattgtgtgtaaagtagtctaaggtgatgcaaaccatattttcactacaaccaagttcctgagattcagatgcataaagttaaagtgagagttgctccgtcatgtccgactccaggccaaaatactggagtgggtagcctttcccttctccaggggatcttcccaacccagggatcaaacccaggtctcctgcactgcaggcagattctttatcagctgagcaacaagggaaacccaagaatactggaatacatagcctatcccctctcctgtggatcttcccaacccagtaacctaactgggatctcctgcaatgcaggcggattctttaccaactgagctatcagggaaggctcagatacacatggctgagaaaatgaactactcatcacaattctattcttctttccaaagtatcagttattcctgagaagcagctacctagatagacatttcccagactctccagtatcccctaggtgggagtggctcattcatccatgttgattgatgtgactattgcaggccaaggtggttaagaagtaggctgccttgtccacccctgcaccccacccctacttccctagttgcagaggatctatacagaggtgaaactacaatgtggaagaaggaaactgggccacagaatcaatatgtgaaataaaatccaccctcagccagggacaccaacagtggactattacatgatttaaaaattaaacttttgattgtttaaagccactgaaaatctgtggctcatttgttaaagcagctagcattaccctaactaataagagaatgaaggacttcattttatcaagactttttgtagatctcagtgaattaatttatgagacaaaatgggtcctcattaattgttatcttacattttttgtttagtaagagactagtatatgacataaagtctttaaaataatgtcccacatgacgagaataaattaaaacatttgaaaaagttagaatagtaaaaattctattattattccaacttcccagaaacagcaaacatagaccccactgttcattcttttgaaatataatatcccctgcacttctgaaaattgctaccaatccaacaaagatcaaagtataattgtggttttttgaccaaggacacacaataagataatgcaatgtttaataaatatactcttacactaagaacaaggtgatgtaaaataaatatacccactttggcatagtaagtgggaattaagagtcaaaattccctcaggccattaacatgagtctcagaaggaactgataacatttctcctactataaacccataaatcaaattcagtcacacttctgaccagctgcatgataagaaatggaaggtaaacatggagacaatgaaccacgacaaatgaactactgcttctaccaccaaaaactgccttcaacatttgtgaccaacaatgacaagtctaattatttgcaatcattttactttgataactggctttccagttgggtgctctgggaatcagaatagaatgcagtcactggtaggactgggcttcccaggtggccctagtggtatagaattcagctaatgatgcaagagacctaagaaatgcaggtttgatccctcagttgggaatatcccttggaggagggtacagcaacccattccagtattcttgcctggagaatcccatgaacagaggagccccatagaatctcatagtgtctgccgctgctgctgctaagtcacatcagtcgtgtctgactctgtgtgaccccatagacggcagcccaccagactcctctgtccctgggattctccaggcaagaacactggagtaggttgccatttccttctccaaggcatgaaagtgaaaggtgaaagtgaagtcgcccagtcatgtccgactctttgagacaccatggactgtagcccaccaagctcctctgtccatgggattctccaggcaagagtactggagtggggtgccattgtcttctcccctcatagtgtcgggcactactaaagcaacttagcatacgtacatgcatagacatactaactaataggtaagtaggcgaacctattctcactcacttcaaccagatcagtcctctttcacttgttctatgtattgatacacaactgaagtgatccagtgcttttgaatagttttaacatcattcctccagatgctacaagtcaaatcatgtctttagataatttttggactcaatactggcttcctattaaaggtatatgacttggtttcataaatcgcctatctataaatgattgcatatatggatatatttgatcctaaaagttaaaataatttttcattgccacagagcctacatataggtaattaagggaaacattcttagcaggaaaggtataaagttgataggggaactaatagttatatcttgactttaatcaaaatggtaaattcacaaggccaggctccagagaacatgacacagcagcttaatggagccacagagaacggtgaagatgagaaggaaaagagctgagaggttaagcaccttgccagttaagagagataatatgtcattattaagaaagtgatgatgaagactcctgcgtggaacagttgacagctccctgcaaaggtcacaaaggcccgcagaatggcagaacctcctgcaagctcctctctgctctccttgggctttccctttaccaagacttgtattcccagtagaaatggatatcgtcatcttttatctttcagctcaaaagttaaaccttttgaaaaataagcttttgtgctttatcttgtatttgctaatgccttttcttagattgcaaggattcacaggcaagctctctccttagggatacactgtattacaaagtccaacacaacatgcaatggctgaggggccacctgcctcagaaagagaagtggttccctcattcacccaccctgtaatttcccttctcttacatagtctcccttagccctatcctcgaattcctataaccaagaaaagaaaaaaaaatgtacatataccatcgcaagtgtaaactttctttatgcaaaatcttttctctgaagttttgcctttgatgtttgttttaactttatttcatagattatgaaaaattctctggactccaatctgaaggctggttcaagtcatgttccagtcatttgcagggacctagaagatcattggacctctccaggtttaaacttcctccttaaagagggtgctgaattaatgaaatgcagtgtccatttcacttggaagaccatcatttgatcactttagcaaataaagctgatttgtaaagactgtttaacagaatcctttgaatactcagctgagcccttgctcgtgtaccagagcatcctaaggaaatgcctgcttttgccttgctctgtcgtttaaagaaaaaaataggatactaactttcaaactcttcttctgggtcttgagattatgattctatcctcaatcaggaataccagcacattacaactacctatattgtatcagcctggctgaccattacagaaaagcatttaaaggctaagtggtctgtccattctccaaattctaagacagtgtttatagatcaggtcagacctctggatgccacattaaatggacaatattatcaaagacatttatatttcatgcctttagctttcatcaaaatgttattgcaaatatatttttaaaaattatatgaatcttaggaggacatttgtaataacattattaaggatattgtcatttgatctatcagagttgcttataaaaaaagttcattgatttcaccactgtttgtcgaatatcttatttatgctagacatttgttataagtaaagtgataaagatataaactacaataaaaaattcattctcttatggaatccaaaatttgaacaggataagacatggagcaccccatctcccatccttcacatgctgccccagtcagtcaggctcggattgaaatctctccttagagaagcctcctctccatttcagagtatgtcccacaacccctgtactcctcattccctactattttcaatgtgaggaaaaccaaacatttttaactccaactgtctttgcaaatatccttgtatatccacatttaccaaattcaacagagaaattaaggacattcacctgggcacatcaagtgtcctgcaagcatttgctctaaaactctagggcaaatattttcatgaggagctgtcaggactctgtcactctccaggataattctgctttttaggaactttgtaatcacatgtggaaagagttcctggactatttggcctctattatttatttgtttatttgctttttatcaacctgttatttttggacatgttctaaaagaaatagttcatttaatgaagagaagataactactttggatgtataatgagattaaaaaacttagaagtgtgtttataattgtgatggaaagactcaaaaaacttaacaaatttaaattacttccagcaaactaagctatcgttttgactcttccttttatattatttttcacagctatgagataaatctgtacaaacctcccaaaagaagactttaaaaaaataaaaaaatggaagcaatgaagaggaaaaaggaaaaaaatgttaagaggcagctttaacgaaaaaaggaatgtttattccacccaaacctcatgtgaattctaaattattaaatctctgcaaacacctgatttatgaacaggataacacagaccctagccaaaatcatttttaataaaaagcaggaggtttcctgaagttcatctcagatttaatatcaaacacagcagccacacatgaacgtttccccataaaacatgaacacagcatggcactgtcagctggcaaccaccggcagagaaatagcagtacaaacaaacagggtgtccaaaccgtggtagggatcagggctcgcaatctagaggtagcagccaatggaaagggatcacacactgaaaagatatcactgaggaagggaaaaggctcaaggaaggctcacttccaaatacgtgatagcagctgactcactcccggtcaaagcactgagcttcttgattgactattggattgagagagcaacatgattgtgtcttgagttgatttctatgcatacatttggaactgtaccaaacaagttggaaccaccacgagaaaataagtgctagaaatgacataattcaatactgcattctcattttataagaaaagtagcaagtgtctaagagatacattaaaaacatgattcgagtattttcccacagatgtttggttcaatgataagaaagatgtcaaaggaaaaacttattatttctaatatatgctgcttaggaattgtgtatactgccatgtttatactctgtgtggcaaaagattatttctcaggagtataaattgaactagttggatacatacataataattacattctttcatgtttaatcccttacacggttgattcaacaactacaagcatcataaagaaataacttgtgcatgcttccactgaaatttctattgatattctggcatttggcattttgtttaaaaatatttccgaacagagacaatcattacaaaaggtgctttatcagtcgagatcaggtgttaaaaaaagaaaggctaaaggggaaaagattaagactaatattattggatgataacttgtaggttattttaattagtcagcattttaaaaatctaatagaataaaaagaataagccaacaattaaccatagtacacagcaaaagaaatttctagactataaagaatttagtcatatatgcaatgtgtgcgtgcttagtcactcgtgttcaaccctttgcaaccctatggactgtcactcaccaggctcctctgtccatgggatgctccaggcaagaatactggagtgggttgccattttcttctctatgcatatatgcagaaaatatctttatatagtgcaagttatatcacgagataatattatcaaaataacttgaaaaaccatgagttttaaatttcaaagtactgcatggattctcttcctatgcacggaaagctaagaatagaaactgtcttaatacaaatctgttttaccaatgttgatttatttagagaagaagaatactgattaaggcctccttttcctctcaattaaaaaagcattaaaactttcaataataaaaatcacatattaatttattgatatatcaatagaggagataagtgaaacagaatagattaccttgaaatacaacctagtacatgacatagaagcttaatatataataagataactgtagtaaatgttataaactaagtaaatattataagctaaaggtaatatgactattcaagaaatgatgggatattggactattggggaaaaatcaaggatagatggatacattggatggatcacactcgaaatccattccagataagacaaaatgttcaatggaaaaaaatcaaggaaaacaaacaaaacatgagtgagatttaaatgatctaggatatagaaacagttatgatataaaagcaatatacagaaaaaattttttaatggttacatttaaatgtgctgttgctgcaagtcacgagtcatgtccaattctttgagaccccatggactgtagcccaccaggctcctctgtccatgggattctccaggcaagaatactggagtgggttaccgtttcctcttccaggggatcttccccaccctgggatctagccagcatctcctgtgtctcctgcactggcaggcaggttctttaccattagtgccagatgggaagccccacatttaaatgtaatagatatttaaacattttacttattagttactatatttaaattcaaagttctataagtggaatcataaagaaaaatttatttatatgaaaaatcaatgaaatgtttaccaaaaaaagggatataaagaatcagtgcccatgatatacaaagaattctgctgaatcatgactatccatgccgccaagtggcatccacacagctacctgacaaggaagaagtattaagcatcttgtgtgaaactggaacttaaaacaaggaggtttaatttttgcttttcatttaacaaagattttttataagtaatgatacaatgctgattaagtgttcttaattatcactattgggaaaggaaattgatatatgtacccattttgggaagcaacttggtaatgcaaaaagaggccttttaaaatttcattgcctttgacatagtaaaaggctcttttatcaatcttcctaagaaaatcattgactatgtacaaagacttatatattaaatacataaaaacaacattattagactaagaaaaactgggaacattttcaatgcctaaaagaaagagtacacactgatgcacctacccagtaaaatattacaccaccattaaaaatggtattagattttaaagatctacgaaaataatgaaatgacttgaaacttaaaaagtgagatagatctagatgaaaaaaaagagttaagcttgacaaacagcaaatctagatggcagagaagacttcacagtgtctccaaaccgctgcggatgcagcaatgaatgacacaggagaaactgccaatatataagcaacaagtaaatacatactaaaatgccaaggttatgaaaaaaaatgcctctctacatttatctctactaatacatgcatggcacagatacacacacaaatgggggaaaaacaaactatcaataacaacgagtacttacatttgatctaatcatgagatgatagctgactttaatttccttctacatatttttcatattctaaaatgatcatctattatttaagataaaaggagggagactatagactgttattgaaaatactatgaaaatcataaagttttactttgacatttcctggtagggtacagaagatataaaaagaaattttctgttctatctcttgactaaatcatttgaccacaactacatatgagaatttgtgtcctagccagttaaaaatggaataaacgaggcgtgttaggagaattatgagaacgagatactgggtattttgtgttcctgggtgcccctggactagccatgtggagttggggaggccagattgagaggtgaggtcttctgggaggagttgctgtagaaatggcaactatgctccaataaaaattaattgaaaaaaagaaataacaacagtaggaactgaattagcactatcttttaaagaactggaaactgctgttctgtttagtcacagagttgcatcataactttgacagtttgaaagcacctacatattcaagcagaagctctctcccttgctgcagttcagagttcaggttgtggcttggcagaaaggcagtttcatagctcagacagagatatcaccaagtttaatttgcagctccatactgccccccatctttgccactggatccccctctccctggcaagatcacatggcattatgaggatcagtagctaaatacatacatttaaaacacatttaccctttcctctatcagactctgagcagctagaaaacagtcttttttagaatcatgacctctttttgctatctcattcatttcttttgtcatttcctggctcaaagaagaaaataaattaatcgtgtcttctatatcaatttctcttttgcctgcctcaggccagaataaaggaagtgagatttttactgtttgacaatatcaatgcagggaaattaaatattgtccctcagagagatttcagaactctttcaagaactagtctatctctaaagattagttagagaaaagtttttaaaaacctaaccatttccttataatggcctaatattttaatatttcctatgctgccatctatggggtcacacagagtcggacacgactgaagcgacttagcagcagcagcagcaatcatcaagtttctgttttgattttgtaattaaaagaccttcaataaacgacctggaacaggatgcttaattcaagtagcctgggacttctttcattaagtgtgtgaataacagctttagaaagtcgaatacaggtaaatgttaatatttttgaaaagcagttttgttcttttctcaaatgacatacaagtgattcctaatgattatattctccccgtaactgttaacaatttcaaggctacaatcttgccctatccatctctcttagatttgtattcaaccatcattgctgctgctgctgctgctaagtcgcttcagttgtgtctgactcttagcgaccccatggactgcagcccaccaggctcctccatccatgggagtttccaggcaagagtactggagtgtggtgcctttgccttctccaattcaaactcattacttttttagaaagaggatggaaagggatcaagactgaaactcctaaatacaagcaaattaatccaccaatccaacaattgacttcaactgttttatctttataaggaaagggttggaaaatttcgtggctactttccttctggttctaacatcccaagcctttgtggtttattttttcaaggtcaagtggtttattttttcaaggtcaagttcaatgtgttgttaattgtgacagtgagttagtctaataaactgggccacaacaatgccagtgtgtgaatggaagcaggtaaatgggtagagaactatttttacacagaggtaacatgaaaattgaaacaatatagccctttagagatattattatatgctttgcaatctatcgttgaatgaatgaccttgactgtacaatattggaaaagaagaaaaaatgacatcatgaaaggccaaaaagagaaacactttagatgaatgggacagcagatgcctataaaaagctcagtgtgataggtaacctaccaggttctggaaacaactcagtttaaaaaatcatgcattataatcattactctgtttcttattttatggtacatgattgtattataagctttactttttcacatattatgaaatattttattgttttgccatagacttaattccataaattatcttccatataatatagtatatcttgccatataaaatatatggtgacttcgatggtaaagaatccacctgcaatgcaggagacctgggtttgatccctgggttggtaagatgtcctggagaagggaatggcaacccactccagtactcttgcctgggaatcccatggacacaggattctgggggctacaatccagagggttgcaaagagttggacacggctgagcaattaagcacagcacactatataaaatcactgcattctcaacaagtttgcattagtaatgattattgttaagcttttgatacttctatctgtcacatgtttataattttaagagaggaagaaagaatacctaaaagtggggtatgaaaacatggtacagtagtaaatagttgcgagaatcatctgatgtttaaaagtgatgagctagtctccggttcaggtttgggaatgcatgtacacccgtggtggattcatgtcaatgtatggcaaaaccaatacagaattgtaaagtaaaataaaaaataaataaattaaaaaaaaaaaagaaaaccaatgaaatactatatgtctttgaaaaacagcctccaatgccagagatcagaaaagcctaactctgagactgagataatttctgcttcccatggcaaagcacttaaaacaaaggtgtcttttaccttgtcataatggattgcaaacccaaaaattaagcattgcagaagaaaaaaaaatactgtgcccaagtttacaaatcctgatctgataacccttactggattacaaaagagttgatgacatgatgtttgatgataacaataaaaagtggcctatcattaaataagcatctactatgatcaaagtaatgtcagacacatcagtaaattgtttctgattgtcaccaaaactttgcaagataagcatatgaatacccactgaacagctgagtagaagaatgaatatacatttttgaaagtctttacaaaaaaacctctcatttcttaggtaggaagcataaaatcctaaataaatcaataattttaacctaattattgtaaatgtctaacacttaagataatagagcttatcatatatgtgatacaattagtaaacagatccagggttcatcatcacattttactgatcatcctaacaagtgtattaatatctatattcctcttggcacactccacatatcataagatcctatggttaaggtagtcccaatgagtcagttttcaaagcttgtatctcaccctagatcttcaggtctgataaattctcacattgggatgagggtggatgccaatctgtctttattacccccacatgtccacccaaacttcttaccattttctaaagtaactcaaacactttagtcctgtccaatctcccaatcattatgtgatccagaaactggtcacagttgacaatttttcttcctcagagaggtctcataaatttcatcccttggccatgctccccaaataccttctacttgttaaactaggtacttgcatgtcatctacaagaatcacagaacatactggcgttgacagaaaattcaagattcgctatgctacccttccttttttgcactgagacatcaaaggctcagagaagatagaggatgtggccacagacacaaaattaagtatctccagaaccagactcctcatcacttatttcaagttaagagctttttctacaccaatgtgaatctcactatgcctggcagtgctaactgcctcccagcccaactcttgtcctgtactgatactgctatttccttgcctccttacactcgtttcccctagaatccaaatgtttgaatgtcagattttttaaacccaccttatttaaatacttccaaactctgatacaggattttttttttcctttccaactattttttttaataaaaagataattattttacaatattgtgatttctatttgaccttaaaaatctaactaaggatttctggatttcatctatcttcctagtatgtgacaccttccccaataatatagacctgtgatgccgtagaaagcattggttcctatatattcagtaatctaaaaagagaatctttatattatagaactcgaagcaagtttaggcaatggtttctctgatttttttcaacctgaatatctaaatcattgtggctaaatgataacccgtttagtttgattttgataattctaatgcctaatcaaattatctttgtttcaacacataccaatagaaatttattctaaaatgaaccctactctcatttaatttagcttcacttgctcttttattggtatggagaataaatgacaccacttttttcattaaaaaagacaattctatattttttaggagaattatatgtagactatgctgattcactctttttctctaagtagtttgtttagtccatatctttaggcttgggaagtaatgatagacttttctgccacgtttttttccaccttgtctgactctagcaatggttcaattccaggacacaactaccttttctaagatacatatagctgcttcacttcaatgtacagcagaaacgaaaacaacattgtaaaactctaatgttgtaaattgtactccaataaaaataaatcatataaaagaagaatgaaatgtgatttcttcgactggaattctcttcaaactgtatatatgtcacaaaaagaaaatccactgaacatgccaccagggtcatcctacccaaacactgcttcatgtacaccaaaaacattcaacatacccccacccaccccatcccatagggctcctagatcaggtcctcaatttttgtaatggaggataaagctcacctgacgccagcacccacgtaataactaccactgtgtcttcttatccatcttcacaatcctttgctttagctaaaggagtccacacaatattccctaaaaccaccaaacagctccatggttctgtgcatgcccatcccctatcagagatgccttcacttctctattctagccttccaggttctgcccttctccaaacttcctctttcagagccaagttacatccttgaagtgaagtcattcagtcctgtccaactctttgcaaccccgtggactgtagcccgccaggctcctctgtccatgggattctccaagcaagaatactgaagtaggttgccatttccttctccaggggatcttcccaacccagggatcgaacccgggtcttctgcactgcaggcagatgctttatcctctgagccaccagggaagcatcaagcattacaccatcaccctgcacacccatgggtcacatctgttttgtctccaaggagaatagctggtatatgagaaaaactctgatggatggacctagagattataatactaagcaaagtaagacagaaagataaaaataccaggatatcacttatatacaaaatctaaaatatgatacaaatgaatctacctatggaatagactcacagacataagaaacatatgtgcttgtcaagggggaagggggaggagaggggtgaattaagagtttgggactagtagatgcaaactattatatatagagtggataaacaacaaggtcctactgtatagcacagggaactatatacaattttctgtaataagccataatgaaaagaatattaaaaagaattatatatatatatatgtatgtatagttatataacggaatcacttttgctgtataccagaaactaacacaacattgtaaatcaactatacttgaatctaaaaaaaagaaaagaaaagctctggagtcagagaaatagtccattattatatcaaacatggattataatcttagtcttttcacgtgctaattacatggccatgagatgttacttcacttctatgtgctttttcaattgaagaatggaaataagacacattatattgttaaaaatagtgaagtgttaccctgaagtaatccatctattacttagataacaagtattatattttcaataattcatttttaaattaggtgaacattcacacacacacacacacacacacaaacacctttcagggctaaactagcacttgtgttctcctattttgtgtcaactccatagtttcctttctggaaataaaaatttcagtacatgatgccagccactcagatcaagaacatgtttgtcagatttcataaaggagtttcttgggaagagagggaacctaaaaataggtgactgcattggaaatacaaatagtccatccattatggcagtagcattggccaatggaatgaagaggacagtatgggtgtggtatgcaaatatttggttcagatgggaaaaaaaaaaaacctgccaagaaattcattctgattaagatgcatgagcttattaccacctgagggaggttagaaactattaaataaaaagcagttctcatcatcttctgaacccttaactactaataattgggcactctgctgatggtgcagaacaacttttcaagctgattaataggtcatgtatgttgaaaaggtacctttgttcataaaacaattatgctaatcctctaattttttccaaagattatgaagtattctaatctttgaagaatataggtttgagttgcaaatggtgtttgtatattacttgtcaggctctttaacattttttattttcacatattttatccttacaaccccatgggaactgcaatatagggattaataccctctatttaaaggggggttaataaagattcagaagcaatttagaggtctgcccaaggtgaaacatctcattaagaggagacagcattagaatttttattccctgagcaaatgctattttcaaagattcagtaagtaaatatttttatagttcataaaactgaaggaaatgttgcttaactggaaagtctcaactttactgggttcattttagatgtttacattattggaatacaattttagcttacacctatacaaattcaaaagttgctcattttcctgagtagatcgataagccgagtcaatgtttgaatatgactaaaacaaaattgtcaaaattatttcagtgcatggcaagcacacagctagtggcctagatacatcttgtttcttcccatgacaaacaatatgggatatcaatctatttttgtgagaatcttaaacactgtttaacaaatgagtgaataccatgcagcagttcaagaactagatattagtgttctaagaagttcttacctagtatagtccagaatgtaagatttagttatgagccatcttttgagtacaatcattgattttcaaatcaaggcatagagaagggtagcttatttgcataaagcagaatactgatgaatggagctcctggaatgttgaactcaaaagcaggagacaatctagtgaccaacattacttctaattgcagaaggtatttcctttcagataagaggattctaactctgtaacatctagtgtttgaggaattaaatgatatttgaaagtgttggtgacttagtcatgtccaactctgcgaccccatgcacaggtgcccccctggctcctctgtccatagaattcttcaggcaagaatactggagtgggttgtcatttcctactctagggggcatttctgatccgggggtcaaacctgggtctccctgcattgctggttaattctttactgtcttgagccaccagggaagtccccaatggacattcttgttgtacctaataaagtcaagacatttggtccaccctatttatgccagccagtcaacaatttatcaacatttgaaatgcttatagaaattagcatgttgataatcaacagatgcaagtaaaaaatattggtagcccagttcaaaaaggctacagtaagtttcccaatgtttcttatatgaattatatctgtttaaagatatggaagagattcatatttggtaaagcattagattagacagcatgcaaagttcccctctagttctgaaattctttgattctattcatcacaccacttgcagtctcttgttttacatataattaatgggaataaaaacatgaggtagaaccaccactattgctcctaaaacataagtttacggatttagactcaaaatataaacttcaaaaaagttaaaattcaaatttagagacaactaaaatgaaaggaccaaaaacagtcaaaagcattcaccttcagatttttgcctcataatagtgttagaatcctaaaaattaaaaaattttaaatatcttccataaagcacatgaaggattaatatctgtcttctttgattactgcttgataaaatattataacataatcctgtaatttctgcaccacttatttgacactttagccttacatgaacaaactgagtttgagccaaatgtactttttatgcatatgtgaagctgagaaatgcaaaaattgtgatcgcagggtacatcaacctcatgttccattagagagaaatttttagacagcacaaaggcaaggaagagtgacttggtgaccttgttctctgaacacagaatcatctcttctctgtgttatttgtacaaatcctgatcttttgtctgcctcagtggctcaaccagcataattatcctcctactctgaaaatagttaaaaatacatctgccaaactttttatatatatttccagaagaaatacataaagtagaatgatttcaatttaggtttcaattatttcaacaactgaagagaaatactgtcacatattaaaataatcctagcaatgctctattgccattaataaagagatgcctcactttgccaaagaaatctttgtaaacttgggtataaattcaattttacaaattagcttcattaggagacatcatgtctaaggagctcatgtggcaaagacttttacaaattaattctgcttaataatctgtatttttctagatacatttacctacaatgaggtaattttctgtgaaaattagtttacatatcttaagaacatataacatttgagtatttataaaagacaccttgggaatactctaagaatgaaaataatattattttttgatgtcaaaaagatcacaaaacaatattactataatctgtgcatataaacattatatgttattttctagcaactattacattagaaagttagaaagcatttaagaaaacttgtctttcatagaaaattacatcctttaaatgccaaaatgtaagataaaagatttcaagtcaacttttaatgttttatcaggcaattttgcttcagcatatttggacaatttttaaattgctttgttttgctatgattttaatcatattaacagtttcatatgtcctataagcaataggcatataaaatcataaaatattattaacaaatgcctttactctggcttactacaaatcaataaggataaaaacatacatactaagaatttaagactgcatcatttgaactgaatgtaaataacatggttatggaccatttatgaaccactctgatcaatcccaggaccttaaaggtctttgggcatttttcccaaaccaaatttctcctcttctaaattatcattggtataaggtgtgacgactttcaggcatcaattaatacaaattgaaagcaggcaaagtattaattaaacttgacactctgattatttaaaccttctattaaagctgattaatcatagcatgttgatagcctgctcttcaataatgacagatgatatcaaggcttcctgacttccttcaagtctactgtttccagctcttcagaacagaaggaataaatgaagtgaaaagaacagtggaacaagtcgactaatctcagacccccaaggtcaaactaaagcaatccatttcttggctttcatcagcacaagacatgatttatccatctgaaagcaggattacaaacattatacatctcaatgatatgttctttgcaccatgtaactttttgaacaatgatagattgcacagttgccagaaaagtaatgtcacgaagcaaaaactcattatattttcaaattaaaacatttcgatttttaagaacaactatacacattaacaattattactattgcacacttcatttggggagaaaatatcattttaaaattcaggtatttcttgggactatatatcacctttatggtccaaactttggacatttgtgctcctcaaaatatgactcttactctaatatttattgtttgtggagccagttaccatgctataaataattattaaacgaaataattttatattactacaaaattttaatgataatcactgtgttttcacataaaaatatttaataactcctaaatgataactccttccatagagccaaagccacttttagaaaagaaaatataaattataagaaacaccatggaaacattttttagcactacaaatataatcatataacaggaattttgccccaaattttagtattttataagctttaaagaataaatgagacttaagaaagaagtcatgcgctatttggattccgttattaagattccattaatttcccagtttctctctcatttgctacattaaggaactgttgtataagtcatagtcataagagcagttcaggaattattccatagagcaatgttagttaatttgaaagatttccactaaaattaaattatatgtaaagggtaactaattgcgatcatgaaaccttattctacgttctatatattttaaatcacatcactattttcactgatctaaattaatgatctctttttctatcaggtcacaattttagggaaattatgctgcctaggtgaagaggacagtaaaaagtattgtatctccagctgatgattcatttcaccagctgccagaatgctgcccattacagcacacccgtgactgattgggaagcatatttatcttggcacatcacaaaggagatggaataataattattctcccttgtaactaaaggtatttgggagctgtgtctccctacaaaataatacaaattacacagctggatgaagtctgcataattttaccatctgttctctatattcaaccatcaatatttcccaaagcagtctgtttgtttttttttttttaatatgagttttaaaagacttggattacctgtcaacatttcagaggattattatttttaaaattaatgcattgaatattggttgataaatacatattacaaattaatactttccattaggtactttccatagtactttttattaaggggattctgcagacttctcatattctgattctgagaaaataaatgtgttgtctgagttttacaaagaatcttccatacaaaaaaggaatatctgagtacctaacataaaagaacagaaagaaattagaggtttctttcttcagctgaagtcttcgcagttactcatcatcctaagataaaaatctagggatctgtactctctcctaaaaagttccttagtttaagagcttaagatgtaatttcaaattaaaaatattctaggaagagttaatgaaatttgcagaatcataatttgcaataaaagacaatatttcatccaatgtaaccagtgataacaaccttagtcttatgcaacaagtttcaatatggtatgaaataatctttttgtatttccttcaaaaacaccagcgaaaaagaattgcttaggatattgaaaactagaaaacattcttatgggagtaacattttaccttgttccaaaagtaagaatataaaaatattagcaacaaccaactgtgtggagattaaaaacaacagtcactaatctacattatttatacatatcagctcattatcataatccaataaggcacgtgctattattatgattactttttggtatgaggaaatctctttgcaacaacaatgatgatgatgaaaaatcactgaaccaatacatcaaagtttttagtatttgtatatatattgatcgtggacattatctatgtgtgaaactaaggctctttaagaaaaagaaaaggggagaaagagaatccttgactggcatctctctctgacagaatacatcaaaaattcattccaagctaataatggcataaatagtcttgaatatgcttaatatgcacaatagtattattgtacacactgaaaacaaaacctatgcctgaattattaaataacattaaaaaagaatatgaattatctccatgccactgaggtaccatgtcataaatgttatattatgggttcacatccaaacctatggtttgcccttgttttcagaagaaattgtctctgataatggattttagcaatgggcctctcaaaatgtttttagacttaaaagagacagccataaaccatagctatctctttaacacagagcaaattcaataaatactttacatgaaacctagtaagagaagtcttttctccacattgccacttacacactaattatttaaaaaacaacaacaaagcaacctatttatctctgcaatcaatagatttagagtcaaaatgtagtttatcatttcagagtaatgctagaaagaactagtttctggtaaatgtatgttctctgccacagttctagttataaagataaaaagattgctataaatttatgtttctcaataaaagaatcttttcatatgtttaaatttgcataaaggcttacatcagatagtatgaaatactgttttaacctcaactgctgggtcgggaagatcccctggagaagggcatggcaacccactccagtattcttgcctggagaatcccatggacagagaagcctgtcaggctacagtccatagggttgcagagtcagacataactaaactgacttagcatgcacacacgctggtttatgtgtccaaaattctgacagctctggtacttggccagatttaatcagcttccaatatacttgccaccagaactttagtctcccttcatttgaactgtcaacccttaggcatgttctctgaagtccaggttacttcatactgactcacctttgtacttgtttcgctttcttcaaagtctgtcccttcctctccctttatctccctttctctctcctttattacctaaggaacacctggggcttctctggtggctcagtggtaaagaagatgcctgccagtgcaggagacacgagttcaatccccaggtctggaagatctcctggagaaggcaatggcagcccactccagtatttttgcctggagaattccatggacagaggagcctggcgggctgcagtccatgaggtcacagaggagtcggacacaacttaacaacaacacaacaacacggatcaccagctcattgtttgagtctctgtataagcaacatctctctagataatatttcctcctttcatctctgtcagactgagaaaataatctactgtggtaccaatcacaccatgttacagttatttgattatatatttgactcaatggttagacaatagaatcttgaatgcaagtcctattcatcatgtaagatgatgcacaatagttggaacatggcagatatttaataaaagtcagatgaattaaatagcttcaaaattctgtctttatcttacactgtactacttaaattgttcttcttttgactttctggccatagattatgtgatttttcctgtataaagtccattttttatacaaatcataaaaattcatttttcaaagttctagattaaaaataattcatttatatatgttcattggaacatatataaactatcatgccacctaattataaaagggtgacttttatcacaacaaaaagtaaaagcagtcatccagctcctcaaatttacaagttcctatgatattccacagctatttacaggctttcataactacttgttcattaattacatcattctccttaattggatagttatgaaaaaaattcacatgaatactagaaacactcaagttttggagttcacaaattatggaacatttgtgagcagccaagagtccattttaagttgtatgtatatttttaagaaatgaattacctcaaatataaatctattcttttatgctttcaggtaatcagacaattcaaatattggctgtggaatacacaataaagttatttacatctaacttatgataaaatcaagtacatttttctgcacaagaccctgatgatgatgatgagaaagctaatgatgatgatgagaaagcccccactgaattccttctttaggtctactttttaaccatgtaaccttacattttattccttataaatatttcacagtaaatataactacttacttttcaggattttctacttcttcagtaacaaagttgagataaaacctaaaaagacatacataagttacaaactattaataaactttatgatcaccatccaaagtttcacattttaaatatttataatcaaactcagatttataaaaactttataaacaaataacctaagatgaaattctccaacactaaatgctcctgcattttatttttctattaaacagtatttatggagttcttttctatttcttaatttttttatggaggtataacatgaacagcaaactgattagtaaatagtgaacaaaccttaatgtataaacatgtaaacagtaaatgtgtaaatatgtataatgtataaacagcaaacaaatctcaacatataatgataaatttttatttatttatacacctacacaaccaaaacaaagatcaaaacataaaacatttctagtaccctagaaggttccctcaaggccctttgcaatcatctctttcaccctcctataaaggcaactactattctgatttctatcactatagattttagttttgctcatctcaatacaatagactaataatatctgcctgtataactattatacaatatttattcctttgtgtctggttttgttttgttttgttttgttttgttttgctggactttatatctgttggttctcatccatgttattgtatttagcagcatttcaccattctttatttttgcttttcgttgtatgactgtaacaccaatagagtcaaccacttatgggtatttgaattatttctaatttatagctattatgaatatggataccataaaaatacgcttgtgcatgtccttttggggaccatgcaatcatttctcttgtgcatatattcagaatatgatcactgaatcataggttagatacatgcttattattaaattatttttttttttttactgtttttggattcctaattgcattccagcaatatatgagactattatgtgttagtcactggggaaataaaagtaggaaatctataatccctctccttaaagagctcattgttcatagaatggtccattgtggatataacaacacaggaggcaatgctagagcatgtccaggttaccaggagccaggggtgaggtcaaaaccagactggcaggtcatagaaagtttttgagaggaggcatcacccaagcagaggcttcaaaaatgcttacctattagccctggtgagatggcataaggacattccaagtggagtataacacacgcacacgtgagtgtggtaaagctctgtatgcacagagacatgagctaaagataggtgtcctgcagtacaaagggtgcccaggagtgagaacagagtgaggacaagatggcctctggcttctgggaatctagatttcagtaggggtgacaggtcaatagaaacttgtagaagaatagaagtatgataataacatttctcagttttagggaattggcttactagatatgaacactgagacaaataggaaataaaaaatgggataaaagataataaattctcaattttcacttcttcctttcaattcagttttccaatatgcatcccatccaaaaatctcaagtcataaggcaactataagaacaacatgaggaaaatatgccttatgcataatagtaactatgaagttgccaatttttttgtatatttaggcagctaattttaggtccattgttagtcaataccctataggctgatactaaagaacataacattttgaatatttcccccaagacttgaacacttttgtcatctcttacatgacaagaagcattctagacacatgatatttaactttctagtcccatagggttgcaaatattaccctaaacttatggcccaagaaaaattcagattcctttccttcactttataactctccttatcccacccaggaatggtggctgcctcacatccttgacttctttttccagtctaaaaggactgctggagaccctttaaagcccttaaagttctctttcaaggttccaagatgcagcagacccctcagatatgcagacatagataaccaaattgtgacgatggggaaactaaggcatcatatgaatacagctagacatataaggacaaagacctttccatttcttcactgtagaggcttagaaaatgtccacaaagtgaaaaagtcatatttgcattgtactcttccattgtttttattattctttagaagataaaatagccattacataggtccacagaagcatgggtcgatcgggacaaatcctctatataatctaaaaccaagtgactagaatattagtccatcagcctctaatacacttaaagtatctcataacttcaaacaaagatgagaaaacctgtcttattccatctttattcacaagcaggcaactgatgctcatagttgtaaaaaaccaagacaacaggcccaaaatggagtcatttatgcttaatcctcgtgtcaccaaatcaaaacataattcagttaaagtttcacacctcccagaaatggaatccaaaaccagtcagttaggaattgccttacttaagtattcttcctggtagactcttgctatcccctaaatgaaaataactccgtaataaccaatctgttttttagcttagtataacttttttgttcccaccctttcagcctataaaaagctttctcttttgtacagctccctggagttcctttctatctgctagataggatgctgttaattcatatcgattttttctcaaactcttaaaaattttaatatgattcaatttatattttaataaagttaaggtgtctgatattttaaggactatatgtgaagcagaaacatttgaatatctgagagaacagtagcaacaaaggtgatctaaaaggttagcagccaaggatattttttaatgactagaaagtaattttctaaaaatagaggttgtagttataccaggaaggcaagcaaaaatcaatacttatatctggaatatgcactctgagggatttgatgcgtttgttataagcccaaggcaatgggaagtacaagaagaaaatgaacaaaacaaaatccaaggagaaaaaaaacctcacacaaaaaccacacacacacttagaaatatttccaggcctctcacctcaaaaatagccagttccttctaaacagttgttttagaaaccagtctttttccaacaatgttaaggaaagaaaggaaatatttatgaaaaaagaacccaatttcaaatattttccatagagaaaaggaaaggacttgggacatggtagcagggtgggaaggagaaagcttctaattttggtccaaacattcacatcctgtgggaaatatacctttatgctctcctagtctccagtcatgcatccatagcattctctatacatctactcaagttctctagagaatgttcacaagatctattgttccagtttttccatgattgcatataaaaggcactgcaaagctggcaatgcattctaatacccaactatgaattattttaaaaagaagcttattctttagattagatttgacacaatgctacaaaataatcccagcagatgctttagaagactaaatccctcgaggatacgatttaaaggggaaaagaaaaaagaaaaaaccacaatgaaaaactatttcctatcacatgttaaaaaaaaaaaaaaaattcccaccaagcaatatttagctttggatcaggatatgggactgaaattggttgagttcccttgggccacagggagactgacatatttctctgaatgcagacgttggcaataatattaaagttgttctgacccaactctgtgacctggctgggttaatgatttctttcccctaatcatgtttctgtgaaggagttttcatcattctaaaaaggtccagcactcctcataaaccaacagcctgctctattcacatccaaggtctggccgtgcctttttcctattcaatgggtaggtggtgacttgctaaccgaacaaggcctcccagacaacaagggtcttgctgcttttacttaaaccgtgggtggttaagttctgaggataatgactgcttctgtctccttatttgcagtgccccctacacttttatttttgcatcaaacattgtcagggcaggagcacagggagtggaggctcatttacggtgccccacttataattccacaacacagtcttttaatgccatcatgaaagacaaagaaaggtcagagaggcaggatcatctttgtaaagtgactacataacccccgctttgggcactcttttagtttccatcttgttccatttatatccagatattaactttttcctctggaattccaaaccagcagactatttcttctaaacacagctccctttttctaagacaaatggccacatattaacaagcaggttatttctacctacctgcaaagcagcattcaggtagctgaacagctgttggaaatatacaattacttatctgccccatatataaatcacttttatcagatgacattcatttaaaatcctggccttaatgtcttatgactcaaccctctagaatataagaaaaccaagtttcctgttctttaaaataggacatggacacgaggattctatgaggaagagtataatataaacaaaggttcatgtaaaccccatttgccctgtaaacagagtattgaaataaatttcaatgtctaagatggagccactaatctccaagtcaaccctgggttctatacttatttccctattttacattcattttccatttttcttttctttgttccttactcttcatcccataaaagcttcctgtcttccacctcctttttaagttctctggactcttgtttataccaccaaaactgtctttttaaaatctttctaataagagtaacattttgggtttagtatcaacaaaactaaagattaagataataagataattcaaaatgaaaagactctttatacttggagaaagctatcagccctcaaaagcttacagaagtgaagatttgctctccataaagcaggtgacttgagtattcggcccttgtagcaggggagtgagttgggtagaagaatattttaagattctgtgggaacagatgcatggcactcacaggcaaaagaaacttcattcaatagaattaatcaaaactccctcatgaggatctccacatgccacattcctgactgaatactgccaagcccccaacacttggctctaactgaaagcttttgtcacctccccaacttgctctggcccctcctggtgaccctcccagggcttggccgctgccccagggcgctggagctctgatcaggctgaatagccatagaatagatgattccactgctacccctgtgggagcacaactcctttttaaatttcttttcttgctcagcaccacattgtgctttggacaaaaataaaaagacttcaaaaatactaagacgaacacacatacacaatggctatcaaaatattccaaaagtacacaaatattttatgctagaatcttcagagctacaattttctaagaacttcaaacattatgcttcagatgccatgctaaaatttttagttcctttactctcctaatcctcctctagtgctctgaatttccataattcagtgagattaatagggtaaaaattccatttattgaaaaatatatttttatattccatgcattagttagagagtaagatcctaaaaactgaagaaacaaaaagaaattgtgtttgtatttgagatgcatttacataattttaaactagtgtagtttgttgcttttttaggctcatagaacattctcactgcaactgtacaattaactccataaattattttttaaaagaaatattgctactaattacttcaaaactgaaatttaattttactacaatcattttgatgtttaaataatggcatttctagtggcatttcttgcaataatcacctcaactgaatcttactagatcaataaaatttaattagaaaaaattcctactcataaccatggttattgttattcaagttcctaaacaaagcaagacataaatacaaagctttaatgcttcaaccaaaatgtcatcacattttgacatggatccatcacggaaatgtacctatggcactgtggttttattcatcttttctgcattttttgttttcaaatgttgaagaaattttaaggaatttataaagtcctttaaaatgtagcagattatccagtacatctgattttgctctcccatttactccttcttgcctttagagtaccattttacctcctgggaagaggttacttatttctatatctgaattctttctttctcataggaaggcggaaaaaaaaatcaactaatcactatttgcgtagaccttggagcttcagcttggaaggctttttgacaaagtactattctttagcggcttttggcactattatgcctttactcatccatacttataaatgacttgtattggttctcaagacccagcatttgtttattttttacattatcaggttaaatttacattatcaggttaaatctagtgcctgccttgactggaaacctcagtgatgtttgtgttaagttgtatacacagtgactgggctggtgaaggaagccacattaccttcctctcttcaagtacagcatatcatggtgaatcatggctgttcacaattacctagcacctcacttggcacttgaagtacttgaaggaattaatgaatcatccaatcaccagttgatagggatatcaacttaccagccagcatatgcatacattccataataaaaggccaatggcaatcccataatacttgcatctcttcctgaaaaggcatctttaaaatactgtgtttgccctgaaatatgaatagaaagattaaggacttttcaaacagctggttattattcattctttaaccataaacatgaaaaggggaagaagggggcttggggatggactatacagtttcaggtctagatttcttactctctgctcatttccaactttatctattaatgctgcatccattatagagaaggaatcccaaacatgtgctgattgctactaacactacttcacatttattttttttttaatttttgtgattagttgtcacatctattactgtaaagacaaataggcaattgttttaaaccatgtaatcataaaataccatttaagaagaagcttttgttgttgttattcagtcactaagtcatgtctgaccttctgcaatcccatggactgcagcatgtggctcctctgtccttcactatatccctgagtttgctcagattcatgtccactgagtcagtggtactatctaaccatctcatcctctgctgcccccttctccttttgccatcagtctttcccagcatcagggtcttttccagtgattcagcttttttcatcatgtagccaaacactacttcacatttattttaataaaatcatggcaaagaagaaaacaacatttcaaaaacagtcccttgctttagcatgcctctactcttaacagtttcaccatgaaaaaatactaaaggatcacctgtaagttatagtgtttaggagtgtgatataattctcaacagcgatgataagacagtgcttgggaagaattattcaagcgtctatcttcaatgaggaggtggcatgaaaccccagaaccaccttctcacatcatttaacttgctttttttgctttctccctatagttcattagataccaagaggggctgcaaaatgctgtgaaacaaatctgcttagtacttccaagcttgttttataaaggaaaacttattggagcacagttgggcttacttatttatctagataccatcagttcagttcagttcagttgctcagtcgtgtccaactctttgtgaccccatgaaccgcagcatgccaggcctccctgtccatcaccaactcccggagtccactcaaacccatgtccattgtgtcggtgatgccatccaatcatcccatcttgttgtccccttctcctcctgccctcaatctttcccagcatcagggtcttttcaaatgagtcagctctttgcatcaggtggccaaagtattggagtttcagctttaacatcagtccttccaatgaacacccaggactggtctcttttaggatggactgattggatctccttgcagtccaagggactcttaagagtcttctccaacaccacaattcagaagcatcaatttttctgcactcagccttctttatagtccaactctcacatccatacatgaccactggaaaaatcatagccttgactagacagacttttgttggcaaagtgatgtctctacttttgaatatgctgtctagattggtcataattttccttccaaggagcaagcatcttttaatttcatgtctgcaatcaccatccacagtgattttaaagcccagaaaaataaattagcctctgtttccactgtttccccatctatttgccatgaagtgatgggaccggatgccatgataccatcagtctatggctaattttactctccaacaataggactgataattgttgcagagatcacacggcacacaaagttgaaaacatttactatctgtccaattacagagaaggtctgtggacccttacctagagaacagcactgtttccttctagaagcatggaaaagaaactatattgaactttaaataggtttaaacacattgttgcatcaacatgtagactgagtgcttttatgcatcacagttttctcctctttgtgatgggacttttcttctatatcttttggataattaaaaaatagaaattcagatttagtcagtcaatattcaaagtaaagcataatgagtttctgtttcccaaagaaaatggcaaatgagattatctaaatgggaaatatgactatttcaaaattgaccatcatgtaagtaaataaaaggggggggtggaagacagatggtgtacataaaactctctccacacttaaatctcagtttttgtttgcagtttccagacaacaacatatatatcaatacagtgtgtgagttttgaggccaaaaatggagaatattgtgttatctactaaatgactctctcaaaacatccaatacctaaatatatctcattttttttaaatgacactgtcaattgagaaatatctattttattaaaacatctctgtgtcctcatagaagaaaaacataaatcttggaacccagattaaaaacatctgctgtctattgctttatcatgatctgtggtctcctaggccttatgggacaacattgctaaaagtgcaatactgaataaccaataaaagatacaaaactttgtaaagacttaatcctgagcacaaagtgttacaaaagagagttgtttccaaatttcaggagtatttggctgcataacagagctctcaagaagatgaaagttattagattcaaaggaaagtttaacaaatcctcataagagaatatagaacatacaattattttctgaatctcattagatcaaaataaatgtacaatctgggtaagtaaaaattttctcctcttgaagttttgtactaatgtgaaacatatgtgataagttagagacaaagaaatatcactgttttatagtaatagagcaaatatacctgctatgaataatctccaaaatatttaacttactttaaatgtaagagaaaattcccaggtcatttctctgctaagtgagatatataaggaaagctggtcgcattaagcactgataatgaaactggggacagaccactgccttgtcccctgccacgtgtttgtggaagttttaggctcctaggcttccctgagttccaaagagcgattttaatcagagaagtgagaaaatgcagaaacaaaggaaagcagtcaagaaagattaaaagaataatagtttagctataaagcaaaattaaaattccttaattattcctcaggctttcctcgtagctcagttggtaaagaatctgcctgcaatgcagaagacccaggtttgatacctgggtcaggaaaatcccctggagaaggaaatggcaacccactccagtattcttgcctggagaatcccacagacagagaagcctggcaggctacagtccgtcgggtctcaagagttggacacgacttagcaactaaaaccaccatcaccaattgttccttagggctacagctgacatcctgagtcctatccttgagttgtttcccagacattaaagcctgtatcaggaggaagaagctaattgtaagatgaccacaatcacatagcttgcaaattggctggaacctaaggattgataatgttgacctctgtgacctcacctttatcatcaacctatcagagtattgtgcaggagcttatcaggtaccctgtgaccttctccctcaaactctctttaaaaagtctttcctaaaaactgccagagagtttagattttttttaacataaggtgcccattctccttgcttgactccctgcaacaaacactatgctgtccttcaccacaatttgatgtcagtagattggcattgctggtccttgggtaagcagacccaagcttgattcagcaacaataccataaatattaaaggatcattctattgtaagtgtcaaaaaaaaagctaaaagatatgtctgctctcaaggaatttgcaatacagtaacatttgggcaactacacctcacctcacctcaccaacatatataattaagtggtaaaaactgactacagtcttacatcaaaaagagaaaagaaaaaaaaaatctttgttttaaaggactgcatgtcattttttggaatctaaatgactcagtttctgaaatttccaaaaatgtaagaaattccttatagaaatataaagagttagcccagaaaaggaaagcagtaacaaagtaagttactttccctacatttctaatggatcagataaagtatgagaaggccagctctgtggagaccaacatgaattagaagagttcttgttttcccttcagtgtaagctatagtattgaagatcttcattgtgtttattttgagttggctgaggttgccgaatttgatgcaaacatttagccgggagagttctaagatgtcccactaggttttcttaaacagacagcagtggttccctttccccaggtatagaatgacaaatctttccacctttgttatcgtttaatgcctctacattcagcaatgattttttgtttaattttggtatttcctttagccttgagtaatccttctcttgcaacttcatcaaatttctctataaactccttttcttggaacagacaacatcaatgtgaacatgaaaaactttacgtgccaaagttacacatcactcctttatcatttcttcttactttctaaattatttcctactactgtgcccattgttagttaaataactcactagacctccttctcatccaataatttcccctgaatccaagcaattgcctgtgccttcttacctagagcaattgaaactctaaatgacatcactctcaaccatctcaactctaaaaaggcaaatactcccagaaaatggtgttacatttctgtagaaatgcagattttacattaaaataatgtaacaataaaatacatttttacaactatttttattgtcaaatagcattttttttatgaatgctgtttccatatctgactctccttctgtcaaaattccattctcaaggtaaaaggaataactacaaaaaagtaaaacaatattttatcatttttcattattttccagatatctttttctctaatgtttaatatatccttgaactactttaaagtaaaaataagaagacacatttatctgtagttaaaactaacagcttattttttttccactttgtgttttcactacaaacagtttagaccaagagaaaattcactgatgccttattttgctgcttagcccaggcttaatcctcttgttgccaatcagctgtaaataccaactcaccccgcaatgttacaggctttcaaatcaattagatgacagtatagagtctaagttccatgagcagagagactaattaagggattctgctagtacaagtgaaagtcagtgttagaagagaccaaaagcagatacgtattttaaaaagcatttacttttcagtccatacctttaattagctgcatcactccagggactataattatcagaattgctgtaagcttgcaaaaggttaggaaaatctggatccgggcactccaactgacactcatgctatttaggaccatcaccacagctgcaaaaaaacagatatacgtgaagacgtcttaggtcctggctactcaaagtgccaaccatgaaccagaatattgccattcattacctggaagcatgttagaaatgcacaatctcagatgccaccccagacctaaggactacaaacatgcatttcaatcagatctctaggtgatttttatgcatcctgaagtttgagaaactggacaaaatgtgcagacaatacaaagttacctctcgttctttgtatgggctcccttatagctcagttggtaaagaatccatctgcaatgcaagagaccatggtttgattccttgtatatgttgataagagtgaacaaggattgtggtgccctaacaatcatataaaaatatcttctaagccaatcctgaggtcatcacacgcagattgttgaatgtgactctagcctgacacagtggacagctcttttcctccctcaatgtccgcatgcatagtgacctgccaacttgggatcacattaaagaagggacaaagttgggatcacactcaagaagggacaatgtgtggaaaagtgggctgggagtttattctgctttcagaattagccttagccagcactttttgtattttctctccactttccaatcagcatagtaaggagtgactttcaacttaccctaaatgtacaggtttccaagatatgttttggaacttgaaaaaatgttttgaatgataaatccaaaagtgtttccagagtaggatgcacacagggtctgaagccagcataattactttttcttggttatgctatctacaatgtcctcagcaactagccactcaccccggacggtggaccatgagaatcttgagaacagaacaagcatcattcatctctgtcttgctagtatccagcttcatccatggcccaggaagatcattaacacagttttgttgaataaatgaatgtgctggatcctcagtttttaaaacaaaatctgtaataccttcagccaaaaaggcatgagataaatggtggtactttcaggccctgcctcctatactattctaaaataaccgagttattctagacagcagatttcaactttatactctgtctaaaacctcacacttggtgttactcaccctctcctcccccctcccaacaaataagccacttcatacctgacatttgtagttattagctacaagctttatttttaaaaggtgtattttccctatacaaacaacaaaaatgaatgaaaatacttcttgggggattttaaaaaaaaacagaattcttacaattcaggttgcaataggaagctttccatatgtacactaatgagtgatcttcaaagttctagttgcctgatacaatcactagctcatttcagaatttaagaattggtgcaaatgttttcaacacataatatacaatagcaaaaatattttaaataatctagccttctaaatgtaggctgattaaggtatgtcttttaaaggggttactatgcagccatttaaaatcatgacacagttaaacattacataaaagatggttcatgacatgttactgaccaatacagaaaattacagagagacaaatagatgctacattaacatataggaagacaggtagaagtcaatgctacaaacatagaaataaagaaaaggaaaaattctgaaggactatttaccaaaacattaagagaaggtatctatagatgatagaatatggaatgagttttaagtttaaaagtttatttttctacactttttaataatccttataatgaacacaaagcatcaagtaaaaaaatcaaaaaaagcaattttcatctttgagaaaagctcaaagatgggaagagtaaggaaccatacaaagttaaaatagggggttactaacgaagaaatgtttcaaaggagacatgatgagaatgattagaaaggctgaagccctgaataagctatatggtaggctgagagaaatattctacctgtgtttgaagctggaaacatgaagaactagacagatccattgttaattgccaagtgcattattttatcagaaagataaaaagtaaaatgatttttctcgcccctgtaaaaagcacttatatactgaaaataatttaatgcaactctgcactcatcgtcatcaaccagtgattcttgtcctttttctatgcaaatggctctgtgataaatgaatcatcatatgaaagggattgtttttttagttaaggagattcagcattggtctgaaaataattggactcatgttcccaccaacacaaaagagcactgttttcttttaagcagagctcccaaaaacccaaacaccatttctgagagtactccacagtagaaaagggctattgtaaagagaggaagggaaaagaggaggaaggaagaagaaaaaaaaaggaatagagagagggaggaaggaaggaaaagaaggagggggaagggggagggaaaagagaggcattctcatattagaacctctatgtatttgggaagaggaaagaaggtttgttactttcataaagagtgttagaattcaatgcctattgaaatagaaaacaaaagtgagtgctgggaatttaatattttgtaaagttttcttagaaaaatggaagacaaaaatcaaacaaatattatgaattgataatctcaccttgctttcctctcaggcagctgaaatcaaaattctggttaagcctgatttctctcaaaaggttgctcaaaaccctgctttatctgagcatccagacattgccctcattactccatatgccaaattccggctgagacttacctctatgaccctgaagagatacagcttaacaagcaatgaggcagccagtacagagggactgtggaggtcctcaggtggcgagaactgctgtttcctcatgtgtctttacagagaagtctaagtccatgtatgttgcttatccaacaatgttgaaaagggatttgggattcactaaatgctaagagctttcagagtttctgaaacaaatagtatctactctggtttttacacactatctatttacactgtaatcattaaagaaatctgagcaagctttcatcctagctttacttcctttgaataataattgctaatttcatgcattaaaaattacctgtattgatttgatcttattattattttttgctgaacttaaatgttaccaaaatgaaaatagagagacatatagcttttatttacttattaatggtgctggtcggttcctaagaactgaaatgcagcaatgaaagttataggtataaactctggcaatcagaaatacataaggaagggagctgtgtttgaagaggatgtttagaggggtgttaaaaactgatacagtgatttaaggactagcaagcatttctttctgtacttcagtaattcaaatttgtcttttgttttgtagagggaggttgctaagtctggatatattgttttgttttgtttttttcccaggttcaggttctccctggcttctggctgctttgtgctaagctggtaaaatatatggacactgtacggatgcatcatggtgagctgaagtgaactgtcccactgttctttgtagcagctgcctgggttgcccccatttttctgttagcatttgtttcctggacggattcattgcacagaagctatgtagcaataaatacctttttgaaggagagaggctatatccaggatctcactactgggaataaaaatggtaagcattaaataaatgtacactattatatgacacatattgtgcgaagaccttacatgaatattatttaatcctcatatctctatgacttggttaccatcatcagcattatttttcagatgaacagctgagaacccggatattacttaacttgtccatgttcacagaggtaaaggtgaagataagatggaagccaagtaagctgactccagagtccacaattttaccagcagttcacaggtaacaatgaggaagcaggtcaaaagacacatatgatttcactagttctctcaaacatctgatgctcttcctctctgctaaggatcatgtttatcttggctgggatttcaagacacttgattcctcattttatttctcatccttctgaagggttgattgttgttttgaagtccttgtatatttcaatactacatatctctacctaagaattgattgtcttggtatttagttatggtagaagaggagtaaagatagtccaatttggggtttaaacagagccactttatgtgcaaaatttgaaaagctagcacagaactcaccctagactttctttcatgtaatttaatgatgctagtagaatacagtttgaaaaaatacagtaatgcatttatagaaatggctctctttctcacatcataatcacaagtgttattttgtttactttctccaattattcccataggttgtcagaagaagctaatgttctttattcacctatgtaaattaaataagaaaactgagactcagggaggttgttagggatgtgtctgagataagagcccacatctgacataaggaacttttattagaatattctgccactcaagtatatacttaaacagggtctggtttcaggagaccagaaccgaaaactaaatgtcattttaactcttgaacatacttcagtatttattgaagcttcgaggagagtgaaaattcatgaagttccatagaaagtaaagggagcaatggccctttacctagggacactgggctagaggagagaagacaaaggtgaatatataagatttccctactcagcttccacatgcctgacatgcttgccagaatggacaagacttagagtaagcaaaacccttttttctttaaagacttatttttttttaatgtggaccatctgtaaagtctttactgaatttgttacgatattgcttctgtttcaggtttcagttttttggttgctaggcatgtgggatctagtaccacgcaaaggatggaacctgcatgctctgcactggaaggcagaagtcttaaccactggcccaccagggaaggactccaaaacttttcacctttactaatttgagagaaatgaagttgaatactttcaaaagaggagaggagtaaacccaaccagtctccttcattcatgggattttccaggcaagagtactggggcaagagcacacttccttctctacgggaccttcccaacccaaggatcgaacccaggtctctcacactgcagacagatgctttactgtttgagccaccagggaagccccagagggggtatttagtatttagcaatgccacactcccaccccactctcacttctcaagtgatcagttaacatttcacaaaccctgaaatcccttttcgtctatgatttgaccataacaatatccttcaagtttgttcttcttctacacttgaactagagaattcaaactaccacaaattgcttccatccctgtaggagaacatagggaagcaattcatgcaattaaactccgttttctacatctcactaacctttcacccccagcaggcagaaaatcacctacctcctcgctttgaaccattcagaatgtgagatttgcccccaggtaaatgtctccttttctatctccatctccacctgctgtcgctttaaagctaagttctcaaagacagtttgactttcccaattaggccattgatttatatcatctgccaccgagttgcaggaatatctagtttcatctttcagtgcttctgatcctaggaacaaatttcctcagaaactcaagcttgcatcaaaatctgtaaattaatgttataactaatggcaaaaatggaagaacatgactaagttcatgcaagatttactcaggctctttgttagttacaccatcaccaaactatactacagcttttgtaaactgcaacatatttaatcattcttacctataactgctttaaatttttgatttgaacagtttccatttactcctctaaaatagttttccctttaaaatgtttaacagaactgggacaaataaaggagctatctagatttaccaaaatggtaatgtgttgtcattatctaattcattccaagtccttctcaatccaagctgtggatttgtaaatgtttacataatatataatgaaagtttgctgttacagcttttaatcagtaacctctgattggcaatttacagagctctcaaaatgctacccgtgtttctcttttcaaatataataattgtgatatgattctgcctcagtcagttgagaaacaagaatgaaatgagtacaacagtggctactgatccagtccctaagtggaacactagatttatcaagaactttctatgggcaaggcactctgctgaagtcttaaaaatctaacttcattcttccagagccattcaagataaattatcatctcacaggtaatttaccaataaataaagctgatgcttaatgagatttaatatttagccccaaatcacataactgaaaatcccgactctaaatttcaattccaggttgtttgcctccacagcctgagctataaccacaatgctaaaatggttcaaaaaattaaaacttcatggtgttagatctgaacaaaatctatttcatttacctccatttcctgctgcttgagaacgtgaagatgtgtaattctttaacacctaggcattccattagcttctctactagagaagaatgctcatatctattctcattaaaatcagtcatgaacaaatatttgttgagcacaaacaacatactaggggctatgtgaagggctggaaacagcagttagttaaggacctggtcttatggaacttgatgagatgtgttcccacaagagtataaaaagctaccatttgtaatttcactctttaaacttttctagcattactcaaaacactttatatacacccttttaatatcatttaatcttcaaagacaccttatgagactggacatgatttataaataagaacaccgaggtgcagaaagaagtgacttgaccccaagtctcacagccgtagtgtgtgtaaagggtaagatcaatcgagaacaccattaccactccagaacttagacatatatcattcaagtgtttttcttggtcttccctcaaatattccacatcacaattattacatttcatgacttaagggaggaatccaggatgaacctacttaagtgcagcaatatggagccagtactagagatgttttatgtgtaactcctccctctttcctactaatcactcagctctctacggtgaaatgttcacctttttcttacaacaggaagttggagtcatactgagcctcacatcacttacttcatgttgcgcatgttcccctttttttacttcctttttttttaaaattctaatatctgtgcccaacgatgaaaatgagcaacttcctaatttggaaatgataaagaaaactcctatttgagaaatgctgctgctgctgctgttactaaatcgcttcagttgggtccgactctgtgtgaccccatagacggcagcccaccaggctcccctgtccctgggattctccaggcaagaacactggagtgggttgccattgccttctccgttgagaaatgctactaataatcaaatgttggaagaagagtctagtgaccatcaacggacagctaaaatccgaacacagagtggcaggtggtaacactagaaaattcatggacacaacatatacacccaacacacacacaccatttcatgggggtaagggccttatacttctacatgttattgctaaggaaggatattttataattcagaacacccatttaaaaattgggttttcacttgtaaaagtctctttttatgcacaatcaagttactgttttactaacaaggttgttttgtttgcctgttttaaaagattagccattacatctattgacccaatacaaaataggcttataatgttatatcaggcatcactccaaacccttattcttttctttattttccaacacaaatctggcgagcagttgtaagcaagaacaccaccatgtgaggagtagtaccaccatgcaaaaagtctccagaaattttgtctccaatcacttttgtaggggctgttttctttttcatatttatacctatgatactcacttatgcccacagctgtaatgagcttgatcgcaagttcaggaatttcacagtgaataaaaaatggttccagaatatagcgtccaaatgccagagatatcacagcagtggctgcagggctagaagaaacgcatatttaggttaaccacagggaaaaaatagcactttcactaactttttctaccttgaggtactgttactcagcatatggaacatattcaatagagaagtctatgatttttcagaactctatatttgattcagttcagtcactcagccatgtctgactctttgtgaccccacggactgcagcacgccaggcttccctgtccatcaccacctcctggagcctcctcaaactcatgtccatcgcatcagtgatgccatccaaccatctcatactctgtcgtccccttctcctccctctatcatccccttctcctccctctatcaatctttcccagcatcagggtcttttctaatgaattggttcttcacattaggtggccaaagcattggagtttcagcttcagcattctcttccaatgaatattcaggactgatttcctttaggatagacttggatctccttgcagtccaagggactctcaagagtcttctccaacaccacagttcaaaagcatcaattctttggcactcatctttctttatagtccaactctcacatctatacatgaccactggaaaaaccacagctttgacttgacagacctttgttgacaaagtaatgtctctgctttttaatatgctgtctaggtttgtcatagcttttcttcatggctgcagtcaccatctgcagtgattttggagcccagaaaaataaagtctgtcactgttttgtttccccatctatttgccatgaagtgatgggaccagatgccatgatcttagttttctgaaggttgagtttttagcctatatttgattaggtcatcacagatattccaaatgaaatactgtctgcaactttggtagctagtttttaaacttcacatctgcttgggaacaaggctgagtgctgtcagtttttcttcttcccacccatatttaacttttttcttaaaaatctagtttattacttgagatccaatagggctgggccatacaagaaatagtctcctttctcagaaagtcaatgattaaattccagcagaatagggatgagttaacagcacagtctaatgggttcagaaaaggaacacaaaactcaactttaaaaaattagtattaataagtgttcattgcaaatatatgcttacatgcttgacattgtattagtctagatttttccaaacagaaaaaccttgaaaagccaagtgattattcttaattacatagaaatatttaggtgaaaagtatgtgttgaaaaacaaaattagtcttgtaattttataaatagagaaaacatgaatgagataagaaaatgaaataagttcaggtatatagtaaaacaggtagcaaatgattctattttagcttttcaactttctgttagaaaatgacacaggcctttccagtttaaatatactgcatatgaatgcatgtttgttagatacacaggcaagtcaatggaattattaaatttcccatgccaagtcttccatttcagtttatcttccatctcatggttactcaacctccaggtctaacacctagattgtcaggaaaccaaccaccattatgtattccaaccctgacctgctggtattagaaaccaagatagatttatttatttttaattggaagataactgctttacaatattgtgttggtttctgccagcatcaataggcatacatatgtccccttcttcttgaacctccctcccagctcccacccaatcccaactcccctaggtagatacagagtaccagatttgacctccttgcatcatatagaaaattcccactggctatctattttgtctgtgataatgtatatgtttcaaggctactctctcaaatcaccccactctcctcctcccccatgtccataagtctgttctttaggtctgcatctccactgctaccctgcaaataggtttatcagtaccatcttcctagaatccattcatatgtgtgaatatacaatatttgtttttctctttctgacttcactgtgtataacaggctctaggttcatccacctcactagaactgactcaaaagtgttgttttatagctgagcaacattccactgtacatatgtaccacatcttctttatccattcatctgtcaatggatatctaggttgcttccataccctggctatcataaacagtgctgtgataaatactggggtgcatgtgtctttttcaattatgatttcctcagtgtagatgtgcagtagtgagatttattaatttttttttccaagataatctcctcctgaccacaagacaatttttcttattctccatcatttataaacttctgatgtgtaaattaaaatctaatcatgtcattttagtgctttcaaaacatagaatccacaaaaatccttcagtacaaggctccatctggtcaaaactttctcttcctcttcagtgtgcttcctcccactagaaggatctgaataccctttgctagagcccctgaaactcactgacagtttcttatacctcaggtcttagttcaatctttttcccaaggaagcttcttcagtcctctaattgcgttagatctcccagagtatactctcttatggaacttcatagcccccctttcacgtgtgtatcacagtagcaactttttattctcttacatgatgtcttgattgataattgtctccctcacttgaccgtgagcttcgtgagtatgactgtgtgcacatcaatcactatttcatcctcagtgtatggtaaagtgtctagtaaagtgtctgtcacacaacagaaaactaatgaatacatggtgaatgcatggattcaaatgaccccgatgtatgatttctttttacgatttgttacagattatttctgacaaaagtgacttaatctgaagtacaattttaatagtaaatatttaggtaccatgggtactttcaatggaagaggaatgttatatgactcaggtactttgtcacccctcaagtcattcattactctgagagaacaaccgagtaatgtgagtccatatcacaaagaaacatatgcatccattacaaaagcttctagaaaatatttaggtaattgcttccataaacacatacccggtgaagtagctatctaaggtaatatgattataagctacttgagaagaagaactgaggctcacttcactttagatctttttaacttgccatacatcactcagtagcatagtctgtggaatgaacagatgaatgaatgagcactgtgttggtgctactagtgcaaatggaatgatcaagtccatcataatgctgagcagttaaccaaagtatggctaaccaacacaattagccagtacatggctggagagggactccagctcagctgcatcaggccccaaagcccactattctgacaggccaccactctaaataagaattgtacttatttaactactgagtatattttattcaaactattagggtcggcaaaaaaatctgttagggattttccatgccatcttaatggaaaaacctgaatgaacattttggccaacccaatataacttactgaaagattgaatatttactaaatttttcaactgctattcaaaaagaatttaatatatgacaatcagtgcatttaatatatgacaataagtagtataagagttacaaaaagtgagagacctggttttatatgcttgaaatgcttgcagttttaacatggaaacagagcacagattcctaaaatattcagtaagaatataagccagcatgttcaatgtcaaatgagaagcagagactgcattttttttttccagaagaattaagagaggaaagaaatactataaactagggtgaacaggaaattaactgtggaaaagatagaacttaagttgacctttgaagagtaatcttcatattatctgaaaagagtagaaggcacctcccaggcaaatcccagagtttagaaaaagaacaaaatacttctttatcattatttcataataataagttttaaataatgcaaaattgcttaaaatgagaacagacttaacaaagatgtaaatactattctaagctctttgctaccaaaaaaactcctaggactataaaaatcaagattagtgttaagtcaatacttattagctctgcatttaccacttagctctaaatgataggataagagctcacaggagctttcagctgtgtaagtctgataagtttacaataagaacaagtttctttaattatttctgttaaattctgctgtcagaatgtgctagtcacatttcatggaagcagtttgctttaaggataatctgaagttctcacgtgacatcataagtttcccacaaaattggaggaaatttgctattcagagtgacttagcattatttggtttgattttaaaccacggcaatcaggaaggggaatgcattcttacaacaatataatcaaaaagctttttgcaactgtagttcactgatttgtttaacgtgaggatatgagtcactgtgacaagtgtgtgtgtttgttttggttttttttttttttttggtagaatataaaacttgatgacatactaagttgctaggaacagaagtttcctagtcacgaaaactgagtaaacttaagatggcttaatggtgtgatctacaagaaggaaaaccccagttcctaggagaatatttaattttgtcaaattacaatttataatcaaacaaaaggtctgatttatcatggtagattttgacaattcacattcttttaggtcagcatctttcctgaaaatgatttagagaatagttgaatattaacaacaagcagatgctttgaaagtttggcatggttagaaaactactgccagtggcaaaatggcactaaaaacattaattgagaaaggtatttcatcccagattttatgtcctgaaggagacatatttaccacatagtcatgcatatttctaattatttaaaaataatcaaagcgattcaaaaatgggataatgaatagatttatttttccttaatctttttttctgtctaggctcttaccgtattatgagcagttctacccagactcgcacaaaagctggtaatgggccaaagacttctagaatatatgtgtaatgaccaccagatttctttatactagttcccagttcagcataggacaaggctcctgtgaaataattgtgataaaaaggcacaagttaaaatattatcaagtcatccagcagtagaatggacacagcagtatttcatgagatgacactacttcctttggtttgaatgacaccctttttcaaattaaacaatactaatcaaattcctaagaacctccaaattccctttgtaacttcctcatgcttgaaatctcgttctttctgttcaaggtaattttacctgaaatggtaaagacaaacttctaaaacaatataatattattaagaattttgaatccacaatccatttttgaagaacataatttcacatcaagacaaagagttatatcaaattgacctcactatattgagcatccttttaataaatgatgtttttgtgacacatcaaaataaattaaattcctctcttctcctgaaaagtattgtctcaagattttggaaggcttcatttaatttatagggtatgttttgtttatcaacaaaattaatttgactcagatattctatttttaggaaagtttcttatggatgtatttcagagtatcattcctgggtgactgaaataaaagttttgaaaaagagatgctttaacatatttatgaacatggagataaaattatgaaccaatttttaacatttagcaataaaattcacaaagatttgagcagattatgtaatctccccaaacctgtttcataaggggattgtgtgtataagtatgaaaatgaatgtcaaggacagtaataggcctgacacacagaaagcacctcatgaaatacagctttacctactactgtgagcaacttattgtatatataatgaaaagtatatcttgacattatgtgaaaagttctacccatactgttaagtactcaaatgtaagacataatttctgcctgagctactctggagactaaaagcatgagaattattactaatcagtagagcttcaggtagaactgtccaacataagcataatttggatagtcagcaaaatcttagtgttgcttatcctatttccaaactagaactgtatcagagtcacctgggaacaattttttaattaaaataaaaaatacaaccactaaggccatcccctagacctactctctgatcaagagaagccagactcttcaacagaggaatcaaagaaaatctattatttttaaattagcacagctaattctaaagtaacttagtctacagatggatagttgggaatcactgatacagtttgtccacttaaaactaactataactacttgcagttcattctctattggaaaccaattgccatgttggtagactgtacaaaaaatcatccaatatcaaatgttattagaaaatgtcttaagaacctcagaatttatctccagagacttaatacctagacctatgtattctttggttaaactccaggatggttgccccaggtttaaattgagtgctgggaaagtgaaattttcatttgaaggtctcaagctccataaccatattagtcagatgaaaacagttcaaaataggatgtaagaacccatgtatttaacctggctttagacaaaattgtaaccacaatatacacattctatactcttagttccagagttttaagacaaagaattttttcccttatattttgctttgctttctgttaggaaggcactctgtcaaaagttcctaggagctcgtgaccaacgaaatgcaaacatggagaaatagattagtatagaagcatattccctgtgattagtaatcaaagaataccaactcaagtgtaaacttagctagtctcattagtttatttttaatcacttgagatgacacacttatgcagaagcatattttcttagtacaagtcaacatcactttagttaatgctcagagccacccattttatcatatctgaatagccttttatagtatacaaaaatggaatcacgtagtggaggctgcatgcacacaggatacaaaatccaggaaactggttgtggtttctcctattagacgatgatttattctgaatataccaagtgttggggaagattaaaggccgagggtacacaaaatcatttaagaagatcaataagtaggtttctctttgtctataaatgtgtatgccacatcatatgaataccataaaccctttgtaaacacctaaatataattcctctgttgatatttctatactaagtttttatttcaacaagttttgtttaaaatactttcttcctaatcatgacaatttgagttctctagataaatgttcaaaccaatgcatgaaaaacattgccaagaccttcagaataaacaggttggtccatgtaggaccaagagttagtagtacttggtcctagagagttaggacaaagagttaaaacctttaaagagcagtatcttttggaataaaaaaagcactatttgccagagaagagcaaatatatcttagacattttccccatagtataaatacaatttagttttcttgaccattcaccagtttttaacacctttacagctaatccaagaagcattccagtcatatgcccacctcatgaggggacatttattatctctttattattaattatgacatcaataaaagagatctaggttttgaaaaaaagttaataatcacatttcttctaccagttctaccaattctgttgagactaactctgcagataggtggaccaatgacctgtgtctccaaagaccaagtgaactgtaaacgaagaaaacagagctgggcaaacagcaagctaatacccaattccaattttacaatttatattgcaaaaatttatgggtactggggagagatgaaaagtacaaaaaaatgtgaaatatgctcacacccttgcaataatccgttacaaaaggagctgaattatgtgccatcacacttcgatccacattcaaggacttttgaaagaagactaggaactgacaagcacatgaagttaaaaaaaataaaagggaaaagactgccattcatttgttttgccaataaaaagtcagtaaaacttctgctgagaactcagttctgtgtcgaaacaggccacactgggtttcacttcacaggtgtttcattcagcttgccagctgccaagacaccccaaacataccttcactgagcacaagtgccgggtacagaaaattcatctgtattttactgggtcatcaaagttagcatcaacattcgatgccaaagggaaaagtcagcacatagagcgccttggtcaggaaaagagagcacagacttaggatgcaatttcagggaactcagcattctgccaacagtggacagtgtgcttagatagttcgcatacctcccctaaaatcagaaaatctagggtagcctttgccattcattcactcctttgaaatctccctctgctctcccagacagcacagtgctcagccccacagacacacccccagagaagcaggaacactcaccaaacagtgacagaaccccacagaccgtccagaccaccagggacaagcccacgctgcctgtgttctggagcacgcccttaggagagatgaagattcctgctccgatgatggtgccaatgatgatggagattcctctcaacagagtgattttcttcttcagcacaactttctcctgcccaggtggctccttgccgcccacggcaggcagcctcccattaacactgccctgcaggtaagccccattggagatggtggacaccacaggctttctgaccatggtagtgacccgcagggggaaaaggaaatgaaaaaaaaaaaattgttttttaattccaaactttcaactgtggtgtctcttggggtgactgaccgatctaatctctttcctttttgctttcagattcgcagtgattttgtgctcccaggtaaaagagctaaggtgtattttcaccttccgcgatctaattacacctcagaaacacctgtgtgttcgatcatggtgctctggttcgttcacctccccgactacccctgctgctgcggctgctgctgccgccctatcactacagaccagatcagcttcctcatgggctggtatttaagcgcctgcctgtcacaccaacttactccagctagatgatgatgcaaattctccaggtttgcatcagccacatgagaaagctccagcattactcagctctttttttttttttttaaacacgagcagcaagttgctcaactgaccaaagctttcaaagaacaaagcacacacttaaa

SEQ ID NO: 197 - DNA, 3413 bp, Hippotragus leucophaeus
  source 1..3413: mol_type = genomic DNA
tcaaaagccaggagagaattgctccgtccctgtgcgcgccaaagctctccaaagccgcgaggctccgggagcccagagcccagccttcccagccggcgcggagccggcacctgaaagccaggccgggccggcggacctagcgcgcccggagcaaggacgcccggctctgcgctcaggaaggaaaacgacctctcccgaaaagactgaagcacttttttcctctccactgaaagcccggggcacagcccattttgaaccagaataatttagtctgacaacagattcctcctctgctcacagctggcccagagggaggagctgaaatctgaacctctcggctgtgattggacccttctcgcgaaagagaggaaaaaaaggcctccccgccgccaccgcgggctcagtccgcgaggagcccgcgacctggcggcgccgcgcgcgcacctgcggggcagagatgctgtaggaccgcgcgccccgcgccccgcgccgccgccaggatgccgcgctccttcctggtcaagaagcatttcaacgcctccaagaagcccaactacagcgagctggacacacacacaggtaagggggaggtgcagatgtccgcatctcagtctgtaaataggtaacgacaggggtgtgccgccgctcgactttgatacgaaagagctggacacccaggctgtctgctcccgaaagagcggtccttcctcagatcgttcgggctcgggtttaattcaaaacttccacactctgagctggcgagatcttccctgggctcttgcgacgtcacgttccgcagcgtgtacatacttgcataatgaggacgtggaggctgggtgaggcagtgcgtgaacgttgaattattgcctttttcatgtaataaggctccttttctccagaaagcggcttgatttacgccaatccttgtacttaccggcgtgagccaagcaagtaccccacgcataagatggaagagaacttttctgtatctttagaaagtgggtaggtttccccctgcgctcgctggtcgggcagccccccacactcgctcgtgtgcggggccgggggtgggggggtggtgcacaaatgagccttaagcgcagtgaccccgagcagcagcggcggaaaactaatgtcctcccagcgcctgcctgctcctggggagtctgtctcctcgttccctgcgcaggcagcctggctcttcactgcgctttcacggtgccctctgtctcacgccccgctcctctcctctctccgcagtgattatctccccgtgtctctacgagggctactccgtgcctgtcatcccgcagccggaggtcctcagatcgggagcctacagcccgatcgccgtgtggaccaccgcctctcccttccacgccccgctgcccgccggcctctcccctctgtcccgataccccgcatccttggggcgcgtgagtccccctcctccgtccgacacctcatccaaggaccacagcggctccgagagccccattagcgacgaagaagaaaggctacagtccaagctttcagactcccacgccatcgaagctgaaaagtttcagtgcaatttatgcaataaaacctattcgaccttctcagggctgggcaaacacaggcagctgcattgtgacgcccagtccaggaaatccttcagctgtaagtactgtgacaaggaatacgtgagcctgggcgccctcaagatgcacattcggacgcacaccttaccttgtgtctgcaagatctgcggcaaggcgttctccagaccctggttactgcaaggacacatcagaactcacactggtaagagaaacacatagtcagggtgtcgccgtccagcagaaggaagctctgggctggctgtccgatttgccttaagtggtgacacagtacttttgatgatggatgttcagttttagctacttcctgacgactcaaaaagtcgtcaaagcacaaagggctccactgcttgctcacagcctctgctcccgagactgcaaacagcatttagactttggaaagttagattcaggaggtttggtctcaaagatcagttagcaaatcaggagagatgtgcttggatgtgtgttctgtgaaatgtctcccaatgattagcaaatacagatgttgttctcccaatgaattgattaggcagaaagacggatgaagtttttggttcttggtttttgttagctacattcttgctgtgctgtctctcacccacagcaagttggatagtgagagctgaatttgctttccgttgtttgcttttgttttgtttttgcttttgagttttctattcctagcacaaaatcaccctgccaggagcgggggcactcacccaggcttagtcataatacagaaggagggaaaaggggaaatgttgggaaacctggggaggagctggccgttagctgcacctgccgaagaagagagcttgaacaagccaagtcctaggacaacaggaattatttctctaggactggcagcagcaattatatatatttttaattttttaaatttgatttttttttaagtgcaactttcacatttgtcttaaagggccagacattgaaacaaatattgattaagggggatttgaatcaagttttgctccttctcatgcttttggcaaagtgtgaagattgctgtaagcctcttctggatttgcatttcctctgaaaacactgaccatctttctttctccccaccctgccccaccccccaggggagaagcctttttcctgctctcactgcaacagggccttcgcagacaggtccaatctgagggctcacctgcagacgcactcggacgtcaagaaataccagtgcaagagttgctccaaaaccttctcgcggatgtccctcctgcacaagcacgaggagtctggctgctgtgcggcgcactagtgacacagcccctgtttactcgggcagacgcttttctagttcacttgtcacgcattttacttgtcactccacctctgagcgacaagtaaaagtcctaaggcattttgtcttgtgctgacaaacccgaataatatgtatagacacacacacacacacacacacacacacacacagctgccagggcaggggattccatgtgcatcagattaatcctttccatgtgaagtttaaaatgaccgtatatttactgaccgttagatggagaggataaaagacaagaatcttgctcttctgagatgaagcaaaaagcacattgcatctttccttactaagaaagaatgcaaagatttactttgctgccaaagcatttcaactgaaaagaacagtgttgccttgtacgggatttgtaatagattttcctataggacaagaatctgccagacactatctcaggtgccttataaagtattccaagttcactttgttacatgtgtcatgtc

SEQ ID NO: 198 - DNA, 154233 bp, Hippotragus leucophaeus
  source 1..154233: mol_type = genomic DNA
catttagataaatcctgataatccacctaacattagtttgtgtcaattttataatacattgggagaaactttactattgtacttaatggtacagtttcatacatcaagtatttccattaattccattattagtgacagctaaaaagtgaccccatcaaatgaaataagtgacattaactgtgcaagagtaaaccacatctggattgctttctaaaattcgccagtttgcagaaagtaaacattctttgatttgatcataatatactgaaattgcctataacactggtgcagtaaaacagctagctcctgtattgttacagtaggacagattttatagtataaagttaacagaaaaaaatgctcacatattatgtggcgaaacttatttcacaaagagaccattaaataaagggaaaataaaccatgcagaagagatggcttccctgtcgccatctgtttcctatgggctcactcactaccacacatcacttgccacactatcaagtgactcctttctgctttggcgacagaaggttcaagcggaagatcctctcccagaagctctgattctccaccttcatcacctggtggatgataaggagactcagattaaggacaagaccgaaggtgtaggttgacatgcatcagactcacggtgagtacatttgcagcacacgtgaaacctgcctgacgcccatttcagagaacacagtaaaagaaatgccacgagtcagagtcttgcaaaggacagctgagatcaatttctcaatgttaaaatattataggatatgaaaaaagaaatggaacaaaaaatatcaaattcaattttaaaaaagcatgtgcgtgcatgtgctaagttgcttcaatcgtatccgaaaacttgtgaccctgtggactgtggcccaccaggttcctctgtccatgcgattctccagacaagaacactggagtgggttgccaggccctcctctaggggatgttcccaacccaggaatcacacccacagttcctatgtctcctgccttggcatctggtcctttaccactagcactgcctgggaaaccctgtaaaaagcctgtttactattaaaaccgccctatgctttacgataggcttcccaggtagctcagtcataacgagtccgcttgccaacgcaggagtcaagggttcaatccctgggtggggaagatcccttggaggaagcagtggcaatccactccagtattcttgcctggagaatcccagggacagagaagtctggcaggttacagcctatagcgtcacaaagagtcagatatacacgcacacttcacatgctttaaaacaaattctgcttttcaggcgggattgcctagagatattgaccaacacagttaagcaatttttacattccaactaccatgttgcaatggaagaaaaagttctaaaaatcacccagccacatgaagcccatctctataaaggtattctccattcctactgacaccactgttgctaaacataacattaaaactcctacctttaaaatgtgtcaataagccttttacatcaactctccagctgtggctcacaggctcagtagctgctccttaccatgtgggatcttacttccaccagggactgaacccgcatccccagcattgcaaggtggattcttagccactggtccacaagggaagtcctaatgtgaccttaaattttatattcttttttttttttaacagaatttataactgaagtatttgtcaccagtctacaacattatattcgctaaagccttatgtttagaaactttttcaatcactgtgattttaggccagtccaaagggtttctttatttatagcaaataaatatatatcagtgctttatagtttacaaagcacaacactttcacaaccatcagttcttggtattttcttttaaacttctctggccatttcttcttagatcccttcacaaactctaatgattttttaagtggagtattaaaacagggttctatcttagaatcttttcttctggcccctacgtattcttgggtgaactaatcaacccctgtgatttttagcaccactgtatgccaagagtccccatattccttcctcctgagatataaaactcttatatctaaaagcccccatggacttattccatctagacaattctgtgtctaatacaaacttccatgtgctccaaggtcaacatgtccagcacctgtcctcattcctctccctccgccagatctgctgcttttgttctgagagtccttactgctaagtaaatagatcactccctctttcttcacactgttagttaccaattccccatcacagtgctagtctactcctactgttgctacctcagtcacttattttttcctaacccattttcctacctctagtcttatatctccaacccatttacacccaaatcatattgctcctctaaagttctccaataattttcctttgctttaaagtacaaactccttaataaggtatacaaaggcctttcataatccagaccctcccttccctttctggattgatcagtggtcagatttatatttgcttctactccatgctctagtcatttaaaaataatttttctttaattaaggcagtttcacatttcaagctctctcttaccttgacatgccaatctccccagcctcccccatatcatccccaacccaattcttcagactcatgcccttcagtgctgagtcatctcaagcatcatttcttgatttccctcttcccctactcctagaaagaactgactactctctatcagagcatcggtgacactgtaatttattgacatgttctgtaatttactagagggagactttgtttttgtatctcaggcacacagcagataattaatgtttataagatgagagaatgaacaaatgaaatgaatttgattataaacaaccctttatgagatattgttatttctctactttgccggtgaggaaactaaggttctgggagattgaatgatttccctaaggccttctgattccataagttcttcacatacacttcaatatactaccaaaccctgctatttcgtaatgctccttcaaacaaacacatcttagtataaaaagaaaaaaaattttgaaagtagcaggaaaaaaaaaaaagaaagaaagaaatataaaatccaagtaaagggttcaaagaaaaccttagaaatcacgtatctgagtttcttgtttacatgagtgaaaatccacatcacagaacagtagaaacggagcccacagaacccatgacctacccattcggaagtcaatgtagccctctcctccactaatgacaagcacagacttcaagggtgtctgcatgccaggctcctgtgcagatggccctgctttgtcaactgtcagatctgtaccactgctgccactttgtgggctgatgacttgacctatttatataggaatgcaagcaaatattatttatcaaggattagagtgggagagactcattttctcctgagtattttcagaaaactgaacaacataataagtacattctaataaaagcctctgcatgacaagaaaacatctataaggccgtgaaagcccaatttgaaattaaagtaaagctattttgtcccaaagcacaaacacatccagaatccagtatgagaactgtatattgcttagctggtcttagctgtctgcttcagactcttataacctatatcttttcactgtgaaaacatctctcctctggcagggtacatatgcgtttacataagagattgagaaaagtcttcaacttaagctttatgaatgtggatattcataattaatatctgaattaatttcaaatccataagttaagttattagctgctcagttgtgtctaactctttgcaaccccatggactgtagcccgccaggctcctctgtccatgggattctccaggaaggaatactggagtgggtagccattccctcctccaggggatcttcccgacccagggattgaactcatgtctcctgcattgcagggagattctttaccatctgagccaccatgtgaaaactcaaatccaaaggttttctcgtatttaaaaatagtacatattattttaaatttagatgatgcaaataaaatgactggttaatatataattctaacatttacattttaagatagaatctttaagtatgaaatgacagaaatcttgaaatattattcacactctaatctctatgagcatggattaatttcttgacagatctgctatcttttggtcaaactacacagaccatccctcgaggtgctaccaggacatatgatacacttcataaaaaattactttatgttggacatggacaggatagttttaatgaactagatttttatgtataaatattaacaaatctcaaaaatgagaagcaagttgcagaataatatatgtgcaacataagacttaagttcaaaaatataaaaaatactatatattatttataggtatgtcccaaagtggtaaaaatacaaaaacatgggcagaaggatacatgtcaacttcaggatagtggttatagatgaacagaaaagagggaagggagtaagattagaagaatgtaaaggagactcaaatgagtctctatggcatttttccctttaaagcaagaaaagcctgtaaccagcaataccacttctaaaagtttattttgaggaaacaactatacaaaaatattccacacacacttcaggaagctcattagcacgttgttaagagtgctgaataactggttagggtgccctgtgccaactaggtacacttaatcatttagcctttggagcaacctcaggaaaaagtatggtggctaatcttatgtgtgtcagcttggcgcggctccagacattttggtcaaactccagcgtagatactactgtgaaggtattttttagatataatgaacatttaaatcagtggactttgagtagagcagatcaattaccagatgtgggtgggtcaatcacttgacagccttaagagaaaaaggtatgtctcccaaggagcagggaattctgccccctttagacttaaactgcaaacatttacctcttttctaggtcttcagcctgccctgcagatttcagtcttaccagcccccataatcacatgaaccaactccttaaattaaatcaatctctctccccacagcctcctcctttttcttcctctttccctccctaccccacacccttttggttctgttcctctgcagaaccctgactaatacactgagataacaccatgtccaacatcacatagttgctgtggcaaagccagatttaaactttgtctaactcctaaacttgcgtcttacagggggaaaaaatatccaaaacacaggtcctgcttacagatgatcaggaacatcatttactattctcaagggacactttccacgggacatcataactgccactcttcatccggacagtgctttatagttcccaaagccctttcattaatctttacagcaaataaggttggttgaacagctattaatcacacccacttaggaaataaagaaatgagtatcagaggttaagcaacttgcttgacacaccaaccaagtggcaaaggcccagacccccagactacttctgttctttgccacaacactgataaaggtattagagcacattttccatctcttactaaataaagccttgatgacagggcttcttagaaatctcctttatgaggtcaaaactactcttggtgttctgcagtgacaaaacaatagtactgcttttcaaaagtgaaagaaatctcttaaataaaatcaagtttgtttttggggtggaagagaacttctaaaatagcttctatcaagtatctctatagcactttattcatatttccattatagaccatttcaaggattatgttggaattatctgtaattccagtacttactattagactggatagagggacagacaattatagttggtccttgaaccatgaaggagttggggcactgactctctgtgtagtcaaaaatctgagtaaaattaatagtcagccttccatattcacggttcttacattaccacaatttgtatccaaagattcaaccagccatggaatgatacagtactgtggtgttcactactgaaaagaatctgtataaataaacccatgcagttcaaacgcacattgttcaacagtcaacgggacatgcagtttctcaacagaatactctcactcacctgggactgccacaaaaaacttcacagcatccctgtgcccatggaagcaaagctgtgcgtgtgccattgaacaatagggtataaatgtccctggtgtcactttatcactgttttcatcaccatatactcgaatgacacttccaggacgatttcccgatgctcctgatgttttattcgctgcaacagaaaaaccaaacaccaaatattttcccctagaaaatagtaatgatggaagaggttactggttaatccttatattatctaaaagctacagccagttgagataaaacaagagcagcaataccaattcaagacaaagctggaaaaaaaagagatatatagcatgctagttatttttaagtatcttagtaaatggagtaggggattttgccagtctagcactgtttactttctaaacacatttattaattaaaaaatcattttagttaaaacagctttctcaggtatatccattttgttttttagtcctcatttttagacaactaaccagttacatagcttaaagtaaacaggtatacttttaagcagaatttttatactttatcttttcatttttctccctgtgctaagtatatttcccttgtgtgatagtaaaaagctgagcttaaaaggatccatctagaacaataaaatagcttttatttacaccagactgatggttggttaaatcattttagaatgaccagactcacaaaacaccccattccatgtgccagtaagtgaatgaaagaaacatgactggtaacaagagtaaacaatgtagattaatgacagttttcagagaggtttgtgtttttattggagggaaaacaaagtctgacagaaatttcagctgcaacaaaagatgataaatagactaagctgctgagcagtagtttggtggccatgtaacaaatattaaaaaacaaaagaacacctgctgcaatgcagtgattgcaagtggatgacatttaggaacattcgagagggtatctagagacgtgagaatggcctcacgtggccatgagaagccaggaagaagagtgtggctcaggatctgaacttacccctcagccccagtaaacgtccctggtggaggattacggctaaagtgagaaaggaggaaaggggacatggagaggtacatgacagggaggagaaggattactatgagctgccactcttcgcatattctatctggcaactcaggagctcaaagctcctaattaaataaacaaaatccaacttggtataataccaagaaacatacaaagttcttaccaaagcctctgaagaacactgctgctcaaaaaggacgattttatttactgtgactttgcttttcttaattataaagcaattttaatgaataagaacttactagaaagcatttcctaattgcaaatattcccctcttttcttgaagaaatcctgtgcaaatgactatgccaaaatggaactctcatctataaagaactgaaatgaactctggggatcctaaaatctcttaagatgtaagaagtggtctaaacacgtagatttataaatagctgtccagtggttaagaatctgcctttcaatgcaggggacgcaggttcaatctttggttcgggaactaagatcccacattctgtggggcaactaaagaagcctgcatgctgcaataaagacctcacacagccccaatttttttttaattaaaaaaaaaaagaacagggggactcccctggtggtccactggttaagaatatgcctgccaatgcaaggaacatgggtttggttccaagttgagaagattccacatgccatggggcaactaagccctgtgccacaactactgagcccattcctgtaactactgaagcccggatactctaaagcctgtgctctgcaacaagagaagtcactgcaatgaaaagcccgagcactgcaactagagagcagtttgtcacaactgaaaaagcccacacgctgcaacgaagacccagcggaggcccccaaaatatatacattaattaaattatgttaaagaaaatacagctgggattaagaatttaggttctttagggcgttccctggcagtccaatggttagggttccatgcttccactgctggggacccaggttctaaccctagctggggaactaagattctgcaggccacgcagtgtcggggaggaaaaaaaagtttaggttctttaaaggctcaaaatgtaacaccatccagtcttcctcctttctcctaaaaattctggtgtgtttattacattattttatagtagtattttcaaatcgttttaaattctgatgtgtttattaaattactttatggcaattttctcaaatcctgcccatgaattctgcaacacaaaatcacttatataatgagtgatcaatgtaatggaacacagtatgaaaaacatacaaagtacattttgttcacattcttttcaaatacaagatagcttatcttaaagtcagtgtttgatgacgtcctaagtaagaatgtctcccacaactcataagctatttaatgggatattctaaactaattgccacaacggtatgaaaaactaggatattaggtagttaggaaatgtttctggatactagtatatataataaggttgaaagaaaaatggactatgactattatttaaggaaataggactgtgattcccaaaatgagaaaaacagtttttcaaaatgaaaaactttcaactgtaaatattagtcctgatacatttgctagagtttgtaagtttcacagaaagagtgaaggaacaatagttagatctttgccatcagcttgactttctgaattaccacaggtttgccaacttagttctattatttagctccattccttccacttggatttcagacaaggctattccccacaactcttctgtgacagttacctaaaaacgtacttactttctgtcaatgggatggagataatgacaccatttcctgttcccacccacaaacgattacaagacaccataagcgctgtgatcctcacaaaagagaagcccagttttccagtacctgtatgggaggagggaaaacattttattgaaaagacagagcagatgacgttttaggttccaactccctcagagcagctggactaatagagaagactgtgaccagagctggttagatatttccagaagtcacatcaatcaagatcaactctcatttgactttattatctatcaattcatctgacaattcatggctatcatctatcaatcaatatcatctgacaattcatggctaatagaaaaagaaaactctaaaagtggctagcattatatcatcatccagaaggaagatgatgtggattaggaaatatgatgcagaatttacttaaggacctgcaaaaccaagccaaataaaccaaaacacaaaacaaaaccaaaaaaaaagctcaacaaaaacagtttactagattggggaaattaaatgttctttcattttataagctgagagagttcttgcttgccttaaatttctttgcataggttaagaaatctttgctaacaaaacctatactctttgctttttatatatttgggtctaaagtaacagaaattttagggtaccataatgcttgcaatttagggagaattaacgcactttttaatttcaaggaaattttaaactgatcttattttcagggatttgagaagcaaaattattaaacaggtaatattaataaatttaagacaaacaacatttagtcataagttctacttactagaaatgaaagtatgaccaaagaatcgcagtatttgaaggaatcttgaacagtctaagctagagatctttaacctatgatcaaagtatattcctgaaattggtttgtgtctatgtttatgtatgtgcgattctaggaagagggcacacagcaatcatcaggttttctgagggcaacgattctaaaaaaagttaaaaaccactgatgtagttcaacctcccttcataaagaaatcatctatgatgttcctaacagcactggatttggtgctaaggatactgcaaggaataagcagagatagtctaaagcccccttttcatggggctttagttctgcagggggagagacagtatgatgatactggtacaatcacagtaatgataagtccatgaagaaaaagtataagagggcctaaataaagctggaaataaagatgaggaaaggtcttttatggatgtgacctataagacatgacctgaaagccaagtaaaaagggactaagaaaaacttctcagacagaagatatagcaccatgtgaaggccttgaaacgggaaggaacctgttgaatttaggtcagtgtggacagaccagagtgagcaaggagagctgtccataccatttaagttcttctaataatctcacaaaaaaatctcacctaaagacaagaatattctgcatggctggcattacataaatggacgcatgtcatggtgatatttgcacactggttactacgtagaaaactgactggagtagagacaggaagatcagaggctgttggtcatctgaggaggaaaagatagtgacctagcctatgggaatagtggtagagataaagacataactcatttaagggaattccctagcggttcagtggttaggccttggcaatttcactgtgggccatgggttcaatcccaggctggggaactaagatcccaaaagtttggtggtgtggccaaaaaaaggcattactggtttaagatattctggggggaagactcgacggttctgctgatggattagatgtggagaacaagaaaggaagagtcaaaaatgatctttaagtttttgtcaagaatcacagggtagatggatcatttgccaacagttacagtgataagagatcactattcctgaggcaacttactcactggttctactcagcatttgaaatcatttaaaaataagccattttctttgactgacaaagataaaatgctttggacgcttacctagcattttgctcacataaggctcaatgtccacatcctgcagatgttggtaagtgtgtgcgtgatagagacggagtgtggagtccaaacgaatggagacccacacgccatcacccacccaggcaagttgccgcacttggctctccttcctggggtgtgcatcaaatgatttctagaaaagattgttcaatcacaatgttactttaattatctaggagttagtgtttaaaaactgtgctaatttgcacaataatttgacagactacctaataaaagaggagcctaaatattgtttactcttatatacacaattgctattatcccatactgcaaaaaaaaaaaagaaaagaaaaaagaactaaaggatgttgtgtagactatcaacttatgaaagcaatcttgacacattcattctgtgtaacagcattcaacaaaaagacggaattggacctcaggattttgcattgctccagagcaatacacaaaataagatcctatttataaacaaaaatgaacctactgtgctatatatgtaagcatatacctgcatgtaaagaatatatctagaaaataaacaccaaatggaacttctaggtttgtaaacaggatttgggacaaatggagaacttccaccttaaaaatttcctactatttttctttctttaaacaattagaataaatttatatattgtcgcaaaactttttaaagacaacaatgctaagaggtttttatttttataacgaattcccactgcaatattattcctcagtctgtgacatacatatggatttgcctgaatacacactgagtagtgggggagacttgagagttctcctcccaaaccaactctacataattcaagcagtacacgtatgggtctacagatactcagacatacatttagacattcatgtgtgaatcttccttcctttaaaaaaaatcacttcccaaactcatagtcaaaagcagcaagagagataaagtatcatagaaagctgagaattcatccagtatatcactgaagtacctcaaaatacacagattcagaaaacaatttctaaaaaagctgaagataattaaatcttagggatttcaggtaatataaattcagtaagtacagaaaacatgggttaacttgcctctattttcatggcctttggctgaaccacataaattttgttcctatagccacaccaaactttgtcatgtaccacagtcatgcatcggatggaatggtgaggtcgtccaagatctaacaggtgatagtttgacaaatcccactgtccatctttaaaataagaagtagattattagtttatgtataccatcttttactcaattttaactcaagaaatattttatttgggtgtgtaattaaatttattaatgaagtatccccaaatatcatgtatttcagtgtatatttacagatattaatcccaggcaagctgtatatattacagatatatatatacagtgtatatattacagatattaatctataaattaaatctgtaaatcagatataaatcaaacagagttggatgacacctcaaagatcatatggtccaacctgccacgcattacctggacccccttgctctcaacagaggtgatgtgataagttatttttaagttacctgtttacaaaagtattttaagtattagaatgaatttaaggttatttggggcataatatcgctctggctcacttgcatttttgatgtatcttcttagatagaagtcaagggcaactcactgctaaggctttaggaattatgcataactttagtgatgacaagaaattcattacaaatgagaaccaaccactgcaagcttgctttgcttgataatttcagtgaaggaaaacatacttcctcacaaagcagctgtttcattttaagaaaactgtaattatcttaaaatattccccatactcagttaaagtctgccttcttgtacataatcattctttcatctatagttttgcctaatggaaacacagaataaatctagtctcacttcattgctactgccctgtcttcgtgttttggacacatctgtttatggaactttcatcctaactccattttgtccagatccatttcatgctatctttctatcagagtggagcaggatcaccagccctgctctggacactaatttctatgaggtaacttgtactgagtttaatgtcaccctttaggtaactgtcactcttcacacaaatctccatctactctttggaacccaaatgcaggactttacatttatccttatttaatgtattttgtcttgctcagttttcaattcagtctaccaaaacatttattattccatttttctaggttctcctactcactagttgagtgaccatgaacaagtaaactactgtgcctcagtttcctcagctacaaaatgaggatgacaatagaattttcttcataagtttgctgtgcagattaaactcagataccgtctataaaggccctgaacaacgtaaaacagaggcctctcttttcattatggagtcattaaccaaaaatctctaggcacctaagtatcatctgcctcacatttcttgaggctgcaaaaagatatgagactttggaaaagccttgcaaaaattaattaataaaataaaaaaataatttttgcaaggcttttccaaagtctcatatcagatctatatttttgtatttccctgatctgccaatctagtaggaaggaaatatcacttttggacaatacatgtaccaaggaattatatgctcaatttcttaaattcactcagtgcagttttctgacaccttctgtctgcagatggtagaaacactactttaaaggggaagaatataaaaaacgtgacaagaaaatgattaaactttacctaattaaaaattcttttcaagaacattccaaatgtaagtgaatgcaaattacttttaaaatactggacaaaagaaaccatatactctcactaaattaggtctatgactagaaaacaaataaaacaaacaaatacttccactgcacattatttaagaggaccataaggactatttactcagtatggtaaacaaattttcactgaggtgtatgattaatgtatgcctccagtcaagcactcacatatttattcatttcatacatggttagtattcagtttaaacctttattccttctcctatgaaatatcatttctttaaaacatatgaggtcaatatgtttggaaaaaaataaataaataaaaataaaacatatgaggtcaatatgtttgaaaatgctcttgcaaagcaacgaatcagcgcacatgttacatattcatgaaactcaccaactcctctgtgaaagattgcaagggtgccgtcagccagggccactaacacaatccctttcacatgtctgcaaacaggaaaggggtcttagaactctccatttgggagtgcagaagacaccacatgatgctgagctagttcagaggttctcagaagaccaatctgtgatgtgaggagcttacaggagaatctaaaggaacagattcttttcttcactgagaaaagtctcgttatgaaaatgtcagctggactcaataggaagcatgtgtggtgactcagctgtttcactttctaacctcctctcattgccgacaaaaggtccacagaccagaggcacacaccttgagtagaaagagtcagctctgtggatctaagagagaaactgacttttcacagccaacatacagaaaaggactagtaaatcaatcacccaatcaacatattcacaaagtgtaaggaatattctaagacaaatatcacgggttttaattggttttctcaccaacaggctaaagaactctcagtacagtgaggaaccaacctggaaagttttctcttctacttaaaattacttggtttattttctagttttaatctcattcatacagagggttaaaaaagacatggatactgatttagtcatgaagtacatgttaactttaataggcttagaatctagtttataccaaaatacatatgtttcaaaggaagaatttctaaaatgaaacttacacaacactgagaatcgaatctttaagcttaatagaatggagacatttcctccactgggctacagatgaatggacatacaaactgcaagaacaaaatcgagactggtaaggcatagagaacacatcaagtagttgcttttatctaataatggcacaaagtttcctcaaaagaaaagaagagcaacataaacatttcaggacaaaacaaggaaaggataggcctaaggcagagaaataagctgcataagcaaacagaaacataaaaagaaggaaaagccagaactaacgcagggttggtttcagattaccacatacttcagaatccttggctatcaatcttttaaaaaaatagtcttcttacttttctactacaatgagctataaatttctgataatagagtggtttacatcagggagtggcaaactaaggcccataggccaaatccagccatctacctgtcttagtgcagtctccaagctaaaaatggtctttatattttttaaatggttggaaaaaaaaaaaccaaaaggagagtatttcatgacatacaagacttctatgaaattcagttttcataagttttattattattagaacatatccacaccagttcacttagtattgtcaacgcagtggctgcttttgcaccacgacagtatagttaagaagttgctacaaagatcataaagcaacaaaacctgatctatttcttgtctgacccctcatagagaagacgtatgtcaaaccttcattttgtagtgttagtcctttatgggaaagttgcactagtgatcttgtttaaccttaggaaaagcacaagtttgtaagactcttcacactactacaaagtggagaagtcctatagtgtttatcaattccgaagcttttagactgtgatttgtccttgttttcccagaagttatgtttaaaattgggcctttctgcagccagagatttttttaatcccttttatttcctgaacaacaggatctcctatttttagatcacccagatttttaagtttacttaacttttttcccaagaatattatatgaagggaacatcctatgacaaacatacggtttaccattcagaaccaatgcaagtccaagtccaagttatgaggtagttgcaatataacttcaaaattgtgtgtatataaaattcttcactttaataggtactttttgtttgtatttgtatgtagcacattttaattatcttaagatttctagagcaaaagtgaaagactaaagatttctaatattaaaaagagttgatacctaccacccattttgagctccaagccacatagttggtaaaaggctactcattttctgggcttcctctctcaccaggtcttgttcatttggcaatactgatatttgatctttatatgcatctgagtcattactgtgggacaaaagggaaaaaaaatcttattgtgtttagctacagttttcaggaattgataatctctacattttagtgtactgttaaaaaaataaattccagtaaagccaaagttaaatgattatattaaacatttcagagacagtgagaaagggagggagggagggtggagggaaggcaggcaggcagacaggcagttaggcaaggcaatgggaggcggaggggagggagaataggaaggaatgaaaggtatataaatatatatatattgcagcaattgtaccagaagtaacactgacatactaggaggttcaaggtacagaaaagggaaataagacaaagtaacgaaatatagcagttaatatctagactaaagttaaggttctcccttatagttatcttgaattttatgagtttcttctgtggggatagaaggaggagagatggtttgttttaaaactacacatacatacctacacacacacagacacacacacacacacagacacacacagacacacacacacacacacacacagacacacacacacacagacacacacacacagcacacacacacacacacacacacacacacacacacacacacacaggaggggtaattataaacaatgttctaaaataaataaactgaaacatgcttttattctacccccaaactttatttctttggactatcagaggacatttagttttaaaaaaaagcataactgtgctaccaaattcaaaacagataaatgaatcagtaagtctaaaaagatgactttacacccctatcacctttctataaggtctagagaaggcaagaaaggaaattaaacaactctttctcttgaaggaaaagtctgaaacaaattgttttctaacaaaatacttgccagaaatctaaattcaaaaggtcattaaaacccacatgggaaatttaaatggccagttttgtggatagagtgggtgtaggagtggggattaaaataatgagttattaatagaatagaagacagtacaattttttaaaaaatccatagatatttggtatggctttaaaaaacaattgtactcactgtcttctattctgttaataactcattattttaatccccactgactggtaaggattttgactaatatactttataagcaagatttttttaagttgcaaggaatagagagcaaatgggggaaaatatgtctagagagaatgcaatgtaaggaacagatgaagacatagtgggaataagtaatagcatctaaatctgccacaacaatgtcaattagtaggaatattttggcttcttgagattgttttggttcctttacatgtgcactctggtttcctcagttgtttacccatttttataccttgactgatacactggtgagaggtcttctgggatttgaactcccaaaggatctgtaaacacatgctctgtgtacacgccagtttgggagacatccacagcatcttcagctgatcctgcattgccttctgtagcttcagttgcttcttctgctgttggaacattttcatcaatctcactattttctgtttccttttctaaaaaataaataaagcatgctaaccattccaagtttgagcttttcttccaatcacttcccccaccaaaaccccctctatagaattccactcttaccctcttctccatataataaaattgaggattcttgatttcatttaacaatcatcacagcaccctctttcaagctctttcatccctgttactttaaaatctaagttaagtccatactgagtcacctgggacaggctcagaaactatacagatggtatctagagaagaccaacatacctggcggtttttccatcactggagaagtttcattggtattaggggaagtggcagctgctgttataccttctgcagaacaaccaactactgtgatgcctcccaacaggctatctgtctctgctgagctattgcttgtcatgcttccacataaagatgctttgtctacttgtccggattctgaaagctcttctcctgcagggtagtctgtttctcgggctcctgaagtacaagataaactttctttaaatagctcagtaaacttctataagtagcattttctctattaaagcaactataggtttgaaataagagtaaaggtgagacaaatatctatgcaaatacactgccaagatggtaaataaattttatttaaactaatttaaactcaattcacaaattgagaaagtagtttaaaaaattaagataataaatgcaacaataataacaactaatgcaagcacaagtaaaccaaaaaatgtcagaaatgtatttctgttcttaatatgagttcttaaagcagccaactaacgagattaaaaacaacaaaatataattctgacaagtcagcaaaattttttttaattatcactatttctattttaaatatgaatttctgccactattaaaaattaatacagcctaggtgtatatagtgcattaagatattagtaacacacttaaaaactaagcatttaacatttaaaaaatcttttcagttctctttatttagaaagatattcttatccatatcacattaaaaaattttattgcagtaaaatatacatacgttgttgctcagtcactccactgtatctgattctttgttaccccatgactgcagctcaccaggcttccctgaccttcactgactcccagagtttgctcaaacttctgcccactgaattggtgatgccactgaaacatttcatactttatcatccccttctcctcctgccttcaatctttcccagtaacagggtcttttccaatgagtcagctctttacatcaaagtggccaaagtattggagcttcagcttcagcatcagttctaccagtgaatattcagggttgatttcctttaggattgactggctggctctccttgcagtccgagggactctcaagagtcttctccaacaccacagtttgaaagcatcaattctttggcacttagccttttttatggtccaactctcacatccatacatgactattggaaaaaccacagctttgactatatggacttttgttggcaaagtgatgtctctgctttttaaaacactgtctaggtttgtcatggctttccttccaaggagcaggagtcttttaattccatggctgcagtcactgtccacagtgattttggagtccaagaaagtaagacatcacggtttccattttttcccccgtctatttgccatgaagtgatgggaccagatgccatgagcttagtttcttgaatgttgagttttaagccagctttttcactctggtctttcaccttcatcaaaaggctctttagttccttttcgttttctgccattaggatggtgtcatctgcatacctaaggttatcgatatttctccccacaatcctgattccagcttgagcttcatccagctggtatttcacatgatatactctgaatgtaagttaaataagcagggtgacaatatacagccttgacatacttcttgcccatgttttaaccagtctgtggttccgtgtctggttctaactgttgcttcttgacttgcatacagatttcttaggaagcaggtaaggtggtctcatattcccatctcttgaaggattttccagtttgttgtgattcacacagtcaaaggctttagcgtagtcaatgaagcagaagtagatgtttttctggaattctcttgctttttctatgatccaatggatgttggcaatttgatttctggttcctctgccttttctaaatccagcttgtacatctggaatttctccgttcacatactgttgaaggataacttgaaggattttgagcattaccttgctaacatgagatgagggcgactgtatggtagtttgaacattctttggcattgcccttctctggaactggaatgaaaactgactttttccagttctgtggctactgctgagttttccagatttgctgacatattgagtgcagtactttcacagcatcatcttttaggatttgaaatagctcagctggaattccatcacctcctctaactttgttcagagtaatgcttcttaaggcccacttgactttgcattccaggatgtctggctctaggtgagtgatcataccatcatggttatctggatcattaagaccttttttgtatagttcttctgtgtattcctgccacctcttcctatcttctgcttctgttaggtccttaccatttttctgccctttattgtgtccatctttgcatgaaatgttcccttggtatctcttgattttcttgaagagatctctagtctttcccattctattgttttttcctctattttttttttttttttttgcattgttcacttaaaaggctttcttatctctccttgctattctctggaactctgcattcagatgggtgtatttccttttctcctttgcctctcgtatctcttcttttctcagctatttgtaagggcccctcagacaaccattttgcttttttgcatttctttttcttggggatggttttggttttgatcactgcctcctgtacaatgttacaaacctctgtccatagttcttctgacactctatcagatctaatcccttgaatccatttgtcacctccactgtataatcataagggatttgatttatatcatacctgaacggtctagtggtttgccctactttctttaagtctaaattttgcaataaggagttcatgatctgagccactacataaagtctgccatattaaccattttaaatgtataattcagaggcattaattatattcacaatattatgcagccatcacagctatctacatccaacatttttttgtcactccatatagaatacctataccaagtaaataactctctgattgccatacccttaccccaggaatctctaatttaattttgtttatgactttgccagctcagatgaatagacagctcagataaggagaatcatacaatatttgtatctgagttgtttctaaggttaatctgtgttatggaacttatcagagtgtcattcctttatatggctgagtaatatttcaagctatacatcaactttttttttttttttgctgtgctgggtgccatgtgggatcttagttccccaaccagggattgaacccatacccccgcagtggaagcacaaagtcttcaccattggactgtcagggaatttcctttaatttttaaaccaatgttttaatatcacatagtatttaatatggaattctaaaaggcctttccatactaatccatttaaatagccccttgccctctgatttccacccttctcaaatttccactgttttatttttttcacagtatctaaaaatatcctccttagtcatttgaactcagtttcttttttgccttcacaaactagaagagatgcataactgtctctccagtaaccaatcagtttctaccagtgaggagctgtggatggtgcgaagagaggaactactcttacctggtacgcttgatatacacagaacatgagagttacaaacagtgaaactgtctaggatgttgcctggttgaacagcatcaataatgataacttttgtagctgaatgagtgctggtacagatccagactagactggataattcttcttgattttttaactccttctgttgttcctgcataggcaaagcaaagaaaatgaatgtttaaaatgagatgtgtgtataaatatttatatggctgtgctattacactaaaggacactactatttaaagttcacttccagattatttagaaggctgagagtataatcacctttcaacaataattagtagacgaaaaactagtagctaaagcagatcagtgacaaaaaatgttctctatcttgactgtgatagctgttacacaggttcacacatttgtcaaaactctttgaactgtacttattttgagtgtatactttattgaatgtaaaatatactctagtaaaaccgacttaagagtgagggcagggatgaggagtaatcaagggcatagtaaccccaattagaagctggacctagaagtcagtctgagaccaaagagctaaacgattagtctcagaaacgggggcaaatgcagtgcaagcacctaccttcagttcctgatctaacttgtctaagctattctgagatgcacttcgctgtttactgccttctgcttccaaaccagcaacatccttgtaaaatacacttgctccaacaacagaaccaccatctctggtcttcccaccggacaaattgactccaacagcacaccacagctttgttgggttaaaagaaaaagatggtattaagttattttctctctaaaaatgtttacaactcttcacattcccttaatagaggtaatgattacaaagagagggctctaatattcaaactatttcagtctaaaatgacaaaatgagtaactttgcccacaaaagtagaatttaaactcctgttttagaaaaaaatccatcaagacttaaagtaatattacctttaatttcatgattactttaccttcattgatgtatctttttcatctagaggtctgagatagacaggcacaggtaaatttttcatcttattctccccttgtccattggttatctaataattgggaaggggagagaaggacgcattgggtaagtctcatcgaaagtgaacttacagaaccagagacatgggcaagcactgctgcagcatgtttatgaagtcaagttcaagttaactttgtctttcttacttgaaaaatgagcagaaaatcaagtggtagttagagaaaataagggcgctcagaaaaaatacactaattcacagacctgttagtacacacatgtgggtgtgactgtgtgtattttaggggtagggaatatgttcttgaaagacgtgaattgagttttaacagtttgaaaggctccatgaggaaggcttcttttaatgtttaaacaatagatactatttttcttttaaatgaaatcttcaatattaaaacagagtacattatctcaaagtcccacactcaaccacctcctatactgacccctctccctcttcacagaactcggacgcatttcttttgaactgtagggctttagaaaacagcctgaaaacaaaaccacaatccttaatgcttctctaaatatgtgccaaatgcacgctgcttgaaacctgcaggtgtgggatgtgtgtttagaatctttcatgcccaggcctactcctctctctctgcatttcccaccagaagctctcaccatatgcaaacattacctgtttgtacttttgaggcagactccagccaaaagcctgcactctaccatcttccttctgaacatgtgcctttacctgacgatactgttctctcttttgttctctgcgtgaggctaaactagcttcagttctaaaagaaaaagaaattccctcttttaattaagtgaatataacaatagcttatctcccttcttctgctaaaatagacataacaagagaaaattacctttgtgtcagtttacagataatatataactgaatcctaacacttctgaagtaggctatcatgctcatttataggcatgagaggttaactttcccaggatgggaagccaacttcctcttacaacaaaaagtgttagttgctcagtcatgtcagactctttgcagcccatggactatagcccgccaggctactctttccatggaattccccaggcaagcatactggagtgggtagccattcccttctctgggggatcttcccaacccagggatcaaacttgggcctcctgcattataggtggattcttaatcctctgagccactagggaagccctttataggtctatccaaacccttacagctgatctgataagaggtaagaatattctaaactgttatttagagcataaccattagtctggaaaatacttactcttcactaaggaaatcaaaggctctggacttatccccagggagctgagataaggtgctgcttcttttcttgacagaaggcgtaacatgagaggttggtgcattgtacttcagattaactggtggttcgggcttcttagtagtgttacttgaggagctgaaaagtcggctgaaactaaaaggaaagttaagagagaatgtgtgtgtgcggtgtgtgtatgtatcacacacatgcttaagaacaatccacaatcttcacaaattccagagtttttacaaggcaatgagttagagactagcaaaaagactttttgtagtaacacactggagccttagcaataattcacagccaaactcagacattcaggaaagagaaaccattgcctagaatggcaaatccctgttctttaattagtaactctcataatgaaaggaagaagctcttgagtacagacaccttctcataatgaagaaataagacagttctttagccagccaatggttgttaaacagcaatgtacagctgtgtggtttgaacagaagcttagtaagcaacttctaaaaatagcaataataaagtactagaacacatattaccattttaccacacatcttatacatttccttactaacctcaatttaagtaactattttttcacattcactcaaaaagaaaaacaaaaacaaaaccttatttctattaaatagcagattcctcaaaaaggggtaagttttaagcacaataaatgcatagtacttctggcacaaacacagttcaagtccaaagcacaaacatacacacactactcaaaccccacaaacactaaatttctgatcttcgctctctaaatttttttacaatcacacaatcaatgaatcagtaacttatttaatggggatctaggaaatcatcaactctaaaaataattccccattattctgtttaattgagcagaggatgccaccaaatgcacaaccatcatgatgcagcttacgataatactaatttttttgtcctcaagaacagccttaccgagctggcatactacataccaaaaagaaaaagtacagtttagctatataccctgaatttaaaaaggaaagtaagaagaaagaaatcatttgtaaaaacagattgattttaatctttgtctcaaagtgctgctatctaacatcttcatgtgatctgagatacttacaactgccaaatgcttgaccttttcttctcctgcatggctggattttctcttgacgcactacatggaaagggaaaaggaaagagaaggagggagagagatgaaatgaatgtgtcatcagtgagacagtctagctttctatctaaacaaccagggacccaagaagctcatgaaatacatggagaatcaacaagtttaataaaaaattactttgatctatatgtgtcagtcagtctgttaaggccaacacaactaataatattgaaatttcatcccttcctcaagagctcagactattgatagagaaaaaatggctatctgtgcaggacagacaaccaacaagcctgaatgttaatgtttaagttttttatcgatgagatatcctccaactttcttttttattaggttggtacaaaagtaattgcagggttgcattgctgaaacttgctgtttgatattggaatacattcttaaataaatgtggtcacgttatacatcattttaatgtgcatttcttgctttatgcttttttgttattgactttttattgtttatcttatatttattttagactagggaaatgatgttagacaaaaagcaaatttgagtgattttttaattcgagttcaaaatgggtcataaagcagcggaaacaactcataacatcaacaacgtatttggcccaggaactgcttgctaatgaacacacagtgcagtggtggttcaagaagttttgcaaaggagacaagagctttgaagatgaggagcatagtggctggccatcggaagctgacaacgaccaactgagagcaatcactgagctgattctcttataagtacaagaagttgccgaagaactcaacgtcaaccattctacggtcatttggtatttgacacaaactggaaagatgaaaaagctcagtcagtgggtgtaacattagctggccaaaaatcaaaaacatggtcattttgaagtgttgtcttctctcattctgtgcaacaacgatgaactatttctcgatgggattgacatgtgacgaaaagtagattttatatgacagctggcaacagaccagctcagtgactggactgagaagaagcttcaaatcacttcccaaaaccaaacttgcaccaaaagaaaaagtcacggtcactatttggtagtctgctgccagtgtgatccattacagctttctgaatcctggtgaaaccattacatctcaggagtatgctcagcaaatcagtgagacgcaccgaatactgcaacacctgcagccagtattggtcaacagaaagggcccaattcttctccatgacaacacctgaggcatgtcacacaaccaatgcctcaaaagttgaacaaactgaagtttagtaccatccgccatattcacctgacctctggcaaaccgactaccacttcatgcatcttgacaactttttgcaggaaaagtgcttccataaccagcaggatgcagaaaatgctttccaagagttcactgaatcccgaagtacagatttttacactactggaataaacaaacttatttttcattggcaaaaatgtgttgactgtaatggttcctattttgattaataaagacgtgtttgagcttagttataatgatttataagtcacagtctgaaactgtaattacatttgcatcaacctaatattaaaatattgcattgtaaatctctgtctctacataaagatattgtttgtcttatatttccagttctcaaaaactagcttgtaactttactgttctaatgggtcatttttcacaggactttttcatcgctgaaaagctgaccaggaaagaaaataaaatggattgattaggtaattaggcaaaaattttttttaaaaaaagggcactgcaaactgatttagtatggctgtaaggattttgccatcactgtcagagctccctttgctgtttttttttttttttttactaattttaaaacatcttttaattcaatggagaaagtcactattttttttcacttgttgactaccatttggctgtgaaaattaaaaatagtaataaaaagtggagcctgactatatgtctcacttgtttaactacttattatttattcaaaatctctttattaaaagcaggtgtttaagaacgtatttgttagtatattggtttcgtcgtccaataaataaagattaagatactaatcaggcttccctagtggctcagtggtaaagaatccacttgccaatgcaggagacgtgggttcgatccctgggttagggaagatcccctggagaaggaaatggcaacccactccagtgttcttgcctgggaaatgccatggacagaggagcctggtgggctacagcccattggactgcgaaagagtcaggtatgacttagtgacaaaaccaacaagacactacttatcttcttccttcttagcagttataagcaattacaacttttgaaacctgtaaatgtgctacataaaatgtttcattcagtactattaaggatataatcataaggaagtaaaagtggtggttagaaatactttcatgaagtttatgaacaatttgtcagtgtgtactgttacttggtaaatctgatgtaaccatccaaactgaaaaacatgggcaaattacagggcaattagattacaaacttttcatgaatgctttaaaattgaagtaacaaacactgttgctgaggatatgaccattagagggcagcgttaataagtaagatccaactgacaaagggtgtcaatggaaggctgcttttatacaagactagtcagaaaggagaaaaaaaatcaggactatttcacaggaaaacaccgagtaagaatgattttgtttcttatgttgaaaatgaaaattttctctcttcctgacattattgcaaaagtagtgtcggtttctatattcttttaaaaaacaactgatgaaagaaatgttcacatattgaggtatggagaagtattctggcttatacatcatttaattgaaatgttatgctaacttaaatgcctatttgtggactatcaaacatatattatacatatgctttaattattaaagaaaagggtgcactgaccagaagtaaagaatgtctatgttaaaaaaataaaagatgaaatgcctcccttcctgggacaccaatgctgatactcagtcttttgatgataagactccctttccaggtagcaaggccatactgcctcactgtgtacacgctgatctggtatttcagaagccctgaaggaatgtttccctgacttggttgattttgcttgttctgacaagatataaaactgagctgaacaccacacatctgtcagttatcagagaggctctctcccaggttacagtcctccatttggcaccaaaaaagttcttccatttcaattatagatcatttattgattattttcgccgagagactactcaactgcctttgagaggtttgtgggaatatcctccaagaggctctactggcccaaagggcacccacttccatcacattccgcttctaattgccagtgtttctctagacctttcctagtaaacagagcaagggcttggatccccaagggaagactccagttgtgaacaaataaatgaatattagtaaacaatcagaaacctagtaaacaataagtagaaaaacaccagaggtacttctcatacaaaccgaatcatctctgtccatcgaacagcttcctgaagctccatcaatctctctttatattggtttctctccattagaactcgggccatttctactctagtaaaccgcttcctttgggctgtgggaatatcactctataacaaaaagaagactgcagatcactctgggagcctttatctgttttggtcctatagctcagacttaggtaaaatttttaatttaactccttaattttaatatattaacttacagaaaactggtcttacaaaaataaaatcaataaagataaacagttacttatgactgaaaagtcgatgataaaatttctaaacaaatacaagtatttgaatatattataaaggaaataaacacaaagaatagtgcagattttgaaggaaactaaaaaaagctgttatctctatagatttaacatgctcacctggaaatgctgttatcacaacagtatcttaaattcatgttctatataacaaatgctagttattcagaaattagttacaagtaagttccaaaaggggtacatttatctcaaacaaccaatctctctatacacattctcaaagccaccgaaaagcataaaaacctgttggctagttatcaaggtacccaatgctgggagtcactaaaacaccaaaagaaataaaaagtcaaacaacaaatgattaaaggattgtgagtttgcaacacagcaacctcactactagctatatactctggaaaaattaggagactctcactgcaatgttcataacagcagtttgtagtactaaaaagctgaaaataaccaaaatattcatctacagaaaaacaaatacataaattatagtacatttatataatgggatattataaagcagtgaacatgaatgaattatataccactatacaactagggtaaatataaaaaacataatactgcaaaaagaagcaagtctccaagactaaatacatataaaacacaaaaacaacaaaaattaaaccatagcttataaagatacatacgtgtgtgatatgataaaattatttttctttcaagttaataaaatgataagtataggatagtagtatcatccagagggaaaagcatagcatagcttcaatgtttgataatgtcttagttcttaaacagtgggttcataatgttaatttattataatgttaatgttattactcgtaacctacatatacaacatatattttaaatgtatcaaatatcatataaaagcacaaataagagattgaaggggcagcaaataatcattctgatcaggacatccatatatctcaagtctgatacttaagcggcaaacacttattgtagggagtccattctaaaggagatcagtcctgggtgttctttggaaggaatgatgctaaagctgaaactccagtactttggccacctcatgcgaagagttgactcattggaaaagactctgatgttgggagggattggggggcaggaggaaaaggggacgacagaggatgagatggctggatggcatcactgactcgatggacatgagtttgagtgaactccgggagatggtgatggatagggaggcctggtgtgctgtgattcatggggtcgcaaagagtcagacacaactgagcaactgaactgaactgaacccagttaacaacagaataactagtatgctaacactggcaagaagttcatatttattcttttatatttatatgttgaaaacaatatgggctaattgcttataaagttgatagatatctttttatgtttaataccattaaattttttattactaaggcttttgtatatttctaagttaaaactggaaacaaaacaaacagcaaacaaaaaaaactccaaaattctccagctagctcttgagcttgaacatgcaaacacaaagccacaaaggaaaactgagaacatgcaaagagctagaaagcttaccatctggatagtacataggagcatgatctatcctattcatgaacctaaatgtgattttgactttttgacaccacacttatggcagaaaatgaagaagaactaaagagcctcttgatgaaagtgaaagaggagaatgacaaagttggcttaaaactcaacatttagaaaactaagatcatggtacctggtcccatcacttcatggcaaatagatggggaaacaatggaaacagagacagcctttattttgggggggctccaaaatcactgcagatggtgactgcagccttaaattaaaaagacgcttgctccttggaagaaaagttatgaccaatctagacagcatattaaaaagcagagacattattttgccaacaaaggtctgtctagtcacagctatagtttttccagtagttatgtatggatgttgagagttggactataaagaaagcttagtgccaaagaattgatggctttgaactgtggtgttggagaagactcgagagtcccttggactgcaaggagatccaaccagtccatcttaaaggaaatcagtcctgaatattcattggaaggactgatgcgcaagctgaaactccaatactttggccacctgatgtgaagaactgactcactggtagagaccctgatgctgggaaagactgaaggctggaagagaaggggacgacaggatgagatgttggatggcactactgactcaatagacatgagtttgagtaaactctgggagttggtgatggacaggcaggcctggcgtgctgcagtccatggggtagcaaagagttggacaaaactgagtgaccgaactgaactttcatctttaaagtgatatatccagagcttaattaacaagatttccccaaaataccagaatgtggcaaggtaagaaaaacaagttcaaaattataaacctacatcatcatcatcttttgctttttgctttgcatcttcaacttctgcacgagctctagtggggggagggaaaaacaaaacacgttattcaagttgacttcaactttttaaagaatagagaataggtcaaaaattttaactaccgtttaatgattattttttttcttccaaacagagtatttagctgctttcatttaagggaacattattatagcactgttgtcagaaaaccaggtattaaagaaaaataatgaatgtttacagtttcctgattagcaacatctgaacagactaacttctttcacgatcatgacatacacaaaaaattataatagtcaataaatgggtgggtctgttcagagtagacacaatcagccaggcacttaaccctatcccaggcagttctgtgccctttgtgacttaagaggactaaaggtagcagtcttgttataatcctggtggtacactggcaatgcttatttggtttagaacaacacggtaaacacttacttcctaagctcttcttccaattctttgttcttctcctccagcttcagcttggcttgtttcacagcctccagctccccctgcagcacatctttctcacaggtaagttcatctacttttgctatcaagtcattcttcactacattcaaggcatttctaagaagcacatatttaaaaaacaccattacaaataaatattctatctttaaccttatttctcttatagactaaagtaactacaatcaaaaagctaaataataattgaatgcttcaaagatactctatgctaaataataattgaatgcttcaaagatactctatctgatgttatctgtgggttttaaaaaaaaagcccacaaagtaatggcctgtttttacttttcccacttaccaaagaataaatagataaggcaaggcagaccaccaaattattaaaagtcagaattaagataaatttatagcatccataagggtattattcttaacaacttctgaaacgatactacacaggacacattcagaagattaagagaaacgcatggatacttgtagggtaaaaggagatcagaatctgtttatggggaaaaaaaacaaaacccagagcaatgaaacctatctattagtgaaattagggcccattaactatctgcttgtgtacatgtgtatgcacaaggccatacacagggaaggggaggagatagggtagtaaatctgcatttgtactgtgttaaagatatgaccattgatatggatgagaagaaaattcagtatctcttgtttgctgttaaattctgtatatacttacttggtttccaacagttgtgtattttccaatataagattttcaacttcacgacccattcctatcaaagaaaaaagataaaaactttgaaaataaatttattaaaactatatatgtagacttaaaacaagctatagtcataaatttaaacattttatctgtccctcaataatcttattttgtctataatttcatttttatatgtttatttgcatacattataaaattataaataattatctaccagagaacaaagctaaaggttttcttaagtctgtattttgcttctcctagataatattccaaaacagtgaagacttttctgccaaatatttttaaaagtaacagtatttagtggggaaaaaagaatagcattaatatggatgaaaaatcatttctaaatcacacttaatattgtatgtaggcttttgcctaaaaattaggtcttattaatacagaacagacagaaacaagaaacagaaccccaacacagatgaaaccttaccaaagaaattatggtcttaaagcccatgcattccatgtaaagcaaaaacaaagaacaagagatgtttcatgtgagaaacagcatgaaaatatagatactaaatccaacaagttttatgcatgacatgaaagacatttgaaagcacagtgttatgatttaatgcataatgatgtggtaaagacagaaattaagacaatttccttcattcataaggatgctctgatatgttattaattctttcataaaataaacttaaaaaataaatgtaattagaatgaaaattccagatcaataatataaaggtttcttcaaagtgccctctttgaaataatgtttacttgtcaatttatagaaccttgcttaataacttaatgagtactgtaaggtgggtggtagaatattcaatgcaagatccaacgtagtgatcttcagggagaagaaagctattcagtttgtgacttgtaagaaactgaagaaattaaacaacacactagggaacatacctcaaaaagttacaaaaacaaagcaaaaaaacccaccaaccattccatgtttcataagctaatattggaaaattacatacagtggaagaaataatattcataacccacctaaaaaaggaaatatttctaaagaaaacaacaaaaaattaaaagagctaacatgtctctttattttaaaaaagaggtaatatttcatgtaactaaaagataatttaaaacacaaccaacttgggaatgctagaagttctctgctcacttatggactcctatattgtctgtattataattatctcaggtattctcaaagaacaaagtacttccaccatgaagaataaataccagaaacagtagcttatttaatcatctacatattatccaaaagctgaaactaaatacaaactaaaacagtttccaaattccaatttaaaaatgaatttgacaagatatgttgaaatatttgctttaaacactaataaagctatagagtcaaaagaaatagggttgaggctgggtgaaaaagtgtttataatgactgtctgctaaattctcaagcacatagggagataagcataaaagctgaaaaatatatgtggggaaaatatagttgagcagaaaaaaatgagaaagcattaatgagaaaagcagccaagaccacctagcttaaaagctgtaacattaaaggatttaaaagcatacacaccagaatattcccctggggaagcagcccaagcaaaaaaatgaatgagaatctcaattagattgttttcagaaagcaagatccatatttatttcaaaatgagagaaaggagccaataaaatcgaaaagatgtagagaaatcaaacataataaagtataaatatcataaacaggaatatttttgaaatatgtgttctatggaaatcatcttatagtttctagagtttacacattttcagtgaagagttcttctaaaatctagcatataaatttaacacataatcaataccactgtccaaaattttcactttgaaatgtattgataaaaatgatgactataagaaaaatataacttgaagtggccatacttctataaatgtcttcaactaagcataaacttaggtgtaacatgtttggaaaacttactctattaagacaagcaaaaaactacctgacagttttaaaaataaaacacatctcacttggattttagcactgatttgcaagttaggtttatagatgggattccagattatctgttgcttccttgaggaagtatgcacaattttatctatttctgtatgtgcatttttccaaaagtacactcctcttacaaattctcctgtaaaggagttttaatttcaaaagttaaataagtatagatttagaggtgaaaaaaaactgttagaactatttaacagtccactcactcagttgctgtgccataggccaaagactcaacagtgagcaaaagatataattgtctaggtcatactgagcttatagtctagtcagggaggcaggcacattgaaaaactacaataaagtattatgaagagttgcataataaatgtagtgctatgggaatgcttccagacaactgagctttaactaggagattaaggcagaattcatagaggagggtatgctagttagttagaggcaagaaggagatatacaaacagatacacagaccctttttttttttttttttttaaggaaggaggcaaaaaatcctcatgactggttttgagggaagcgagaaagattcaggatggagaactgagttgatggtgaggtcattcattgagttcatacatgttgatataagaacagccttgggggacataaagaaagatgttgataaactgagttttaactacaaagctctacaaatcatcttagaagtggtctagagtgctgtttggaagtaatagtctggtgctacagaaaaaaatcctagatggagagaaaaagtttggagcaatgagccatgaaaacccagaaaaaacaagagcaaataagacatcccaaacatggaagcaagcctggactaggaacatctgaaagctgggcagagaaaggatcctgcaaagactgaaaagacatcatcagaggcaggaaagaatacagagaactctgacaggacagaacctaaagcaaagactgtttaaagacaaatgctatttgagaagtcatgtgaaataactgagaagggactgctggagacagcaaacaaggctatttctgggaaggttagtgtgaggcacaatgacagactgcagtcacccgaggtgcaagtgaggctagggaagtcctgcctgttaaaagtagacatactttcaagaagtctgttttgttcactggtatatcaatctagaatagtgccgggcacataacagatacctgcctcactgatattgatgcaaaaaaccatggctggaaatgggaggagagtcatctggtggaaaggtactaaagatatgcagtcagaagcgggcagtagttttattttaaaatggtaaagaccggaacatgtttaaatgataacaggaagaagttagttaaaatagtgaaattaaaaaattaaatttaatcaatagtaagaaaattaaagaaaatctcaaggataggatgaatgaatgtatgattcacaaattctagaatgtggccatggggggtaagtgacaaaagtcaacggagaaaacagtcactagaaataaagtcaaagaatgagataccaatcaagataaaggacaaactgtgggggattatcttttttaaactattaaaatttgaaaaaagtaatctaaacctgagtacatgcataatgattacaaagaccagggaagagttttacaataacacagtaattgtaaaacaaataatgagttccagaaatggatttatttatcaactgaagacaatttaaggaactttgggaaacaattttaccagttcaaccatgttccagctagtattacaatgcaattactattgctgaataaaacagaagagaagccaaggaacaactacgtgcgttggaggtttcgtttaatatttttgaccaaaagtattcatataggcttaaatcacttaaggtaatatatgaaaacttcaaatctggaacattttccaggtaaatatataaattctgcaaaagggaaaagagagtagtttacagtttattttatttttttcaaagtggaaaggaaatcaggattttgtttgaagctatttattatgcttaattttctgacttaaacaatggaagcttttggaaaaatatttgtttaaaagatgacaattatttctaagcattatgtagcttcttacatctttacaagaaagtaagtttagggccaccaacctcaataatgatattattcactactggattataaggaagcagagggtaaaaagtacgtttaaaaagtactttactctggtaaattacaaaggggaagcatgaaggaattttttgagaggtgatatattgttaattctggtggcggctatacaattctatgcattagtcaaaacaaaaaactgtgctttactatatataaatttgagaatgtgtttaaacattaaaaattattttttctaacatttttttgcatctgttcctcaattttggcagaaaatcgatttcttatatcaaatcttaaaaggaactttccatgcacaatttaatgttaacaaagagcataaatttaaatgtaaaaatggagtgcttcttaagaattaatccttaagatatccttgaaaaatgcaaattcattcaaagcttccaatgttttacttagtggtgggagtctatacctaactaagtttattaatgtactttccatctctcttactttaaataagcctatgggctctgtgtagacagcaactgtgtttccttcaaaaaatacttattgaggacacataactggtaatcaataaatgtgacataaatgaatgcaagcaacacttctctatatccacaagattgacaaacagcaccttttaagaacagtgtaacctatactgaattaccaagggatacaaaaaatgtttggagaccagaatccattccaaaggcacagatttttaatactataatgtattcaatttctataaggtcttaagttataaagaaaggcacatcaaagctaattgacaggagtcagattcatataaactttttttttttttttttaaactcatggtgcaacttgcaagatcttagtttactgactagggaccgaacctatgtcccctgcagtggaagtacagagtcttaaccactggaccctcagggaaatctcattcatgtaattattgttccaagaaactttaaagatcacttagaacaggtgaaaactttttgtgtaaaggcccagatggtgaatattttaggctttgtaaaccacataatccctgttagggacaacttaactctgctattgtggggcaaaagcaactactgtgtgtgggtgcctgtgtgtttgtgggcgtcatatgtgtgtatgttctatcctgaccaactctttgagaccttatggactatagcccgccaggctgctctatccatgggattttccaggcaacaatactggagtgggttgccatttcctcctccaggggatcctactgaaccagggattgaacccgcatctcttgcatctcctgcattgccaggcagattctttaccactgtgccacctgggaagcccaaaaatcaaagataaaacattaaaaaaaaaaagtgtggctatgtcccaataaaactttatttgtacacaaaaataatccaggagtcacagcctatccaacccctgaattagagctcaagtctttctttttatacacaaagaacctaatgcccagagaggttaagatatttggcaaaagggtcactcactccctggtggctcagcggtaaagaatctgcttgccaatgcaggagaccagggttcaatccatgcgttaggaagattccctggagaaggaaatggcaatccactccaatattcttgcctgggaaatcccatggggtcacaaagagtcagacaagacttagcggctgaacaacaacaaaccagatcaacagtagaagagccaaatacagtatccttttcaaaccaaataatcttcaacaacacaaactctaacatatttctcaagaagctaaaacagaatgctctgtgaaatctcagaaaagtcaagtgaatttaatgaacactatttaagccaggaagtaaccatccatcaatccataaaatctatacgtctatatataaccacatgtatacatatatataaccacatgtatacatctatatataaccacatgtatacatatatcatgtttcttatatgtaatactgttctcagaacatagcaggaaggagttcaataaattgtgtatgtgaattcaaaatacaaactaaaaagcaattcaatcctaaatgcatccatatgtgaagacattttcatttaaaactttcatgacttcaaagaatatgttcctattaattacttaaaagcacaataactctgccccactggacagttagggactgtttttttttttttttttaagtttatttttggttgtgctgggtccttgatgtgcaggcttttctctagttgcgggcgagcaagggctaccctctagctgtgcacaagcttctcactgtgggggcttctcttgtggaggacgggctctaaggcacacggatttcagtagctgtggcatgggggctcaggagttgcggctcccaggctctagaacaggctcagtagttgtggtgcacaggctgagttgctttgtggcacgtgggctctccccagatcagggatcagaccagggtctcttgcattggcaggtggattctttaccactgagccaccagggaagcctcagttagggacatttttaggaaatgttccattatatcatttaaaaatctatttttaaacagtatgatactatttcagataaactatcatacctagtaaatctgctccttcatccacatctccaattagacctgaaccagctgaagacagttcttcaaagagagattctgtattgcgatcaaaagctttgttctctatgcctttggtgggagtgctaggcaacaaaaacaaaaccaaatcaacagatgtcaaagatgtttttaacagtgcaaaatgaatacaaaaggctaagttacacaagaatttttaacctgtaatatttaatataaaatataatttaaaagaatttctcacaggtttcctaagatattttcattatattgcacagagagaactagtgaagaaaatacagaatgtttttgtggtcagatcctagcagacacaaaacaaaaacagcagctaagagagagcactattctgcactgttcaggcggtggtctaagtcctttcacagattaccttgttaaaactacatctactctacaaaagagctgctgctcttatcccaactttacagaagaggaaactaaagaggttatggaatttgccaaaatcatccagcaaatgagtcagaggcagaactcaaacctaggcagccaggcttcagaatccatgatctttaccatgatctacgttatctgggtatggaacagccattttatttctcttttaagggcaaacttggcaagatctactaaaatttaaaatgcaaatacccagtgaccaaggacttgatgtctaaaatactcctacagggaactccctggtggtccactagttaggacttggcactttaactgtggtggcccaggttacggaactaagatcctgcaagcagtgtggtatgggcaaaaataataataataataataataataataataataaatcccatgaaagctccgtcacaagaaggcaattatgtatgtaaaaggatggtcagagcagcaaaagttgaaacaacccaagtgatcattaaaagggcacagatgaaataagttatgtgtacatctaaaagtttaaaattttaactttaaaaacattaaaatagagcttcaaaaatgaaagaaacccattatatagaggcgctttttaaaaagcaagttgcaatacagtgcatgtaagccctttttgaagtggtatgggagaatggggaaatgtgagtgtctaagcattaatgttacattaatagaaaaaagtctgcacaagatttccagttaaatatggtggagatagtaatctatcacacaataattcaaaaatgcaactaaaatgacagtaaaagaatctaaaaagtatctgcccacaaggacagagggaacagaaaaagaacctacagcagacacaacatgaacaaaactctgtaagatagaaaacatgtgggtaaacattagaaactgatttaactgaccagactaagctgaaactcaacccagcagtgtttagagagaaagtcagtatgaggccaaaattcatgaaaagcttaggaattgacataaccagcaatctgcagacagaagtatgcaagagaaacattaagatagagggatgggatgaaagtaagtacaagaagcagtataagaacctaaatccaaccctccagagcagtgagacctcccttttcctggcattactccctgaacaacagaagccaaggtcaaatgttataggcagaaaactgaagaatcaatatcatttacttgttcactcgctaaagtcatgtctaactcttggtgatccgaaggactatagccacgagactcctggacatgggattttccaggccagtataccagagtgggctgctatttcctactccagaggatctttccagctgaggtaaagaacctgcgtctattaggcttcctacattggcaggcagattctttacaacaaacaccaaaactttgttgttcagttgctcagttgtgtccaactctttgcaactccacagactgcaggacatgaggcttccctgtccttccctgtctctcagagtttgctcaaactcatatccattgagttgatgacaccatccaaccattttatcctctgctacctgcttctccttttgccttcaatcttttccagcatcaggatcttttccaatgagcagttctttgcatcaggtggccaaagtattggagcttcagcttcagcatcagtccttccaatgaatattcagggttgatttcctttaggattcacttctttgatcggctactagtccaagagactttcaagagtctactctagcaccaaaattcaaagacatcagttcttcggggctcagtcttctttatggtcgaactctcacatccatacatgactactggaaaaaccaaagctttgactatacagatctttgttggcaaagtgatgtctttgctttttcacctgctgtctaggtttctcatagctttccttccaaggaacaaaagtcttttaatttcatgactgcagtcaccatccacactaattttggagccccccaaaataaaacccatcactgcttccactttttccctttctgtttgccatcaagtgatgggactgcataccatgctcttagctgcatgttgagtttcaactcaactttttcactctcctctttcaccctcattaagaggctctttagttactcttcactttctgccattagagggatataatctgcatatctgctgttgatatttctcccagcaatcttgattgcagcttgtgattcatccagaccagcattttgcatgatgtactctgtatgtaagtcaaatagggtgacaatatatagcactgtagtactcctttcctaattttgaacctgtcagttgttccatttaaagctgtagctgttgcttcttgacccacttacaggtttctcaggagacaggtatggtggtctggcactctcctccctttagaattgccacagtttgttatgatccacacagtcaaaggctttagggtagtcagtgaagcaggagtacagatgttcttttgggattcccttgctttctgtatgatccagctaatgctggcaattcgatctctggttcctctgccttttctaaacccagtttgtacatctggaagttttcagttcagttcagtcgctcagttgtgttcaattccttgcgaacccgtggactgcagcatgccaggcctcccagtccataccaactgctggagtttactcaaactcacgtccatcgggttggtgatgccatccaaccatctcatcctctgtcgtctgcttctcctcctgccttcaatctttcccagcattaggttctttcccactgagtcagttcttcgcatcatgtaaccaaagtattggagtttcagcttcagcatcaatccttccaatgaatattcaggattgatttcctttagaatggactggttggatctgcttgatgtccaagggactctcatgagtcttctctaacaccacagttcaaaagcatcaattcttcagtgctcaggtttctttatcgtccaactctcacatccatatgtgactacttgggaaaccatagctttgactagatggacctttgttggcaaaataatgtctctgccttttaatacgctgtctaggttgatcctaacttttcttccagggagcaaacatctttttatttcatgactgcagtcaccatctgcagtgattctggagccccccaaaataaaggctgtcactgtttccccatctatttgccatgaagagatgggaccagatgccatgatcttagttttctgaatgttgagctttaagccaactttttcactctcctctttcattttcatcaagaggctctttagttcttcttcactttctgccattaaggtggtgtcatctgcatgtctaaggttattgatatttctcccagcaatctttattgcagcttgtgcttcatccagcctggagttttgcatgatgtaatctgcatataagttaaataagcagggtgacaatatacagccttgatgttggaaccagtctgttattctttgtccagttctaactgttgcttcctgacctgcatacagatttctcaagaggcagatcggtggtctggtattcccatctcttgaagaattttcaaaagtttgttgtgatccaaacaatcaaaggctttggcgtagtcaataaagcagatgtttttctggaactctcttgcttttttgatgatccaacggatgttggcaatttgatctctggttcctctgccttttctaaatccagcttgaacatctgaaagttcaaggctcatgtactattgaagcctggcttggagaattttgagcattactttactagcgtgtgagatgagtgcaattgtgtgatagtttgagcattctttggcattgcctttctttgggattggaatgaaagctggccttttccagtcttgtggccacaggtgagttttcaaaattgctggcatattgagtgcagtactttcacagcatcatcttttaggatttgaaatagctcaactggacttccatcaactccatagctttgttcatagtgatgcttcctaaggcccactttacttcacattccaggatgtcttgctctaggtgagtgatcatacaatcgtgattatctgggtcttgaagatcttttttgtacagttctgtgtattcttgccacctcttcttaatatcttctgcttctgttaggtccatatcatttctttgcccacctttgcatgaaaagttcccttggtatctctcattttcttgaagagatctctagtctttcccattctattgttttcttctatttctttgcattgatcactgagtaaggctttcctatgtctccttgctattctttggaactctgcattcaaataggtgtctgtttccttttctcctttgcattttgcctctcttcttttcacaactatttgtaaggcctcctcaggcagccattttgccattttgcatttctttttcttggggatggtcttgatccctgtctccggtacaacactgtgaaccttcgtccatagttcttcaggcactcggtctatcagatctaatcccttgaatctattcctcacttccactgtataatcataagggatttgatttaggtcatacctgaatggtctagtggttttccctactttcttcaatttaagtctgaatttggcaataaggagttcatgatctgagccacagtcagctcctggtcttgttctggctgactgtatagagcttctccatctttggctgcaaagaatataatcaatctgatttcaatatggaccatctggtgatgtccatgtgtagtgtcttctcttgtgttgttggaagagggtgtttgctctgaccagtgcattctcttggcaaaactctattggcctttgccctgcttcattctgtactccaagccaaatttgcctgttaccccaggtatttcttgacttcctatttttgcattccagtcccctataatgaaaaggtcatcgtttttggacgtgagttctagaaggtcttgtaggtcttcttacaactgttcaacttcagcttcttcagcattagtggttggggcatagacttggattactgtggtactgaatagtttgcctcggaaatgaacagagatcattttgtcgtttttgagattgtatccaagtactgcatttcggactcttgtttactatgatggctactccatttcttctaagggattcttgcccacagtagtagatataatggtcatctgagttaaattcacccattccagtccattttcattactgattcctaaaatgttgatgctcactcttgccatctcctgtctgaccactttcaatttgccttgattcatggacctaacattcctggttcctaggcaatattgctgtttacagcatcagactttacttctatcaccagtcacatccacaactgggtgttgtttatgctttgactccatctcttccatctttctggagttatttctccactgatctcccataacatactggggacttactgacctggggagttcatctttcattgtcctatctttttgccttttcatactgctcatggggttctccatataagaatactgcagtggtttgccattccccttctccagtggaccacgttttgtcagcattctccaccatgacctgtccgtcttggatggccctccatggcatggctcatagtttcattgagttaaagaagttttcagttcatgtatgacaaaacctagctggaaggattttgagcataacctcactgtcatgcaaaaggagcaccaatgcacggtatttgtccattctttggcactgtctttctttgggattataatgaaaactggcgttttccagtcctgtggccactgctgagtcttccagatttgctgatatattgagtatagaattttatcagcaccatcttttagcaattttaacagctcagctggaatttcatcacttccactagcattatttttagtaatgtttcctaaggcccacttgactttgcactccaggatgtcaggctctaggtgagtgaccacaccatcgcggttatctgggtcattaagaccttttctgtatataatttttctgtgtagtcatgccatctctttttaatcttttacttaagtatgagcagaacagccaaaaagcaccagacactcaaagaaagcctccattataaaatttaaagccccaaagtcatggactgtgatagggtactgagaataaaaggagacaatgaatgcaaacagcagcaaaaatttggaaaaaaaaaaacaaacccacaataattttattttcataataaagctacatccacaagagaattgtaggatgttataaaaagtaaccatccaagaaaaagcttttaaggaaaaaaaatgatgagagttgagagataaagttggggaaatcatccagtaattacaacaaaaatagaagagatagaaaaaaagagggaaaagggatttatgagtgtcagttcagaatgttcagtatctacctaatagttccagaaagagagaagacaaagagaaataaagaaaaaagttctcaaccggaaataaaaatttgcagatgaaacacgttacctcagatacagaagaagactcctacatcatcatgaatttttagaaaggaaaaaacaaagcaacaacaaatagggacaaagatcctaaagcttacgaagaatatatataaaaaagcaagagtccacatagcaacactccaaactgaccatgataatgaattaatgtcttcacagttgtgaaggaaaacttacaaagattttccaatatagaattcgtattcaatcaaactatgaatcatccctttaaatgacatatatcatattcaagttctcaaaaatcttagttgcaaacagccttttccaggaaggctagtaggaatatgttctgccaaaacaaaggcataagtcaagaagcaagatgacatgaagcagaagaggtggcaagaatacacagaagatacacatacaataaagatacatattaaaaaaaaatacatacacatacaaaaaaaagatctcaatgacctggataaccgtgatggtgtgatcactcacctacagccagacatcctggagtgcaaaatcaagtgggccttaggaggcatcactaaaaacaaggctagtagagttaagaattccagctgagctatttcaagtcctaaaagataatgctgttaaagtgctgcactcgatatgccagaaaatttggaaactcagcaatggccacaggaccggaaaagttcagttttcattccaatcccaaaaaaggacaatgccaaagaatgctcaagctacatgctagcactcatttcacatgcaagcaaggtcatgctccaaatccttcaagctaggcttgaacagtatgtgaaccaagaacttccagatgtacaagctagatttagaaaaggcagagaggaaccagagatcaaattgccaacatctactggatcatcaaaaaagcaagagaattccagaaaaacatctacttctgcttcactgactaggctaaagcttttgactgtgtggatcacaacaaactatggaaaattcttcaagagatgggaataccagaccacctgacctgcctcctgagaaacctgtatgcaggtcaagaagcaacagttagaaccagacatgaacaaaagactggttccaaatgggaaaagagtatgttaaggctgtatattgtcaccctacttatttaacttatatgcagagtacatcatgcaaaatgccaggctggatgaaacatgaactagaatcaagattgctgggagaaatatcaataatctcagatatgctgatgacaatgcccttatggcagaaagcgaagaggactaaagagcctcttgatgaaagtgaaagagagtgaaaaaattggcttaaaaactcaacattcagaaaactaagatcaaggcatctggtcccatcacttcatggcaaatagacagggaaacaatggaaacagtaaaagactttattttccttcttgggctccaaaatcactgtgggatggtgactgcagccaggcatttgctccttggaagaaaagccatgacaaacctggagagtgtattaaaaagcagagacattactttgtggacaaaggtccatctagtcaaagctatggtttttccaggaatcatgtatggatgtgagagttggaccataaagaaggctgagcagagaactgatgctttcgaactgtcatgctaaagaagactcttgagaatcctgtgaactgtaaggagatcaaatcagtcaatcctaaaggaaatcaaccctgaatattcactggaagggactgatgctgaagctgaagctccaatatttggctacctaatgtgaagagccaattcactgaaaaagaccctgatgctgggaaagacagaaggcaggagaagagggggtgacaaaggatgagctggttggaggcatcaccgactcaatgcacatgagtttaagcaagctccaggagatggtgaaggacaggtccatggggttgcagtgtcagacgtgactaagcaactgaacaacaacaacaacaacaacaagatgacgtagtgcccaggaaacagaacagaggagagacatgaaaagaattcccagcaagaaaatgagagcaaattccaggaccagagcaaacacaataaagtctaccattggagaatggaaatagatgctgccaagaaactggttttatacttggccatttgagaatgtttacagttatgatttgttgggtatctgtcagtgaatagtgataggcatgtagaaacctaagcaaaagcaaaaaaaacaaaacaaaacaaaacaaccctgaggctttactaaaaattaaagaaaatcaaagttgtaaaagaaaggaaatataatcatagcataatctgtgagtaggctgttgttagtatttatataatcataatgatacaaacagtgaaccttaatttaaatgaaactgaaatataattatattgggagaatgaaaggaaagatgatggtttaaatagctatgtccttgtcatcattcactataaagtcaatagctaataatgcagccttttttaaacccgtggtcctaatgtgatccacagaattcagaaaatgatgagtgactatttgctctattttttcaaagaaaatacatagctagtactgttctagacacacaggagtatagttaattcactatacaagtggggtgctgtagggcattaggacttgattttctcacagaatcccaactgaaaaagagagagaccaaagaatagcacatgaagatgtgatttagatacctgaagataaatactcaaagtgacatgagcggtggtggtaagagatatcctcttgagaatggaaatgaaggggcagtaggggcaaggggctactactgcccttcatattttgtattaccatttgaccttaatactgcatacatacattgaaaaaaaaatgtgttagttgcttagtagtgtgcaattttttgcagtccaatggactatagcctgccgggctacgctgtccatggaattctccaggcaagaatactggaatgggtagccattcccttcccgaggggatcttccccacccagggtctgaacccaggtctcctgcactgcagaaagattatttaccatccgagcaaccagggaagtattttgttattaccatttaaccttaatactgtatacatgctttactctaataaaaatatgtttttgatttttaaaaagaggtccaaaatgataggtgggcacaagtgttaataagtaggtttaggagaggatggaaaagcaattttcactttttatacactgcatcgtttaatttcttaaataaacaataaagaaaaaaatatttcaatagggcacagcctttgaactcatagtcttaaactgaatgctagttctacctcttgttagtctggacaaaatagcatacaactctgagcttctttatatgtgaagggaaggacatctgtcttgtaaggttataattaagataaaattatatgatggtaacaataatgttcagttcagttcagttcagtcgctcagtcatgttcgactctctgctaacctttattgaactgggcactctgccaatgatttaacatatattgattcatttacaccttacaatcatctacggtattatcataattctctttcatggatatagaaacttacttcagattcaaatccaggtcaggattagaatgcatatagtcttatcctagggttttcctgatagctcagaaggtaaaaaaatctgcctgcaatgcaggagacctgggtttcatccctgggttgggaagatcccctggagaagggaacagctacccactctagtattctggcttggagaatttcaatacagatgacgttcattaagatgatacatatcattctcctttaatcactaaacagcctccccatgtaaaatgatactaaaatgagactaatttcttgcagtaatgaaaccattacagttttgaagggaatacattctcttcttcctgatttggaggaaggaataggttttttcaaattatactttccccacttttgcttttatgttttcccaagttccacaaaccatggaatatttctttatggaatactccttcactgtcttttttccccatccttctgcatgcttctagtccctgatgctacaaaggtaacagttcacagaacgtgtaaattatgtacaaggtctggcttcaaaaagagaaaacttaaatataacatcaacatttcttcagcaaaacatctgaatgcactttatctggtcagagaccggggaacagcaatgtgcttaggggagacgggaaaaggaaagaagtaagatgtcccaattagacctgaacagtaccttgagcctttatatccactgagatctttgtccatatccaactcaggagtggattcaatgattgcctgaacttcggacttctcttcattttcagcagaaccttagaaaaggacaagataacaaaaataatgcatataatacatacagcccctgacatgaaaattgtttctatggttataaatacatcatttgatcacaaaaatttttagagagctgagaaacacaaggttagacagacaataggtcatatattcaattaacagtcaatatggaaattaaaaaaaaatcaaccaaagttttcattaaaaaatcaacaaaagttttcatttgtgttactttggacacaatgcactgtacaccaggccagaactcagtattttcattttatttaaggggtgaaataaaaagagattaaggacagagactaatgacctatggcagggaacagataaagaatgtcctcctgcctttcaggctttccaaaccccagccactctctacccacgccatttttactctctaaaacttaacttaatcatcacaacttttaggctgatttacaactgagtacaattttatgaatctgcagcagcaacaacaccggagatgtcccttctcacagttgcgtcatttgcattcacggaagactctgccagtatagaaaaaactaaggttacttacctgttgatatgtttctagtttcttggactacttgtacttcaatatgcttgcttatctctgacgtatctggtgtatctgcaaccttcacaattccttcattctcctcatgtaagggagtatcgctaggtattgctgccacatctgaagcagttgttgacgctggagtggtagctttagatcctccctggctaacatcagaaagttcatcctacaaatataattagggaaaacattttgatgagtattttatttaaatggccttttaaataggttaagaaacttgagagaaaattctgttaaaaactggtaagtcacttattaccaaaggtaatcaacaaataatctctgtagcttgttttcaagtaactggatactagttaagtaataatatttttccagacatatgttgagattcttctaaatagaaaaagtatagataagggaggactggcagtattatcaataaaagtatatactaatgtcatcatcagagtttataatggcagttctaatttgcacaatcatttgataatgaagacttgtctcaaaacacttgaagatgtactatgtggttgttattactgttcggtagctcagccatgtccagctctttgtgacctcatggactgcaacactccaggcttccctgtccttcaccatctcccagagtttgctcaaatttatgtccattaagttggtgatactatctaaccttctcatcctctgtcgccctcttctcctcctgccctcaatctttcccagcatcagcgtcttttccaatgagtcagctctcagaatcaggaggctaaagtattgaagctccagcttcagcatcagtccttccaatgaatattcagggctcatttccttcagattgcctggtttgatctccttgcagtccaagggactctgaagagtcttctccagcaccccaattggaaagcatcaattcatattcatgctcagccttctttatggtccaactttaagggcacatccgtacatgactactagaaaaaccacagctttgactattcagacctttgttggcaaagtgatgtctctgctattcaatatgctgtctaggcttgtagagcaactgtcttttaatttcatggctacagtcaccatccacactgattccgaagcccaagaaaataaaatctgtgactgcttccacttcttccccttctatttgccatgaagtgatgggaccagatgccatgatcttagatttctgaatgctgagttttaagccagctttttcactcctcttttatcctcagcaagaggctctttagttcctcttcactttctgccattagagcggtatcatctgcatatctgaagttgtttatatttcttgattctagcttctgtttcctcctgcccagcatttcacatgatgtactctgcatgtaagttaaataagcagaatgacaatatttgaacagtcaattgttcccaattttgaagcagtcagttgttccgtatctggttctaactgtttcttcttgacccacatagtggtttctcaggaggcaggtaatatagcctggtactcctatcagtagaagaattttccacacctgtgatccacacagtcaaaagctttagcatagtcagtgaagcagtagatgtttttctggaactcccttgctttctccatgatccaataaatattagcaatttgatctctggcacttctccctcttggaaatacactttgtacatttggaagttcttggttcaagtactgctgaagcctagctttaaagattttgagcataactgtgctattatgtgaaatgagcccaactgtgtggtagttatgcaggtgacaccaccctaatggcagaaaacaaagagcaattaaagagcctcttgatgaaggtgaaagaccagagtgaaaaagctggcttaaaacccaacattcaaaaaactaagttcatggcatccggtcccatcacttcatgacaaatagatggggaaaaaatggaaacagtgacagattttattttcttgggctcaaacaatcactgtgggactgagactgcagccatgaaattaaaagatgcttgctccttggaagaaaagttatgacaaacctagacagcatattaaaacacagtcatcactttgccaacaaaggtctgtatagtcaaagctatggtttttccagcagtcatgtatggatgtgagagttgaaccataaagaaggctgatgccaaagaactgacgctttcaaactgcggtgctggagaagactctggagagtcccttggactgcaaggaaatcaaatcagtcaatcctaaagaacatcaaccctgaatattcagtggaaggaaagatgaagaagctgaagtgccaatattttggccatgtgatgcaaagaaccgactcactggaaaagatcctgatgctgggaaagattgtgggcaggaagagaaaggggtatcagagtatgagatggctggatgccatcactgactgcacagacatgagtatgagcaaactcctagagatagggaaggacagggaagcgtggcatgctgtagtccatgaggtcacaaagtgtcagacatgactgagcgactgaacaataaacaaatggaatgaaaagtctctgctacagtgtttgactgaaagcacaatatttttttctcctatggaagaaattatgaaattttgtcactaacaatgcatccatctaaagatagaaggaagaaagacaatcctaaatattagcctgttgttaaatataaaatgtatacactggtcaacagtaagtccataagactccaggtacaaaatgaggaaaaatttttactaggacctaaatggaagctggaagcattgatatgaattatttactgtgaagttgtaggggagttgcatgctattattttatattcaatctgtgacagcaagagacctctaatccctattttatgttgctctatgtcaggctgtactgtttcagctaccaatttttactacaaatgctgctttatctatctgaagaccaccaacctaacaatttgaattacctgacgtcattaagatgtcctcttcaatgacacacgtagtggagacttactgggtggtcaagtctctttctaataaatgtatttgttttgtaaccccactcaaagtctctcaatctttaagaaactctattacaggctttcaagtcactaaacaatgcccacaaaactaaggaacctgacttggggttccagtgctgtaactacaagtgctgtgcaagataacaagtcctggtgagatgtgaagaaactaggacccctgtgtactgctggcggggtgatgtgatggtgcaactgctatggaaaacagtataacatttccttataaaattacaaatagagccaccacaggatccagcactacccctcctgcttataaaaccaaaagatctggagacagggattcaaagagatatttacacacgcacattcacagcacaactatgcatagtaatcaacaagtggaagtgacctgaatgtccaacaagggatgaaatgtataaacaaaatatggagtataaatatatatatatatatatatgcatgtatatatatatgtatacacacacacacacaacagaatattattcagctttaaaatggaaggaaatcctgtgatttccttgatacaacatggatgaatcttgaggacattatttcattaagtgaaataagccaatcacaaaaaaacaaatacaatgtgatttcaaaggttacattcatagaaacactaagcagagtggcagctgacagtgctgaggggagggaccgaaagaggagtttaatgggtctacagcttcagatgtgcaggagagaaaagctctagcaatctgtttcacaacaatatgaatattcttaacactactgtagtgtatagttaaaacggttacaatagtaaacttcgcttttttttttttaatcacacatacaaaaaaagagaatgggggaaaaaagagagaataggtggcattaattttagcttcacttgagataccatggtgaaaacgatctggtctttgtgctatttttctactggttttagatatcaggctagaaggctatacacctttacaaaatactttcaactgttccattcatcaatgccttgcatacccagtactgtagagaatatacatgtcacatattatctgccactgtcccattgctagttatattcagagagactgtaaagtaagttcacaactataaaaataaattagtcaattaaggacaatttagaaatgttctaattagtgttttcttaagtagcttgcctgatttcatctgaaataagctaaaaaagagggcaagtaactctgttatataaacctgtctttagtgtcaaagattttaagcctaatctaagtaaaagacaaacagaatcacaaaattctgtgtatacatgtattttctagagagcttcataactttaatctgattcctagaggaatccgtgacccaaagaaacactgagaatcactgagatgacataagtccagctctaagttatactataggttcaaaactgagatgacataagtctagctctaagttatactacaggttcaaaaaaatttagcttattaaaacagaggcacagatgacctacttctgaagatatttctgaaaatgatactggttccaccgttatgaaccaggagatggccttaccctggttaaccctgatctagggggtaggacacagtcttactttgtccttatatccccagtgcctagcacatcaagcctgacatgaagtaggctctcaaaagatgtttgctgaatggtgccccgacaggcgctaaacaaatctgtttaactagagaggcagcccatggtaaaatgacttactaggctgtctccaggatactttcaagttgtgtacattctgccctgaggatggtacttgtgcaaacatagaagtcttcttacccagagctgtataaagagaaataagctgaacttccataggatttacttattcttttctctcctttagagattacagtaaagccccagcaactaccgtagaagaaataattttttttcatttcagccggtttccttggtggctcagctggtaaaaaaaaaatccgcctgcaatgcaggagacctgggtttgatccctggggggtaagatcccctggaaaagggaaaggctacccactccagtattctggcctgaagaattccatagactgtatagtccatggggtcacaaagaatcagacatgactgagcgactttcactcactcagtgaataacatcagtagtcttccaaactgagcacttgatatcttgagagcagcagttgaggaagtaaccaaaagttaatcactttcatctactttttgcaaaatgttttgaaagcccattctcacctcctgttctatagccttcagaggttcagggctacttctgacctgggaatagggaaagattataaaagagaaaaaaaattcatatatttactaggtgtctgcatatgtctaagtatctttggcttatgctacctctcaggatgacaaggtccatctctattttctactttgttcaaatgagggtttgggggttttgttttgacttaatatcacctcctctaagtctctatcttaagccatatcatgactcaaaagccaccacctgggtcttatcttaccctatacttggtcaataagcagtttatcacttaaccgttttcctactcataaggccttccctggtggctcagcagtaaagaatctgcctgccaatgcaggagagactgatcggcaagatcccacatgccccagagaaaccaagcccaagccacagctactgaacctgtgcgctagagtccatgctctgcaacagaagaagccatcgcagcaagaagcccacacaacatgactagcccctgcttgctgcaactaaagcaagcccacatagcaacgaagacccagctgaactgaagcaaaagtcactcagttgtgctggactctttgtgaccccctggactacacagtccatggaattctcctggccataatagtggagtgggtgtaagttcccttctccaggggatctttccaactcaggaatagaacccaggtctcctgcactgcaggcggattctttaccagctgagccaccagggaagcccaagaatactggggtgggtagcctatcccttctccaggggatcgtcccaacccaggaatcgaaccagggtctcctgcacttcaggggattctttaccagctgagctaccagggaatcccccaaaaagagaaatcttcctgaaatttatcctaatcatcttgagtgattaatgtagtaaatatcccaattttgcatccttggaaatgctaaacacactcttcttccccctgcctcaccccctatcatttctgaaactgacagagaacactaataattaaagggtgaccaagattcaaatcctttctcaaaaaacatttatttactgatattctctacttgtacatttgccctcgttgagacaacagtgtttctcttaaacaggaagcaacttcaagttttaaacattcttagtctggaaatccatcagtctttttgaaagtctaaaatatagctgtgctgcactctcttagttccacccaaaaaagtacagatgaacaagaaaagattcactttttttctaaatgaaacataattgacttgcaacattatattagtttcatgtgtataatacagtggtttggtatttttagacattagaaaatgaccaccaagtctaagtaccaactgttgccatacaaagttattgcaatattattgactgtattccctatgctatacattacatccctttgacttctttattctatgaatgtagctttgtacctccctcacctatttcactcatctcctcacaccccactcccttccggcaacttcaatttgtcctctgtacctgtgagtctgcttctgttttatgtttgttcattttgctttgtgtttttaggttccacatatgagagaaatcacgtggtatttgtctttcactgactgatttttttcacttggcgtaataccctctaggtccatccatgttatcaaaactggcaagatttttttataaggttggatgatattccatttaatataccacagcatgattcactttgtacaaaccagactgcatctcctttaatatctgtttacatgagctttgattttggattttcatctttaactcttctcaactaacatttcatcaaaagctaggtaaataattctctaaataaaaacgaaaagactgtaaatatgtatttcaaaatggaaaacaaaaagctgcaggaaatacttaaaagagtataaactcatttatcatacaaagacatatatgagtatgtattatctatgtgaaatatggacttccctcataggtcagttggtaaagaatccacctgcaatccagaagaccccagtttgattcctgggttgggaagatctcctggagaagggataggctcctcacgcccatatttttgggcttcccttgtgactcagctggtaaagaatctgaccgcaatgcgggagacctgggtttgatccctgggttgggaagatcccctggagaagggaaaggctatccactccagtataatccatggggtcacaaaaagtcggacatgactgagcaacttttactttcacttttcatgtacatatgtaaagaaaggagcatgaagaatataccaactgaggatataccaataactgaggtgaaggaatggaatttacagtttttactctagattctgtattatttgattgtgaaaccttattaacataacctttataaaatatgtgatctcagatcagctttacatttctagcatctggcattgtttatgacccagtaggtatcaaagttttttaatgtaaaaagcaaagtaatttttcttcaacagaaaatacttaaagctatttttcctaagagtttgtttaaacattaaatatcaacagtaataaatatgcatgtgccaactacttcaaaagaagtcacattagaaatataagctttaaatatcataatttttaagtgttatttttaaccaaccaagttttaccagttttcattctcaacatacacgagcatcttggtcaacatacaacataataaatatgccaaaaagagggggagaaaaatcttatttattaacacccaataaaaaaaaactaatctactgcatattttctaagcaagaatttaaaagagccttcccttttaagtatgaatcttataattttgtcggtatacctcaataaaaatgaatgaatgaatgggaaagtaccaaaatattaagaagagtaaatcttaactcagttttccctttaaacccccactgtcagctgtggatgattcctgaagttatcaaataaggatatacttgagtgagaaagctggtaaataacaagtaaagttattccctagtggtgcagtagttaagaatctgcctgccactgcaggggctacgggtttgatccctactctgggacgattccacatgccatggggaaactgagtccatgtaccacagctactgagcccacactctagagcccgcgttgcaactacggagcctccatgttctacagccactgatccgcaactagagaagccacggcaatgagaagcctgtgcgctaccatgcttgccacaactacagaaagccagggtagcaacaaagacctggtgcagttaaaagtaataaatttgtattattatttaatattattcaattattggtggatgtattaaataagtcttaatttgagaattattaaataacaattatttaatattaatatgaaataatattccttatgctctgtcccaagcaaaccataaaatattacaacatacagtccatttttttttttgcatcccaacatatattttgaaaacttttacactgatatcaaagacaggcaaagacactacaagaaaattacaaatatcctttacaactactgacatagaagtactgaacaaaacacgagcaaaccaaagcagtacattaaaaggtttatacactatgatcaaatgggatttaatcttggaattttaaaatgggtcaacagataaaaattaatcaatgtgatatgtcaccttaatagaatgaagggaaaaaataaacaaatcatctcaattgatgcaataatagaatgacaaatttcacatcttttcgcaataaaagcacttaatgaacgagaaacagaaactcactatgctgaaagccatatatgaaaaacccacggctaaaaacatactcagtggtgaaagactgtttccccttcgaattaggaaccatgtccacttttgccacttctagtaaatattatattagaggttgtaggcagagcaaatagacaagaagaaataggcgttcaaactagaaaagaagtaaaattatctctattcactgacaacatgatcttatatcgagaaaaccctgaagattacacacacaaagttaaagctaataaatgaattcagcaaagttccaagatagaaaatcaacacacaaaaatcagttgcaacgaacaatccaagaagataattaagaaaacaactccatttaccctagcataaaaagaataaaatacttaggaataaatataacccttaatcaaagtctcagtggtgatgaagctttgaaacgggagaggtggtgtttatacaacattgagaatgcactaaacgccacctgactgtgcactttaaaatggttaatcatgttctgtccaggcaatacccagcttgcttggtttctcttttcctcccaacattttacttttagaatttttcagtgaacacccacatactcatcacctggtttctacccactagcattttactattctattctttactactctttatcacataactacccatctttctaccagtccaagatgaatttcaaagaccctgtcatcatcaatacacttcacccctaaacattttagcacacatgtcatcaaccagagctcggtatctgttttacatatttttgagttaaacttacataaaatgcacaaattgtaagtgtattttgctgagtgttgacaaatgcacccatctgtctaacccaaccccctatcaagatacagtacattaccatcatcctagatatttccctcaggccctttcttagtcaatcccactcacatcccacctgagacaactactgttctaattttgtcctgaccatacattcattttccgttatataaaacttcattcatatagttggtaccacagaacatgtattcttttatctaagacttctgtcattcagcacgatgtctttgagaactgcttctcttttagacctccaattttgtaattcagagctaggaggatgctcccagaccaattaaaaaaaaaaaaaagcagaaattgagcaattcacaagacatataaagggaaagggaggaaaaaagtaaagtgaattgtgattcatatggtacttgtgggggaaaaaaagatgtaagcttttatatgcttaaaataactcaggaaggacacaagaaactggttacagaagttgcctcgagggaggggaaagacactaaaggagagatttttttggtaaaaaactgaagcataatacctgtacaaataagttcacatatcacaagtgtaaagctcaattttcacaaactgaatacatctgagtaacctgcacttagaacaagaatcagaatcttgtcagcaccctaaaaacaaaaaagataaccctctatcacaattctttgggggggctatgctgggtcttcaatgcagtgtgggctttctctagctgtggcatgtaggggccactctctagctgccatgctcagccctctcactgcagtggcctcccttgttgggggcacgggtttcagggcacacgggcttcagcagtcacatctcctgggctctagagcacaagcccaatggttgtgggcttagttgctccaaggcatgtgggatcttcctggctcagggattgaacctttgtctcttgcattggaaggcagatcctttaccactgcgccaccaggaagcccgcttctgttgtttatactctggtttttggccatgaggcatgtgggatcttctgacatcttaactgcggcttggcgtgggtctctttggggacatcttgtttgggactcactgctttctggacttggttggtttctttgccagattaagagacttattaaataagttttaataagcaataatttaataacattaaataagcctcagttattaataaatgtcttaatttgagtattaattattgctattaataataataaccccaagcaaaacataaaatattataacaaataatccatttttcttaaaactcaatttttattttactctactgtaaatactaatataaaaatccaaaggaagtaatgtataatataaaccaatggaaaaacccaacataaggatcaaaggaagaaagggcctagaagcaatcacattccaatccgtaagcacacttagtgcctagatcttggttcctaaatattttcttcaataaatagaaccagggtttctttgagaagcagtcaattgcacagcaggtacagggaaaatacaagagcctggagcatctgctggtgtcaggaaggaaggactcagaagagtatgggcataaagggtattaggatgactcctgaaagagctcctgatgtcctaagctgaaacaatttgagcaacaaaataaatacagtaagtaccctacacacaaaactgcaagtttcgagcttacggaaatgagaacgtgcattctatcaatgtcaagcgtgagtgaaattgtgagtctcctactgctgacggtctttcagctctaccatctcccatcttctctccctcctctagtcagcagctcttcttgcctgctgtactactatacttctaaaggtactgtactctaagattaaaaagttttctttattttctgtttgtttttatttgtgtgaaaagtattataaacctgttatagcacagtactatttgactggttgtgttaggtaactaggctaactttgtcacacttacaaattggactttaggaacgtgctctgaaaatggaacttgttcgtttgtacgggacttattataacagtgttggataacctacagaaaaaaataatatctgttagttcaaacaaggaaagaaagaagagagggaatgagtagctctcccttctcaaagaattctagttaataaatgcagaatgaaaaaatagaaaataagcattagaatacccaataatgattattgtagctaagattcactgatgggtactaaaatcagtgaacgaaagtttgagaaacaggatatcagcacagtctcaaaacacatccaccaagatatttattaatcaaattataaagagaaaaacagtaactttacagtggagaaatccaacatacactagatgaaccaagcagtcaaggttaacatcaccattacagcatgctgcttctgtagcaacgttattaaaaatatatagcctcaatctaaccatgagaaaccatcagagaagcccaaatttagagaccgtctacaaaataatcaatcagtattctttcagcttgaaggtcatgaaagacaagcaaagactgaaaagctcacatattacaagggactgaggcaacataactcagtgcaatgtgggatcctggactggatcctggaaccaaaaaagaacactggtgggaaaattggcaaaatctgaatagaagtctgtagttcagctaatagtattgtaccaatgttatttttttagttttaataatcttatcgtggttagttcatattggtggctggcaggtgatgggtatcgttccctctgtactgttgttgcaacttttctctaagtctaaaatgtctcaaaaagaaaagttaaaaaaacaaaaaacaaccaagagcattaactgttttgaaatgtaaaatcatacatgcattttacaacaggatctttaatcacagaagatacaagagtaaggtttaactactacaaagattcaaacttgggaaaactcaagaaataggaacgactaaacataaatggaggaggatggaaaattcttctaaacaagaatgctggctctgttcaggcatttttcgttttgcatgctaagcacatcctctgaagaatgcagcacgcattgaccactggctttatataccaaaccctgctaacaagaccttctcacagcagctccactgaagtatttcaagtcatgcagttttaaaagaactctttaaaactttcctaagtaggtaccaacccaattgcttttagctaaaattgttttttctcagttttaaaagttacattctactaataaccaacaacctaggagactcttaaaatgaaaaactaataacctttttggaatatatatacatatttgcaccttcacatgtctataggcatgtgcaggtgcatatatatacaccagctgtatatatacacatacatatgcatacatgtgaaactagatggaatctatgaaatcattgccaaagtgataccaaccaaggtctaaaaactgtgacaattttatgtatagcatattttaaatatttaaaacattttgttctctttctatatatgggcacaagggagagatatctgaactctaaacttgtaaagcaatgaagaactcacacaacacagcttgtgaaaacacaaatggctaccatccctttggcaggcaatctggtgctatctagcaaaatctgaaatatgggctttgattcagcaatcccacttatgggaactataaataccagcataatattatgtacaaggtttattcaactcagcattgcttgtaatggcaagagattaggacaaagtgaggtgtcctatcagtaaagtagattttaatggcagttggtatatgtgatccctttcccctggcccttcctctgcaattctgatgtatcattcatcttccttcattcccttgttttcaatttctttttacattggactcttcttctaagcacacaaataaccccgtctgtcccatttttgttgctgttggtttgtttctaattttataggactctagaggatgtgtagggaaatatctctgcaagtcatgcctcactaggaaaatgtccagtctaatttttctgggatagtttttggagcttttcctttttcttggagccaccattcttgcttccctgatagctcagttggtaaagaatctacctgcaaggcaggagaccctggttcaattcctgggtcaggaagatctactggagaagggataggctacccactccagtattcttgggcttcccttgtggctcagccggtaaagtatctgcctgcaatgcgggagagacctgggttcaggcccagggttgggaagatcccctggagaagggaaaggctatccactccagtattctggcctggagaattcgatggactgtatagtctgtggggtcgcaaagagtcggacgggactgagggactttcactttctgttattgctaacagaagcctcttaaagtccactgctgagtgggtccgccttgaaagagaatttcctctttttctttggggaccctcttgtttcctgactcttcggggtcattaactgattcctctttgggaaaacttggaaagacttctacagccagctgtctcttcaatactgccactaactagctcctccttggaaaaaaagatttctttttcttgggtttggaggtgataacatggatattctccattctcccaaggagcctcctcaggcttttgctttttcttcttttggggtcttttacttgtctcctcattgctccggggcactactgttttttgaagatgccagggcaatcacagccagccttttcttttccttattcaagtgtttcttcttatgtttctagcttcctagtaatctcagcagctacttcatctgcctgaaccactgcttccttcatgacatgcagatttcttttgtggaatctctccagtctaatacacagaaggacagtccctcctcaacttgttctcaaagtggtgggtacctcagagaagcaatcaatttgtgaggcaatactgcctttattttgccaggtattaggagaggtggcctctgttcttggcagctacttggccaatgaaggtagagtggaaaatgagtctggaaatctgatccctttgctggacccaggaaatcactcagacactaggactggccatcaaccctatagcaagaggcctgtttaagtgacagagccctgatcaaccatcaccatgaatgtcccattctaagagtacttttcctttaccctggcaactcaagatatccttttagtttcctccaaccacaactacttacttcttgagtaacctacatactatgtccttttttcatgaatataattcagttggaggaacaaccttaccctaacatatttgaccattttcagccttagctttttaacttttttatttacttatgatttttgggctttgctgagtcttcacagctatccgggcttttctccagttgcagcaagcaagggctaccctctagtttcagtgagagcaggattctcattatggtggcgtctcttgttgcagagcacggactctaggggcaagggcatcagaagctgtggcacgtgggctcagcagtcatggttcctgggctctagagcacaggctcagcagttgtggcacacaggctcagacgctccacagcaagtgggatctccccagatcagggatcacacccgcgtcacctgcactggcaggcagattctttaccaccgagccaccagggaagtcccagttagggacattttaaagaaatgtttggttaagtcattttaaaaatcaatttttaaaacaatattatactacttcagataaactatcttacttagtatatctgctcctccatccacatctccaattaggcctgaaccacggagccactagggaagcccccagccttagcatttttataatacattttcaacagaaaatgtcatttaacataagaagtttctttttaccaattttaccagaagccccccaataaaaaatttctgttagtgatacagtataatactcttctgctttcagctttaaactgatctctaaactagatttgagaaccatcgaaaaggtgtcaggtgaagcttcaatgtaagctgtggcattcagattggccttgacagagtactactggtggttaatctaagcaggatacaaatgcgtatgtgggaaagctaaaaagaaaagcaactggatgcaaacatgtggagttcggaaacggccagagattaaaatttgtgaaagctgatgagtggatggtacttacagacatgaaacttgagttacctagattaagtagagcagagggctgagctttaagccctggagaacgccaacatttagaagtccaaaatcagcaaaggaaaaggacctgtgaagaataccagagactgggggttggggtgagtggagagggggtggggagaagtatcctggtgaaagtgaaagtgaaaaaaggcatttcaagaagcagagagagagtattcaaatgtatcaaatgctgctacaatgtggcaagggaatgggaggtttcatgtttagaaagatggatattttggataattgtaaaaaaaaaaaaaaggcacactggtgcagtaagcagaattaaagtctcagaggaataggatgaactgaaaaaaaaatcttcaaacatgctaaagtctgtccctaccttgaggtctttacagatgctattcgaccgtcctgaaacatattcctctggacctttccatgcacccgaacatcttcttttcagggcacaagtcaccacttccaagagaaattccttaactatcccttcttactactattctctagccccttacttagttttataaaaaaaagtacgtaacagtacttgaaattccatgctttcatttatttgtttctgtgttgattttcccaacaaaaatacaataaaaggaataaatatgtacaaatacttttaagttttttaagaacatgtgtatttttctaggtgtaccggtcttggcagatattccattacagttatctcttgttatctgcaggggattgttacagaactccctgtggataccaaaatctacagatgctcaagttccttatattaaatggtatagtatacctgaagatataaccttgttgactacaactctctcacagtgagaaatctgcaataaagcaacaaaaaaggtccataaatttataatcatgggcaaatttcctttcctgtcattcttctgccatagtttccctggttttctcacacaacattttcaccttaaccttatttcacacacaaaaaaatgaactagtaaaattaatattacgagcatactcttaatagagctaggtcatcctcaaagttcttagacaaatgaaagttgaaaaacacattacaatagagatggtctagtcccactgctgtcagacatggaaaccaagactaatgtgtttgttcaatgcaatccacatgtgaactccaaacccaggcttttacaaagttagagacagacatctgactaataacaaagacttaagtaaatagtaaaatatgtcctgattatgagacatatttcacaaacttatcccttttggggtgaggggagaggccgcattgggtctctgttgctacacatgggctttctccagttgcagcgagcaggggctactctctaattgcagtgtgcaggtgtctcgtggtggtggcttctcttgttgtagagcacggactctagagcgcacaagcttcagtagttgtggcgcatgacctccaggcttagccgccccacagcatgtggaatcttcccaaaccaggagtctaatccatttcccctgcattgtttggtggattcttaaccactggaccaccaggggaagtcttgttaagcctttatctcatttactggctccatgtccacagtagaaacaaactggattttattctaaaaacctctcttgggaacacctaccttagtatccctagggaggacacaactcccctgttcaaatccatctgttaatcagtttataactagtcagagaatggaaaaaatgtaggcctactgttaaaaatactttgcagtgggagcaaagctatgaaatatttatttacttcttactgttttgagcacatttcaaagatcaatgaaatgattctaaatgcctctacctactagagctgagaaacagaccatttacattatgccaaaagaatctatctaacatctaaaacaaataattcatttgacaaacatgttctgagagaccactatgtgctaggcaccttttctaagtgctaggggcacggcagtaaataaactgcatggattttacattcttagtggagagaaacaaaataaataagtaagcgacttcatgttttagaggtatcataagagctatctaggggacttccctgatgctccagtggctaagagtctgagcttccagtgcaggggcctgggcttactcttagcgaactagacccgcatgccacagctaaataccctgtgtgtcacaactgagactcagtgcagccacataaactaaaaacaaatctttttaaaaaaagagttatctgagtatttaaaccatgaaaagtaatttggagaaagagaccagaaaaaaagagatacagatgtaaataactcaactgtattcatttaggtggtctgtttgttttatgacagagtagattttctaatgtagcaaggttcctttataatcagttccctttataaatattccactttataagatatagactataacttcaaatatttttaattattagtatatctccactcttagaatatattattatttatatttacaacttattttgtaacaagttcttggtcaagaatataatttataatgaactaacaccaggcctttttagctaaacacacatcacttttggattttgctttatgaaggttttgaggaagttgttatgctgttgctcagccgtgtccgactctttgctactgaccccatggactgcagcctgccagcctcctctatccatggaattttccaggcaagaatactgaagtgggttgccacttcctttttttttttttttttaaagtaaagccctattaaattgtgaagcttcccagcagtgaactaaggatttcaggtggcaatgattttcaattcttaaaaacatagttaggttcattgatcaccccatcctaaattcatataatgtaaatcaaatagaaacagcctaaatgaaattgaaatgttggtcattagtatgacaatcaagatgtaacaacgcttgactctgttttcctataaaacttgaaaaatgagtaatacaaaacgaactctttggtaagagctcatttccaatttaaaaaaagcattagttttaccaaaaaaaatgtacacatactatttcattttattctcttctggttgttagcacttcaatttggataagaaagcttataaaacaaactgaagattttcacaggataaagcttaccttcagactggtatgagaacgtggttgacttaattcctgaaatttccattgttctgatccaggggtctcaccacctttctgagtgtcaggtgtaagcaatccgtctccagaaggtaaagggaaaatccctaatgatataggacgttcttttctatttggaaagggcagaagaataagcattaattcatttttaagttttattcatcatgactgtaagtaataagcctgggctgtcactgctttagagtcatcactcttaaataatattgtgtgcctatctaaacaagtagacttaccaaagagaaaggacaaagtctcagaacttaaattaagccccaagaaatcaattaagaaaggtagtaagaacaatagtttacaaaatcttaagttactgctgagttccttgctcaggaagcagtctgtgctgtggtttcacagcaaggggagctgctacagtttcactcatgcttaggtcagccctagggaactgcaaatgacccccactcctgcttctctaggctttccaatttctcatattaatccctacatacttacccaagtctctttagggtgtgttttttctgccttgaggaaaatgaatacatggtttaaatcagcctactgattaaatagtcaaaagaacacgtacaaaaaaatgttgcctgccatttcaatcaagaaagaatagaatgctgtctgccattcagccatcagccactgtagccagtctggatggagagccctgagaggaattcaggatggagaaaaacgggatactgaccctaggtagttaagctgcatatcaaagaaataatttcagtgagcccagactcctccatcttcccaagcatagaaaagcactaaaatcattaacttgagatgtctgtcttttgtaattagcaaaaactcctgagtatccaaggtcctcccttgcctgtttggaacagttcttcagagctatccgagagactgccctgacggactatggtccttagaaacgtccctgagtaaagcataattctcaacttttaggttgggctttttttgcctccagagttttatcccctaaagtaggaaaactgtatttttctacaggaactcatatttttctgtatgagctccttttcatcacagtatgtatgacaatccaactgtcagtttttccaaacaaggatgcccaaagattctatcaaaaactgtagagtttcaatgctttgtgtgaaatttcagtgaataagggtttcaattttaataatagaacttgaacaagaaatacatcctttgttaatacaaagggtatttaaagagtggaaacaagcctggttcttcctaggtcattaactcaaacagaaatttgctagaaaccagacactaaaggtttggagcttctagcaaaactgtaagaacaggaacactgaggttatacataaaagttggaaaatattcagttttgctgaataaatctttattctgtaagcttatctttataccaagtaactttaagccacttttgaaatgtgccctcattgaacacaaagggtacattgctttcattcctaataacaatcaggaagaattagtacaactgtcaaacaccttaaagattaggtgaagcaaaagggttgagagattgtattctattaaagttgtatgcacaaagaaacagacaggacttttctctatcagagttaactactcatcacttcttcacacttagggtacttttcctatttgatttgggagaaaaattcaaacacacataggcagcacaataaaaggttagatcttaaaaccacgtaagcttgttatgacaagcttaggttatttgccagaaccaccaaattacaaagcagtcagctattctgtttaattcccaactgctggttcagcgaaaaagctttcataagtccagagcaaaaagaggcattatttattatatccttactggataatacagaacacattaaacacatacatgtttccacttattgtagaacctgttctttcttgagaatgactcacccctttcccccatcttttctgcttgattttaaaatgccctttatttcatcaaacgatggtgacaatgaccggaaatttgggacaggcaacatattttgggaactgaaaatctaaggatcttagacttactagattacttcttctttttaacatatcttgatgacttaagcaaaaaagtgaccaagaatttaatcagatggaatttaatggaatgctctctgaccccaaatgcaaagaaaagtaatacaaacttcattcgaatttatcacactgccaacagaaataaaaacacaggccagtcatgagagttatattcctttatgaatgagaacacaatcatttttcacacgtcaaacgctggaaaagtgtaaaactactgggggaaggagtcagcttggagtctaagctttactttcccatttctgttaactacaaaatctacagttcaaaatacgagtagaattcaaatctttacattgcttttattttcctccagaaactgctctacagaaggggaacttttcttcagaaactgatagttgtcaagagggtcaatgatgctctaggttatactgtttcaactctggaaaaatagtattactacataccactcttccctcttttttttactgacttggagggagggaggacatataataatgcatgttagtttgagtcctattttcaaaaggaaaccctgaaaagacaacattaggtcctgtatgtatactggtatgtatatttgatactctctatattaaacatatattatatatttatataaattaactatatatttaactatgtattaaatgcttcagtaaaactcacagaagaaaccaaagaatgaaaatacatgtgggaaaatatcaagtggcagatttaaacaccaggtgttttaataatgatactactgtcaagaaacgaagtatcagaatcagccatcagaatccttattatatctattttttaaactgccatacatccatttttaaattggttatttaaatgttacctacttgcataaataacttcataaatatgtctttaaatatttctatttccatttaaaacaaataatcattaataaaatctactatacatatgtataaagaacagtaaaaagattacatttgttcaacacccaccaatatgacaagcactgaaatggatgatttatttacatattctcatttaatcctcacaaggaaataagaattattttccctgttttcagattaggaaaagtgatgctcagagactttggggactagtaattggaagaaatgggattcaaagtcaggcctgttttgactccaagacccatgtacatttcctggaactattacttcttgacaactgcgcttcagtcatgtttgagtctttgcaaccctatggactgtagcctatcagtttcctgtccatgggacttccccagccaaaatactggaaatctggattgccaaaccctcctccaggggatatttccgacccagggatcgaactcctctctcttaagtctcctgcactgacaggtgggtgctttaccactagcaccacctgggaagccaatcttaatattaaagactttgatatctttcttcagtcagatcaacagcgacttttatgtcaagaaactctttgagtttaatcataaattattttatgaataaaatagctagagctgatatagttttactaaaaatggagtaaatataaatgattatgaaaattatttacttgtttaatttacaatatatctttaactgattaaatacaagataatcatctcacgaatttttaaaatgactcaatggggtaagaagctcaaaggaggaaactcgggtacagagattaagtaatttgccaaaagtcccataactcatgtgtggcagagcatttgtagcctggtagtccaactctgcacctcttattcactgcatattactgccttcataattggaactgaaacctaggacagccctttaaaattaatcttactttaatagtctatatgttcttgagtttcagtttcctaaaagcctatatatacatacacacaaatcctttatgtactaaaatgcacacaaagcaaaaagattgctcccagtttttataaaattggggaaaaaataaataaatgaccaagttttaagaccacagatgaaattaaattctggaccttaaactaatgttgaacatgagggtgagggaacttactactttaatttctctttaagtccacaattaggagttgagttttaagtaaacatttacataataaaagttatacatttagaaccttcatttaaaaaccacacacaaagcagaaatctcaacaaatcaaatttttatcttagtgagttagaaaacaaaagaaaccacaacattaaaactctaaaatatagaaaatggttcttagagcatgcaagtacagtgaccagcagaaacgctacagagattaatgatatccccacaagcaggcatggatatctgttatccaagtctacaaagaaaaggcaacatctgacaaaacaatagtgaataggctttgtaaagctttccaactttgatgcataaataattgggagaaaaaatgaattccttgccctaaaaggtttaaatcctttcacttcaaatatattttgctgtaggaggaaaatatttaaattgtcagttcccatgaacttctatcaaaaactgcaaaaaggatgcctgaacctccaacagtctaaggatcactggaacaaaataaacacctatggcctgtgtctaatcaactacaagtcccaccataaagatatttgcttctaaatgctcagatgctctcatgcagaggttgtgtaaatttggacccaatgctctactcctattttccctttactggttgaaccctctgcttaaaacaagaccactctgaccttgtatttgcatataagtacaatctaaaaatccttttcttaagtgggtggtttccaaacacaaagcatatccctaagcgatagcctataaattactatatataagaatagaagtcttagcttcaggccattttccattgtttcaatctgcaacatgaatggttacaaagaagacccataaagctaaaaataaaagaaaaaccaactaaaaaaggacttctaagagagactgaagtacctgagtatccttggtaggttctgcgtcaaagctggcactccggtagaaatagaaaagtgcacaagcagcaaaacggagagagatactaagatagcagaattaatgaccaccgccccgccaacaaagccaaacacaaacagcagcatgcatccaggactcatggcgctgtgctggcatggtgaaacacccgaaccaggaggcctacacgggggccaaaggggtatctttgtaatgaggatctgtcattcagctgctgccacaaaaacaatgccatcagcagcagctttccactccatcctgctgcagctccgaagcgctgacgtcatcctgctctcacagcctcataaccatagagctgctgctcctagcatttatgcagcaatccagagcagaggccagcctattaactattttcctccccactaacgggcctggcttagctcattggctacaatgcttggagatctacataatttattcacactcctacatcgaacagaagtctagctaacccttttaaacatgcctctctatagcaaaaatgacttttaaaccaattatacaggagaaatgaaaaatttacagcattctgacaaatgacaattttaaacctactacaatctttgttaagtatcagaaaacaatggctatcaatttaccttttcattagtgaaagttgttttgtttttctatgctgccccctcccatagcattccaactacagcagggagagagctaactattgtttgaggattaaagaacagagagaaacagaaacagattattttattttcctttttcccaaggcaaaaatgtattaaaaaagcttacctaattctactatgagctgtggattctagttgatcactccctgagatctgatgaagttttgttctttctaagtgttccatataattatggatcatctattttgaagaaacaaaagaatacacaaaattttaagactaatacctggaaaaaagttaacattttaacaagggaaaccttttcatataaatttcttatttataggactacccatgttccatagatgaaattttattttattctcaaagggatatgcaaatgcttacgtttaaggatgctggagtccagaaaagtagccaacattttgcttaacatagcaaaaattttttacaatacgtaatgctattaaataagtctgacataaataacacaaattagatatagacattgggaaggaagtgacaagcgataactgattaaaggggacagatgacacttgagaaatccattgctgaagtgggaaacaacaaagaaattaacttgaaacttaagtaaagataattttcaatttaataccaagatatttatttatttttgctatagatttagttcaaagaatgctaaaatattctctcctatgttagactgctaacttactggaatcattacgtaatataatcatataaaaatggcagcaaacttaaatgaaaaaaacacattaactctttaataaggaaccataggacacaagctgaatatggcagtgaaaacttcaagaatatcaagtgtaaaacctgtcaagaaattctacagtctgatctgattccttttttttttttttttttttggctgcactgggtcttagttttagcatgtggggtttagttccctgaccagagatcgaattcaggcccactgcattgggagcatggactcttagtcattggaccaacagcgaagtccctcgtttgattctcgatatagttccacttttaagagacccaaaactggtattaaagcatgtaaaatgcaacaatttccatcataaaatcaaaaaggctttgctagatattgatgtgatctgaataagaaaaaaatgaatacgaaaagttatgttagcaatttcagttcagttcagttgctcagtcctgtctgactctttgcaaccccatggattgaaacacatcaggcttccctgtccatcaccaactcccagagcctgctcaaactcatgtccatcgagttggtgatgccatccaaccatctcatcctctgtcatccccttctcctcctgccttcaatctttcccagcatcagggtcttttccaatgagtcagttctttgcatcacgtggccaaagtattggcgcttcagcttcagcagcagtctttccagtgactattcaggactgatttcctttaggatggagtggtttgatctccctgctattcaagggactctcaagagtcttctccaacaccacagttcaaaagccatcaattcttcagcgttcagctttctctatggtccaaccctcacatccatacatgaatactggaaaaaacttagctttgactggacggacctttgctggaaaaggaatgtctctgctttttcatatactgtctaagtttgtcattgcttttttcccaaggagcaagtgtcttttattttcatggctgcagttaacatccacaatgagtttggagaccaagaaaacaaagtctgccactgtttccattgtatctctatttgccatgacatgctggacccagatgccatgatcttagtttttagaatgctggttttaaggcagcattttcactcattctcctctttcactttcatcagttcctcttcactttctgccataagggtggtgtcatctccttaactgaggttgttgatatttctcccagaaatcttgactccaacctgtgcttcatccagtccggcatttctcatgatgtactctgcatataagtcaaataagcagggtgacaatatacagccctgatgaactcttttccaaatttggaaccagtctgttgttccatgtccggttctaactgctgcttcttgatctgcatacaggtttctcaggaggcaggtaaggtggtctgatattcccatctcttgaagaattttccatagtttgttgtgatcaaaacactcaaaagactttagcatagtcaatgaagcagaagtagatccttttctggaattctcttgctattctatgatccaatggatgctggcaatttgatatctggttcctctgacttttctagacacagcttaaacatttggaagttctcagatcacatagtgtagaagcttagcttggagaattttgagcagtactttgctagcatgtgagatgaatgcaattgtgtggtagcttgaacattttgaacatttagtttgaacattgcctttctttaggaatggaatgaaaactgagcttttctagtggtggccactgctgagttttctgaatttgctggcataccgagtgtggtacttttacagcatcatcttttaggatttgaaatagctcaattggaattccatcacctccaccagctttgttcgcagtgatgcttcctaaggtccacttgacttcacactctaggatgtctggctctaggtgagggatcacaccattgtggttatcagggtcataaagatcttttttgtacagttcttgtgaattcttttttgtatagttcttgtgtattcttgccacgtcatcttaatatcttctgcttctgttaggtccataccatttctgtcctttattgtgcccatctttgcatgaaatgttcccttagtatctctaattttcttgaagagatctctagtctttcccattctattgttttcctctatttctttgcattgatcacttaggaaagctttcttacctctcctttctattctttggaactctgcattcaaatgggtatatctttccttttctcctttgcctttagtttctcttcttttctcagctgtttataaggcctcctcagacaaccattttgcctttttcttggggatgctcttgatcactgcttcctgtacaatgttataaacatccatccatagttcttcacgtactctgtcaaatctaatcccttgaatctatttgtcacttccactgtataatcataagggatctgattcaggtcatacctgaaaggtctaatggttttccctactttcttcaatttaggtctgaattttacaataaggagtttatgatctgagccacagtcagctcctggtcttgtttttgctgaatgtaaaaagcttctccatctttggctgcaaagaatataattaatctgatttcagtactgaccatctggtaatgtctatgtgtagagtcatcttttgtattgttccaagagggtatttgcaatgaccagtgcgttctcttggcaaaactctgtgttagcctttgccctgcttcattttgtactccaaggccaaacttgcctgttactccaggtatctctcctacttctacattccagtccccagtgatgaaaaggacatcttttttttggtgttagttctagaaggtcttgtaggtcttcatagaaccgttcagcttctttgacattagtggttggggcaaagacttggattactgtgatatagaatggtttgccttggaaacaaacagaatattctgtcatttctgagactgcacccaagtactgtattttggactcttttgttgactatgagagctactccatttcttctaagggattcttgccgacagtagtagatataaggtcatctgaatgaaattcacccattccagcccattttagttcactgattcctaaaatgtcgatgttcactcttgccatctcttgtttgaccacttccaatttaccttgattcatggacctaacattccaggttcctatgcaatattgttctctacagcatcagattttacttccatcaccagtcatatccacaactggatttgtttttgctttggctcagactcttcaatatttctggagctatttctttctctactcttcttcagtagcatagtaagcacctaccaacctggggaatacatcttccagtgtcatatctgtttgccttttcatgttcatactgtggctatcatgactagtgctgctataaacataggagtgcatgtatctttttgaattacagctttgtctgaatatattcccagaagtgggattgctggatcatatgataattctatttttagtttttggggaacctccatactgttttccacagtggctacaccaacttacattcccacaatttaagaaatgtaaatatcaagagtaggcaagaaaaggagaatattcctagaattcttaaaattacagcatggaatagctttgtaagttgctaaactttagctgcatgaagataggtttcaacctcaaataacttaaaatatgcattgtagcaatattaaaaggatagctactgaaaaaatttaaacaagttttaaaaatttatttttaagaagtatgcttttgtcaggagttccctggtggtctcgtcgttaggattccatgttttcactgctgtggcccggattcaatccctggttgaggaactaagtgagatcccacaagctgcacagtgtagccaaataaataataagtatgttgtgaaatttatactcggcatggaagcatatacaaaaattaagacgtatataaatcaatttgaaagtgttatttacttcagataaacaagaagtctgaggcatggattaagatgggtaattccatcaaatcaaatataaaagaatcaactaggctgttcccaaagttaaaattagtacaaataagaagtgtatcaggcaaaaaaagatgaatatatcatcacacagatatgtatatgaaagcattttaaaaagcttttgaatttacataattttaagtttaaatattttctcttttccaacagttctgcagaaatacaatttttgtgtttgtgtcagtgaggcagaaatgctgagttgcttccttctagtatcaagaaaaacttcaagtgaggaagaaatttaaatgagactagcataacaaagtgatggttggaccaaatatatcaatttaaattttcaaaagattttagaaaatctacgttgaattcttttataatggaaagtaatcatatgaatttgatttattcaaatgaagactctaagttcctttacagattgaaatgaatagaaatctctcctaaattgagtctatataatctatttattcaatatagaaaaataaaaagattaaaaaaaatgcaaagatacagaattggttctaccccagtctgttctacatactgactactgtcttaataaattgaaaaatttttaatttagatgttgaatttcaaaccaattcccaatcaaaaaagtgatcccaagtaactagagatacagtattctaacattccaaaatggcctatacaatgaaactggttttaacccagttaaactagcacttaataggacaaaagaacagcaacaaaatggctgctaatatttactgatcaccatttacaagtcagctgatgcatgcagagctatcgtttcagttaatcctcacaacaacagtatgactttctagataaactctattttaagaggttaaaataacgtccaatctgaccagctagttaatgattacctgttttctaactgtcagtagctagttggctttgcggccagaactcagatccctctgactcagtcatcagagcagttaagcattataagacttctggtatatctaggtgccgtttcagtcaattctggaggcaagcaataagctcattgtccttttttcctcacacccacaagaaaaccccacattctaagacatttcctgatgtctgaagtatattctatataagcactatattctatataaacacaaaaaagtagataaaataaattatacataagaatgtaaattttaattacaggccttcacagagtagctctggtttttttattaaaacagaaacaaaacaaaaccaactgagtattgggcaatgaatgctgcaaggtagcaaagagaggcaggaaagtaaaatagaatatattttagataaatcgttttgggtccaccagacccatgcctcctgatctcagaactgcaactctcaactgtcacaggtatgcatattaattcacataaattcaggagtcaattcagcaacaagcagctggagtcatggagaaggatcccaagcatattgtttggaacatcccaaatcccctcccacctagagaaatcttcaggcagaggttgatttagctttggctaaaactgaaatgcaagacaatagttattagaaaaacaaggcaaaaaagagagattttggagacaaacagcataatccttttaattctgttggcctttaatctttccatatgcagctcaaagtatatccacaaggccacaattcttaaaatggttgagacaccatgaaacaaagagacagaaaatcttctagtgcatttaacatccatgtgctgcataacttaaaagcaccaaaaattcaggaaaagggaatcagagtgacctagattcaaatccagtcacatactagcatagcatttgggacaaatcactccatattctcttttaagcttcagtttgtaaaataaggtgagtgataaagagtttgctcagaggataagatgagaatgcatttaaacactccctagagtaagacaagggttcaagttttcggtgactaatgagtatgtaaattttctccaccgtccttttaagcaaattcaataacgtgcataaaattttgaatttgattcagtcagttcagttcagtcgctcagtcatgtccgactcttcacgaccccatgaatcgcagcacaccaagcctccttgtccatcaccaactcccggaatttacccaaactcctgtccatcgagtcggtgatgccatccagccatctcatcctcggtcgtccccttctcctcctgcccccaatccctcccagcatcagagtcttttccaatgactcaactcttcgcaggaggtggccaaagtattggagtttcagctgtagcatcagtccttccaaagaacacccaggactcatctcctttagaatggactggttggatctccttgcagtccaagggactctcaagagtcttctccaacaccacagttcaaaagcatcaattcttcggcactcagctttcttcacagtccaactctcacatccctacatgaccacaggaaaaaccatagccttgactagacggaccttagtcggcaagtaatgtctctgcttttgaatatgttatctacattggtcatagcttttcttccaaggagtcagcgtcttttaatttcatggttgcaaccaccatctgcagcgattttggagcccctaaaaataaagtctgacactgtttccactgtttccccatctatttcccatgaagtgatgggaccagatgccatgatcttcgttttctgaacgttgagctttaagccaactttttcactctcctctttcactttcatcaagaggctttttagctcctcttcactttctgccataagggtggtgtcatctgcatatctgaggttattgatatttctcctggcaatcttgattccagcgtgtgcttcttccagcccagcatttctcacgatgtactctgcatataagttaaataagcagggtgacaatatacagccttgacgtacagacagaaccagtctgttgttccatgtccagttctaactgttgcttcctgacctgcatacagatttctcaagaggcaggttaggtggtctgatattcccatctctttcagaattctccacagtttattgtgatccacacagtcaaaggctttagtgtagtcaataaagaaaagtaaatgtttttctggaactctcttgttttttccatgatccagcagatgttggcaatttgatctctggttcctctgccttttctaaatccagcttgaacatctggaagttcacagttcacgtattgctgaagcctggcttggagaattttgagcattactttaccagtgtgtgagatgagtgcaattgtgccatagtttgagcattctttggcattgcctttctttgacattggaatgaaaactgaccatttacagtcctgtggccactgctgagttttccaaatttgctggcatattgagtgcagcagtttcgcagcatcatctttcaggatttgaaagagctcaactggaattccatcacctccactagctttgttcgtagtgatgctttctaaggcccacttgacttcacattccagaatgtctggctctaggtgagtgaccacaccatcatgattattttggtcatgaagatctttgttgtacagttcttctgtgtattcttgccacctcttcttaatatcttctgcttctgttaggtccataccatttctgtcctttatcgagcccatctttgcatgaaatgttcccttggtatctctaattttcttgaaaagctctctagtcgttcccattctgttgttttcctctatttctttggactgatcactgaggaaggctttcttatctctccttgctattctttagaactctgcattcagatgcttatagctttccttttctcctttgcttttcccttctcttcttttcacagctatttgtaaggtctccccagacagccattttgcttttttgcatttctttttcttggggatggtcttgatccctgtctcctgtacaatgtcacgaacctctgtccataattcatcaggcactctatcagatctaggcccttaaatctatttttcacttccactgtataatcgtaagggaattgatttaggtcatacctgaatggtctagtggttttccctactttcttcaatttaagtctgaatttggcaataaggagttcatgatctgagccacagtcagctcccagtcttgtttttgctgactgtatagagcttttccatctttggctgcaaagaatataatcaatctgatttcagtgttgaccatctggtgacgttcatgtgtagagtcctctcttgtgttgttggaaaagggtgtttgttatgcccagtgcgttctcttggcaaaacactattagcctttgccctgcttctttccatattccaagcccaaatttgcctgttaccccaggtgtttcttgacttcctacatttgcattccagtcccctataatgaaaaggacatcttttgggggtgttagttctaaaaggtcttgtaggtcttcatagaaccgttcaacttcagcttcttcagcattattggttgtggcataggcttggattactgtgatactgaatggtttgccttggaaacgaacagagatcattctgtcgtttttgagactgcatccaagtactgcatttcggactcttttgttgaccatgatggctactccatttcttctgtgggattcttgcccacagtagtagatataatggtcatctgagttaaagccacccattccagtccattttagttcactgattcctacaatgtcgacgttcactcttgccatctcctgtttgaccacttccaatttgccttgattcatggacctaacattccaggttcctatgcaatattgctctttatagcattggaccttgcttcagtcaccagtcacatccacaactgggtattgtttttgctttggctccatcccttcattctttctggagttatttctccactgatttccagtagcatattgggcacctactgacctggggagttcctctttcagtatcctatcattttgccttttcatactgttcatggagttctcaaggcaagaatactgaagtggtttgccattcccttctccagtggaccacattctgtcaaaatttgattagagaacagttattcatattacgaaatgagcccgagatttccattatgcagcaaacaacgtgtttgatagaaaatgctgtctaaacaactattctatgtacgtataaaaaggttactgagttagaagtaacagtggaaagattaaacccttcagacttcctttctctgaaggttttcaaaatttacctttaaacgacctagttctttagcattggatagcaatttatacggagaagccaatggcaacccactccagtactcttgcctagagaatcccagggacagaggagcctggtgggctgctgtctatggggttgcacagagtcggacacaactgaagtgatttagcagcagcagcagcagcaatttataattgctaattgaatggtatttctagtacagatgtataaacacataaacacattttaaagaagccatatctatgtcttataaacatttgctgaggcagagcaaaatacagagagcctatcagaggacagaagctgcttatgtctaaaggaggggatcttgtgaaaatgctacatgtaagatctgtcacagttattagacaggcccaactctctgcctttggtatttaagattttcctgagatccttctttttttcttttagaccattcttctctgaaggaatagaaatataaaaactatgtacatatatgagagaaaatatgttatttcactttacaatgactttttcaagacagcatatgttttagacatatttcaatttaacaatcctcaattattacaatgattaattaaaaccttcaattaagaaaaacacaattcattatttatcactaccaattatttatggcatataaacctattcccccaaacatgtttgtaattatcagcatcgaaaagaactaccagtacagggcattgttggggcatgaaatgaatggtgtgaaaagaacaaacaataaacgtttaacaaccaattgtttttcaacagtcttaatatgtaccaaataccatcttactaaaatgtggttatcttttcatactgaaaggctgctgtgtaagctgtttctgttttcccagagctctatggttccagccctctgtggccaatctttttcctttaccactcaatatcagttccgtgacacttcatgcttggtacatggctatgtgagctaaaacagtaacaaacctcacatgccaggaagaaattccaacaagctgtggaaggtgttaaaagcacattactctcaaaaacaaatgaaactgactgcagtggggttttataccacttaaaagcaacaatataggtccctaccaggggtgggataagagatcacccccaatactgaaaggaaaatggaagctgaagactgtaaccatctgtatcatgggaaagactggactagaaagagaaagagcaattatttttttcatgtaacagtgcatgtgtctatgaaaattctatttaagtatgtgaaccctagttcacaattttcacatggaggagacagaaacaaacgcaacacagaaaaggctgacagagaatcataaaaaggagtttaaaaagaccctcaagtacattttctaacttgaagagattatgtgctagagttactaactaaaacactgaaacttcatgcagaaagcctgttttagagtcattttaagacattataatgtgtttgccatttgttatgagcttaatacaaattaagtactttatactgtattaaaaatggagagactctgaccaacaatttagcaatccatcatttcccaacaggtatcacaataagttatatcaattctctctattagtatcacgtatattttttaatatgtacaagttaggtttttactcaaccagtcaaaaacataactattggaaatgccttaataattacatttttcataacatgaaaagttaactccagataaaagacattaaagtcagcatttggtaactaaataaatgctacatgaaatttaaagtcttcgtgaataataacccccaaggacaacactggctgattttcaaagaaaaattgaaacatattttctagggttaatttctttatcttaatgttagcatggcaagaaccaacctagaaacccacctcagtgtgtctctgatgcaaggcattatattctttcttcagttctgcttctctttcttcaagtctgctaactgaaattaagatacatacacttaatcaaaaccaaataaaaaatttacttgaaaattctatcttttaaacttggactggtttatccataacccttggtaacttcaagcctcgttactccatatgaaattcttcataaggctagtgaccttgcttcatgtccttaataaaatttatggagagggaataaacagaatatttttaaaaagactaaacatcttactgcttctcccaatatgcttatataataaacatccttatctaagtaggtttttaacatgatagagaattacctctttgaaaaagattatacaaatctcctcacagagcctaaccccaagagttgagcctaaccccaagagttgactcattggaaaagactctgatgctgggagggattgggggcaggaggagaaggggatgacagaggatgagatggctggatggcatcaccgactcgatggacatgagtctgggtaaactccgaaagttggtgatggacagcgaggcctggcgtgctgcaattcatggggttacaaagagtcagacacgactgagcgactgaactgaactgaaccccaaaccactgatttctaatagtattccacctctttttcattattgagcagtatgtgaacatgttactgtttttataagcactttctttaacttcaggtcttaatttcagggactcatcttcttgtatttagctccctctgctgatggagtttgtgagtggctctgagctgagatagagcactacttcagtattttaaaaataaattttagaccctaacatacacagtgtcaggacaggatttcagagaaaaagatggtatcagagaggaatgattttgagagaaaatggaatccaagcaggaccaggaagaaattacagtgctcaagttagatagtaatggggctatagcaggcaggtactgctactacagagaagggaacagaaaaccatggagctggcgaggcacaggagagactggccagtctggaggagctcacgctgatttttaaggagcagtggcagacagtcggctggtgcgaagtaaagctggtgctaaaggagtttgtcaagatactcacgttcgtctgtttgaaagcatgagcatagttggaaacgttctcttggtataatggtcagacagctacaaacatgcaaaattgtttataagagccagctggtgactgcgtcagctggctctaagacttaactactatgaactataacagcacatacatgaatgtttttatatgcctaacattaacatgccagacaccacataacacttaacttgtgctgactggtaaactcatgttttttatttgtgtagctctacacctttatttgagtaccttgaaaatatgccatgaattaggaaaagtgtagctctttcagtgtgtttttaatcaagcctatgtgttggctcattaaatttgcaacaataagtacatacactatagtagctatagagtcacactttatcggaccatggaaggcctgaggacatgggctgctcatctcattttgtggctgaaagcaataaaaagcaaatctgtaaggcagctgttctgtcataacacaatagatactgaagcctctgtgatttttatttaaaaacaagaaatccaaccaaatgtagatattatatttagtaacaatttcaatataaacattttctactattttttgtcaattaaattgttctaaaagcacaatcctaaaattactgggtgaaccttaagtgtttttaattgctcatatatatgaatcaaaattttcctcaaattgtgcaatcaaaacaaaaaactgataagaaagataagaaagccttcctcagcgatcaatgtaaaaagacagagggaaacagtagaaggggaaagactagacatctcttcaagaaaatcagagataccaagggaacatttcatgcaaagatgagcacagtaaaggatagaaatggtatggacttgacagaaacaaaaaaaagatcttcatggcccagataaccacaatcatgtgatcactcacctagagccagaaatcctagaaggcgaagtcaagtgggcattaggaagcatcaccacaacaaagctagtggaggtgatggagctccagttgagctatttcaaatcctaaaagatgatgctgtgaaactgctgcactcaatatgcaagcaaatttgaaaaactcagcagtagtcacaggactggaaaaggtcagttttcattccaatctcagagaaagacaatgtcaaagaaggttcaaactatagcacaattgcactcttctcacatactagcaaagtaatgctcaaaatactccaagcgaggcttcaacagtatgtgaactgtgaactttcatatgttcaagcaggatttagaaaaggcagatgaaccagagatcaaattgccagcatctgctggatcactgaaaaagcaagagagttccagaaaaacatttacttttgctttattgactacactaaagcctttgactgtgtggatcacaacaaatcgtggaaaattcttgaagagatgggaataccagaccacctgacctgcctcctgaggtacctgtatgcaggtcaagaagcaacagttagaactggacatggaacaacagactggttccgaacagggagaagagtatgtcaagactgtatattgtcaccctgcttatttaacttatatgcagagtacatcatgagaaatgccgggccagatgaagcacaacctggaatcaagactgcagggaaaagaaaagaaagtgaagtcgctcagtcgtgtccaaatctttgcaactctatggactgtaacctaccgggcttctttgtccatgggattttccaggcaagagtactagagtgggttgccatttccttctccaggggatcttcccgacctagggattaaacccaggtctcccacactgtaggcagacactttaccatctgagccaccaggtaagtccaagattgccaggagaaatatcaataacctcagatacgcagatgacaccacccttatggcagaaagcaaagaagaactgaagagcctcttgatgaaagtgaaagaggagagtgaaacagttggcttacaactcaacgttcagaaaactaagatcatggcatccagtcccatcacttcatggcaaatagatagggaaacagcagaaagagtgacagactttacttttttgggctccaaaatcactgcagatggtgactgcagccatgaaattaaaagatgcttgctccttggaagaaaaaaaaaaaaaaacgacaaacttagacagcatattaaaaagcagagacattactttaccaacaaaggtccatctagtcaaagctatagtttttccaggagtcatgtatggatgtgagagttggactataaagaaagctgagtgccaaagaattgatgctttcgaactgtggtgttggagaagactcttgagagtcccttggacatcaaggagattcaaccagtccatcctaaaggaaatcagtcctgaatattcattggaaggactgatgctgaaactgaaactccaatactttggccacctgatgcaaagaactgattcattggaaaagaccctgacactgggaaagactgaagacaggagaaggggacaacagaggatgagatggttgaatggcatcactgatgcgatggacatgagtttgagtaggctctgggagttggtgatagacagggaagcctggcgtgtttcagtccatggggtcacaaagaattggacatgactaagcgactgaactgaactgatcatccataaccctcatttcaaatttgtgcacaacagtagagcctcattctcaactaactttgtataagttcataaataaatttatattcatctccaccactaacagccagaattacacagtacttgtcaagtaccatgcactgtcctaggtactttatattaaaaacctaacttgaccctgacattaactttatgatgaaacttcattacatttcattttaaggataagaaaactgaagtaaataggggttaagtaacttgcccaaattcacgaaactagtaaatggcagaattacaactcctaatggatgagactaggcccagaatctgcttttatttatcatggcattctgcctctcaagaagtacttcttttaatttgttttatatattggaatctactttaaattttcattttgggggaaaaaagtatagagagtgctcctttattacttgaaacaaaaacccctctcttctggaaagaacctaatcacaggtactacaattcaaaagtatcaaactgccacataaaatatgtaaccaacttaattaatcatgatgaaatacatataaaaactaaaatgtggtagtcctggtaatccagtggttaggactgtgcaatctcactgtcaagcgcctgagtctgaaccctggtcagggaacaaagatcccacaagccatgcaaaaatccactatataccttcagaagagctaaaataaaaagtgttggtagggaacaagttctggtaaggagctttcatactcagacttccctggtggtccggtggttgggatttcaccttccagaggggtgggttgcggggcgctgcgcgtgggagggtttctaaccccagtcagggagctaagatcccacatacctcctggccaaaaaccaaaatcagaaagcaggagcaatattgtaatgaattcaataaagacttttttaaaaagtacaactttcatacactggtggtgggagtataaactggtataccaattcgaaaactgtttggcaagatttaataaagttgaattatatgccactcctatgacaaaacaagctcattactatgatatatgtctatgtgtccagcaaaaggcattttaaaacaatgctcagagcagcactatttgtgttccaacatggaatcaacccaaatacccatcaactgcaaaatgtataaatattcatgtactagaatactatacaataatgagaatgaagaaattattgctgtgcacctcatggaggaatctcacaaacaggatactgaggaaaacaaagagaagcaaaagaatacaaacttcaaatgaacacataaactaatccaaaactaatctaatatgttaattcagttcagttcagtcattcagccatgtctgactctttgcgaccccatggactacagcaccccaggcctccctgtccatcaccaactctcggagttcactcagactcatgccaattgagttcgtgatgccatccaaccatctcatcctctgttgtccccttctcctcctaccttcaatttttcccagcatgagggtcgtttccaatgagtcagtttgtgtcaggtggccaaagtattggagtctcagtttcagcatcagtccttccaatgaatattcaggactgatttcctttaggatggactggttgaatctccttgatgtccaagggactctcaagaatcttttccaacaccacagttcaaaagcatcaattctttggcactcagctttctttatactccaactctcacatccatacataactactggaaaaaccatagctttgtctagacagaactttgttggcaaagtaaggtctctgctttttaatatgctgtctaggtttgtcacagtttttcctccaaggagcaagcatcttttaatttcatggctacagtcaccatctgcagtgattttagagccccccaaaataaaatctgtcaccgtttccactgtttcccaatctatttgccatgaagtgttgggaccggatgccatgatcttagttttctgaatgttgagttttaagccaactgtttcactctcctctttcactttcatcaagaggctctttagttcttctttgttttctgccataagggtggtgtcatctgcatatctgaggttattgatatttttccagcaatcttgattccagcttgtgcttcatccagcctggcatttcaaataatgtactctgcatataaattaaacaagcagggtgacaatatacagccttgacgtgctactttcccaatcttgaaccagttttttattccatgtccagttctaactattgcttcttgacctgcaaacagatttctcaggaggcaggtcaggtggtctggtattcccacctctttcagaattttccagtttgttgtgatccacacagtcagaggttttgtatagtaaataaagcagaagtagatgtttttctggaactctcttgatttttcaatgatccaacggatgttggcaatttgctctctggttcctctgccttttctaaatccagcttgagcatctggaaattcacggttcacatactcttaaagcctggcttggaggattttgatggagtagctatcatagtcaactgaagagtctgaatgcattacttggatgcaatctcaaaaacaacagaatgatctctcttcgtttccaaggcaaatcattcaatatcacagcaatccaagtctatgccccaacaactaatgctgaagaagctgaagttgaacagttctaagaagacctacatgaccttctagaactaacaccaaaaaaaagatgtccttttcatcataggggactggaatgaaaaagtaggaagtcaagagatatctggagtaacaggcaaatttggccttggagtacagaatgaagcaggacaaaagctaacagagttttgccaagagaatgcactggtcagagcaaacaccctcttccaacaacacaagagaggactctatacatggacatcaccagatggtcaatactgaaatcagactgattatattctttgcagccaaagatggagaagctctatacagtcagcaaaaacaagactgggagctgcctgtggctcagatcatgaactccttattgccaaattcagacttcaactgaagaaagttgggaaaaccactagatcattcaggtatgaccaaaatcaaatcccttatgattatactgaggaagtgacaaatagattcacggtattagatctgatagacagagtgcctgaagaactatggacggagattcgtgacattgtacaggggggcagggatcaagactatctccaagaaaaagaaatgcaaaaaagcgtaatagctgtctgaggaggccttataaatagctgagaaaagaagagaaactcaaggcaaaggagaaaaggaaagatatacctatttgaatgcagagttcaaaagaatagcaaggagagattttaaaaatgccttcctagtgatcaatgcaaagaaatagaggaaaacaatagaatgggaaagactagagatctcttcaagaaaattagagataccaagggaacttttcatgcaaagaaaggacagagatggtatgaacctaacagaagcagaagatattaagaagatgtggcaagaatacacagaagaactatacaaaaaagatcttcatgactcagataaccacaatggtgtggtcactcacctagaaccagacatcctggaatgcgaagtcaagtaggccttaggaagcatcactacaaacaaagctattagaggtgatagaattccagttgagctattttaaatcctaaaagatgatgctgtgaaagtgctgcactcaatatgcaagcaaatttggaaaactcatctgtggccaaaagactggaaaaggtcagtttacattccaatcccaaagaaaggcaatgccaaagaatgctcaaactaccacacaattgcacttatctcacatgctagcaaagcaatgtgcttgaagttaggataaatgtaaattaactgttttacataagtctattagtctgatgcattcactcttttgtcctgattgtgtccttcatctataactatgctttttaagaagattccatccaaaatctgcaaacactgtgcagtcccctttggggaggagttattatctaatgaatttactgtgtaaacagctccatcccatctgattccaaacataacatgtacctccttcacacaagcactttccttggctaaatactcaagcattatgttctccaacaactcctataaattctatatatagcacaggatttaaacagactactcagaaccataacaaataaactgtgctaattcatcattaaaatgtacagggagataagcagaaatattaccagattggggaaatataaaaagaaataaaaaatgattgccatcattggaaaataaattggaattacacttttgaacatcatgttggtgataggtattaaaataagcaacgtgtataatctgaccccattactactcttatttatgctatggaaatacacttgatgcccaaaggtatgaaaatgaatattctatatgcttttgtccacagtgcttttcaggtctactatatccttctacttttctgtctattcattctattaatttttgagagtttgacattgaagctccaagtaaaattcttagtttacctaattaatttggaattcccttcccaaatgtcatcaattggttggaaaagtaaattatgacagtcatacgatagactacaatgtagtaactaagctacttccaagttatgttgtatcaggtatattaacctccctggacctctattccttattcatagttgaggaataataataatttatcagagttggttatcaggattaaggaagatctaatatttgaaaatggcatagaacagaacctggcacgtgtgctttttcttttccttttctattttttaaattatgaaagtataacacatttacaggagacttaaaacttacagaacaagaaaaagaattacagaacaaagttacacatagttacattatatattagaattatttttaagtaaataaattaagattttaaattggatcttcaatgtcaaaccttcaaaaattaatagaatgaatagatagaaaaataaaaggatacagtagacctgaaaagcactatgggccaattcaacataattaaaatttatacaattttcacacaaaagtaggacacaaattctattcaagttcccaaagactataaagcagcagacactggaacatatgcagggacataaaacaaggtgcaaaagtttcacagtccaaaggtactgaagtcagacagagtgttcccttatcactgcagtattctggcatatgtgtttttaatacaacaattaaaggtactgttaaaatgaatgtagtattattcataagcactggctcttctgttcatggaattttccaggaaggaatattggagcaagttgccacttcctactccagtgaatcttccctccacccacggatcaaaccctcttctcttgtgtctcctgcattggcaagcagattttttaccactagtggcacctggagaaggcagtggcaccccgctccagtgctcttgcctggagaatcccatggacggaggagcctgtgggctgcagtccatggggtcgctaagagtcagacatgacttcactttcgcttttctctttcatgcaccggagaaggaaatggcaacccactccagtgttcttgcctggagaatcccagggatgggggagcctggtgggctgccgtctatggggtcgcacagagtcagacacgactgaagcaacttagcagcagcagcagcgacacctgggaagccactgttaaaatgaatgcatcattatccataagcactgacgtggaatagtgcctagaacttaaaagaaggatgctgaatattattgctatatctgaaattttgaaacaaaaaattatgtatagtatgatgtctacaaagtaaaaacgtactgatttctctctcccaaacctgctctttcccataattttcttaggcaaaaatcttgcagctgtacttttattcttttcttttctcacattacattccatcagcaaattctgtccattttgcctttagaacaaatcgtgaatctgacaactttttaccatttctattacccccaccttgatctaagacatcatctcacgcctggattattactactatcttctgactagtgtctctgctctagtcttttctcctctgtattcttaaatttgtagcctggagtcagatagtgactgctcaaaacccttcaacaacttcctgtgacagaacaaaagaaagtaaagaagagggagggagcctgtattatggcccacaagacccttcagcatcagatatatcaagccataccacttttgctcccatggagaattattgtctcctgacccaactgttagagactgattgtgtcctgcccaaattcatatgctgaacccgtaatcaatgtaattatgcctgtagacaggacttaaaaaggcaattaaggagaattcactggtggttcagtggctaggactcagcactttcactgctggggcttgggttcagttcctggtagaactaagatcctgcaagccacacagtgtggacaaacaaataaaaataaaataaaaaggtaattaaggttaaatgaaatcataaagatggggtcctaattgcattggactgatgtcctttcttaagaagaggcagagccaacagagctccttctccctacacacgcacagagaaaaggtcacacacagagcaagagatagcggtctcaggagaaaccaaacctgtcagcactttccagcctttagaactgtcagaggggacttccttagtggtccagtggctaagactttgtgcttccaacacagggggcccaggttcgatccctggtcagagaactggatcccacacgccgcaaccaagagctcttgtgcctcagctaaacatcctgcatgccacaactatctcacacgatgcagtgaagactgaaggtcttgtgtgccacacccgagactgacacagtcaagacaaagaaaggaagaaagaaaactcctaagaagggtgcaaaaattctgcaatttaagccacctagtctgtggtattttgttatgacagccctagctgattataatacaagaactaaatatcattaagataaccatggagaggaactttcatacaagatgtttatcaagtgacctgggacagagagctgggcttgcagcttatagaagaaacgagtcctgtttatagcagcttgctaactgatactggtttgggttgctttgtactacttaatagcaagaatgtggaaatggaaacataaaaccccaaaataccactaatcgccagaaatttcctatacttacctaaatgagcgtgatcattattcaaaatggctgaggcttatttacaaaaatttcttaaactcctattaatcactctgtcccattaaagcattttggattgtttctattgataattacttaaccttccactcatggcttcttaagtcattaaacttacatttcacttattttcatttagcatcatattcttacttttgactcaaaaataaatttcataaactatcaacccattctctcaccaaccctttcacattatctttactaatctcatagaaatttctatctatatattatttttagcaaccctatatgacactaaacaaggcattcggtacatacaaactacacacagcttatatgtgacttgcttcctgaagtgaagtgacgtgaaagtcgctcagtcatgtccaactctttgaaaccccatggactgtacagtccatggaattctccaggccaaaatactggcataggtagcctttcccttctccaggggatcttcccaaccaagggattgaacccaggtctcctgcattgcaggcagattctttccagctgagccacaagggaagcccaagaattctggagcctatcccttcttcagcagatcttcccaatccaggaattgatccggggtctcctgcattgtaggcagattctttaccaactgagctatcagggacttgcctcttactctgttatttttttaatagattctattttttagagcagttttaggctcatagcaaaccaagagaaaagtacagttttccacatatccctaccgccatacacccagagcttcctctactatctccatcccacaccagtgtggtacatatatgacagtcaatgaacctgcctgacacatcataattacccaaaccaaagcctaccaaaaccccaaagtttaccttaggattaagtcttggtactgaatagtctacaaatttggacaaatatataatgacatgtatccaccattatggggcttcccaggtggctcagtggtaatgaatccacctgccaatgcaggagacataagagatgcaggtttgatccctggcttgggaagatcccctggaggaagaaatggcaacccactccagcattcttctctgtaaaatcccatggacaaaggaacctggcgggctgcagcccatggggtcacaaagattcagacatgactgagcaactgagagcgcacacatgcacgtccaccattattaaagtttcatacagagtagtttcactgccttaaaaatcctcgattcatctctgccttcctccctcccaccatccacttcgtccatcaaaacttttaatgtatgtagccttttaaaactggcttttttactctgcagtatctattagtggttcctccatgtgttttcatggcttaatatatcacagcttttcagcactgaataatattccactgtatggatgcaccacagtatattcctattattttcataagtctacaatcttaaagctataagccttaaatactcatcatctcacctaagtacaaaagttaattttcttaaaatacaaagatattttcagttagtactgctgcatattacagacttttatgctgacagatgattttcatattttcactgtttttaatacaaaataaatcacaagtacacttaaacaaacctctcactcagctttttgtacagatctattttacctgttacactatttaacacaactaattttatttcttaaggcagaaaaaagatccagggtaaaagtagaacatattcacctaaaaatgtaaattgactgtattttatatcagccaattagtctgacacattcactattgtatcctgattttgtctctcatctataactatgctttttaagaacattccatccaaaagctgcaaacactgtgcagtcctctttgggggaggggttatgatccatttcaaatgcatgtgaaacatcctccaaaacagatcacatgctaggccacaaaacaagtctcagtaaatttaagaatactgaaatcatatcaagcaccttttcaaaccacaacactatgagacttgaaatcaaccacatgaaaaaactacaaaaaatagacatatagaaagtaaacatgctaccaagcaaccaatgggtcaaatgaagaaatcaaagaggaagtaaaaaaataccttgcaacaaatgaaaatggaaacataatgttctaaaatctatggaacacatcaaaagcagttctaagagggaaattaaagaaacaagaaaaatgtcaaataaaccatctaaccttacacctaaagaaagaaaaacaaaacccaatgttaacagaaagaaggaaataaccaagattagagtggcaataagtgaaatagattcttaacaaaatagaaaaaaaagataaacttaataaatctttagtcaaactcctcaagaaaaaaaagagggtccaaataaaataagaaatgaaagagaagtttcaacagtttccacagaaaggcaaacagtccaaagtgactactacaaacaattatacaccaacaaatcaggcaatttataagaaacagataaactcctagaaacatacaatcttccaagactaaatcaggaaaagttaggaaatctgaacagattagtcatagagaaattgaatcaataataaataaataaatacaacttccaacaaacgaaaggtcagaagcagaagactaccagggggaatttcaccaaacatttaaagaagagttaatacctatccttctcaaactactgtaaaaaattaaagagaaaggaatgtgtctaaacccatgaggccagggttactctgataccaaaacaagacaaagacacgacacacaaaatattaaaattacaggccaatatccctgatgaacaatagacgcaaaaatccccaataaaatattagtgaacaaaattctacaagacaacaaaagaatgatgcacaatgctcaagtgggatttttcccagggatacaaggatggttcaatatgagcaaatgttgtatatcattcaacagaccatgtgaacaaaaatcaagaataaaaacacatgatctcacaattcaaaagatgcaggaaaagcatgacaaaattcatccagttatgataaaaagaaaacctctcaacagaatgggaacagaggaaatgtacctcaacaaaacaaatgatacatacgacaaagtcacagctaacatcatcagttcagttcagctgctcagtcgtgtgcgactctctgaccccatggactgcagcacaccagacttccctgtccattaccaactcccggagcttactcaaactcatgtccattcagtcggtgatgccatccaaccatctcatcctctctcgtccccttcttctcccaccttcaatctttcctagcatcagggtcttttccaatgagtcagttcttcacatcaggaggccaaagtattggagtttcagcttcagtccttccaatgaatattcaggactgatttcctttaatattgactggttggatctccttgctaacatcatacttgacagtaaaaatctaaaagcttttcctacaagaacatccattctcaccacttttgggggggtgtgggggtgtggaggggcctgtgctgtgcaacatgcaggatcctagtttcctgatcagggatcaaacctgtgccccctgcagtggaagcacagagtcttaaacactggactgccaggaagtccctactttcaccatttttattcaacatagtactggaagtcctggtcacaaatcagacaagaaataaaaggcattcaaactggaaaagaagtaaaactatagctatttgcagatagcacaatatgacacatagaagaaagactctaccacaaaactatgagagtaaatgaattcagtaaagttgcatgacacaaaattaatatacaggaatttgttgcatttctatacactaacaatgaactattagaaggagaaattcaggaaacaatcctaccaaaaagaataaaatatctagggataaacataaccaaggaagtgaaagactggtactctaaacactatcatgggctagaagaattagtatggttaaaattccacaccatccaaagcagtctacagattcaattcaatctctatcaaaatacccatagggtttttcacatgcatgcatgctcagtcatgtccaactctttgtgaccccatggactgtagcctgccaggttcctctgtccatgggattttccaggcaagaatacttatgtgagttgccatttcctactctccaggagatcttcccaacccaggaattgaacccaagtctcctgtgtctcctgcactgcaggcagattctttacctgttgagcagtctaggacaaataatcctaaagtttttatggaaccacagaaaatctcaaagaaccaaagcaatcttgacaaagaacaccactaaggtaaaatggtccctgatttcaaactatataacaaagctacagtaatcaaaacagtatggtactgacacaaaaacaaacacatacatcaatggaacagaataagagcccagaaatgaatcaatacttatatggttaatctatgataaaggaggcaagaatatacactgcgagaaagtctcttcaataaataacactgggaaaactggacagctacatgtaaaagaattaaactggaccattttcttacctcatatacaaaaataaactcaaaatggactaaagactaaaacgtaaaacctgaaaccagagaagtcctagaggaaaacacaggtagtacgcactctgacagtggtcttagtaatttttttttttttgatctatctcttcaggaaaaggcaataaaagcacaaataaaggagtagggatatatccaactaaaaaacttatgtagcgcaaacgaagccatcaacaaaacaaaaaggtaagctactagatggaagaagatatttgcaaatgatatgttggataggggttaatatccaaaacacataaagaactcatataacacaattattaaaaaaaaatctgattaaaaaatgagcagaagacctgaacatttttccaaagaagacacactgatggccagcaagcatatgaaaagatgctcatcttcactaattatcacagaaatgcaagtctaaaccacaatgagacatcatctcatacctgtgagaatgactattatccaaaagacaagaaataacaagtattggaaagaatgtggagaaaagagaacacttctacactactggtgggaatgttaaattgctacagctgctacagaaaacagtatagagattccttaaaaaataaaaaacagaaccaccatacgatccaggaattcacttctgggtatgtatccaaagaaaataaaaacactaattcaaaaatatatacgtaccatagcaacattatatacaatagctaagatacagaagcaacctaagcgtccatcgacagatgagtagataaagaagatatggaggcttccctgggggctcaatcgtaaagaatctgcctgccaatgcaagagacacagatttgattcttggtccagaaagatctcacacaccgaagaacaactaagcccacacaccacaactcctgagcctgtgctccagagcctgtgctcaggagctgtaactgctgagccaatgcgctacgactactgaagcccacacaccctcgggcccatgctccacaacaagagaagtcaccagggaaaggagcctgtgcgccagaactagagaacaacctccactctccacaagtagaaaaaagcccacacagcaataaggacacagcacagccataaacaaacaaaaccttttttaaaaagatgtgattttatacacacacacacacacacacacacagtggaatattgtccagacatagaaaaaatgaaatcttgccctttcagacaacatgcatgaacctgagagaatattacctagtgaaatagacaaagacaagtatctgatgatctcacctatttgtgagattaaaaaaagaaatataacaaaatatatagactcagagaacaaactactgcttgccagagggaagagatttttgtgatatataacaattatcaaatcattcattatgttgtaactaatgtaatattttaagtcaattatacttcaaaataaatataattaatgaaatggtaatcagtttctctagcattaagtatcatcctcctctccactccagtacaactacttaagagtctacttatttgaggcacttaaattgtttctctagcccattaaaattaaatatgttttttcttttgtatagttacaaccagatgtattatacaaatcaaaacaagaacactaatttattacctgctaccttagacaaccatattcaaaagaatatgattcaaagacagtgcaaatattaagatacctactttgccatttatgaactagtaactaaacaagtcagaatgccaatgagaatctcaaggaatatcttctttcaactctacaaagctaggtagaacttcagacagccaaggaagacttttgattgcttctagttctgagactgagaaccaactgcctgtttagcatgataaacagacaataaaagctgggaggctagtcataaaatgtattatatccatataggaatattattcacccttaaaaaggaattaaataacaataacactacaacgtggatgaattttatgctaagtgaaagaaattcataaaagaccatatattgtatgatttcatttacatgaaatgtacagaataggcaacttcatagagatcacagtacattactacaggctagggaaagccagaaataatgagtactatcaggtatggtgttcctttcggaatgatgaaaatgttctggggaattacatatgacgatgattgtacaatttatgattatactaaaaccattgaattcttatactctaaaacggtggattttatgctacacaaattacatttttttaaaggggcaaggagtgtcattcaaagtttatcctttaccataggtatcaaaaaagtgtatctcaatttaatagtaacttattttttaaaaaaggaagagttagcgaacaaaaaagaaaatctcaacacttagtgtttgttgaataaatgaatgtccagcaaagttttaaagtgataataaaaattaaaccagagcaaccctaaagttattaaaaaatcagatgagagtacaaatcataaatgctctattttaattaaagtttgttcaccttctcttcctcagattacttactcacagtagaaagaataggcaggcagatggctgcttagcttttaagtacatcccctcccttgcctcaatacttaagcaaaatcatgttccatctactaaggcttttaggctaaaggaaagattagccagatactattacccaaagcagtttctctcttttcgtggggtacaggcggcctctgcaagtgagcttctgactgagttatacagccggtagcaaaagctatgtgtgctgctcctgggcctggtccaataaaagccttccacatacaatcctccatgctctttccctcttcctccaactcagtgtaagtacgacaaacttggagcaaaattggaaagggtctgtgtctccaaaggagccacccatgtattagaaacaatcaatttaaatttcacatggggaaagaattccttggcagtctaagagttaggactcaacacttccagtaccatggcccgagtttaacccttggtttgggtaatatggcacagcaaataaataagtttcacatgaacaaaaaataacatgatatctgagtcattatatatgtcttttgtggcttatttgctacagcaactaactagaattgccttaattcatacattagctcacaaacatgcgttaaaaatctcttaaaagacattctaaattatcaaaggtgtatcaccccatggtgctaaagaatagtttatatctttgttattctggatgattttatgaatattattttggccattattttctccaacctaacatttccagcaagtatcctgacagaaactatctatggcttcctgcatttcatgttttatctgtattatgattgtgaaaatcaacattatatttttagatatatgagttaaccaccaagatcatatacaaattaagaatctttcactcttttctcaacatactatttagatcaacacaacagcatagtcaatggactcggttttctcaaggcctaaatcacatgagatggtacagtgtttaaatgacaagtacatttaaatgttgggaagagccatatcttcacagtcctgaatgccattaagtaatcagtaaggaaatgaaaagaaaagtagaagggatgggaaagtgggaaagaaaggcccatctgggcaaagatggtagacaaccctcaaaatctcaagtatcataaagctaacctatacctatattgttgtatcatatctgaagatatgacgaacaatcttaaacaagaaaagattgtttctagtctaatagttatcatgtgaatccaaacttcaaaataatctcaggataaatcctaaaatcatatcattttactcaaactagccacaagctgagattaacttgaaataaacaagattctgttcatccttcctattccaaaacaacatataactaatctgccaatttttaaactgttattattcaatgggaggataaaataaatcaaggcatcaaaaaaatcaaaaaacaaaaaggagtaaggggggaaagataagagaagaatcaaaagactaattcaaaatgtttctcccttagaatagctaatgaagatactttagccttgttttaattgctctttctttccattcatctttccaaagagcaagaggatatgattaaggcaggaagagccacctgctctacctgctcaaaatcagagcttacctccttagattggtggcctttgccaagtttggaacaccttttccatctgttgtcttctgccccatcagactgctgataggcctatggggggaagaaagagaaacagacctgctagaactccatatccaactcattatttgccttctcaaaaggaatcatcaattcttactattcaaggaaggcagataatccaactgttacttggcctcagaagatggacattggtctttcagaagctttccttgaacaatttagcattaaatgtctcaacaggtaagcaagaatcaaatgctcacttgagagcaaacaaatcagacacaaccacatcaaaacagcaattaaaacctctgctctgccaattaagtccttcaccatgtccctaaccttcagcaaaagatttttcaaacagatattatataccacctaaagtctctttgtagggagaatccatttttccctcagcacatattcctatgtatcatcttcatgatcaagaactacttcctcatgatcaaccaaaaacagcaaattcattttctctgatttaatcttccaaatttatagaaaaacaacttggtatcttccttattcatttctttagtaaagaagaaccaaaccattcatgtttattctgttctcttaagctaaatcaccatcaattctttaattcttactcataaaattaattttccatgaaactttattctagatattaattatgaacttcaaccttaagtttctcaatcaacaacacgtctacagaaatcaaacactccaaatacagataaaaaaacataaagcagatctgcaggtcacataggtattacctaatgaagcagaagcaataaaatgttagtatttatataaatactatcttgcatatcttgtgccaaattgtctgctttcctctcatgtactcttaaaaaaaaatccttatataaggcctattaaatatacagaattcttagtattgcaaagaactagattgaagttaaatgaactataaaaaagtttctatataataaaatttttgtaattttttaaaatcaggaaatataaatctaaactttaaagctaccttaacaagtatgctttcaacaaaaatataaatcatcatatctctttacatcattctaaaaataatgtagaaagggacagcctactgacaagataaaattaaaacagaaattctggaagtattaacattctttaccaattgcaaagtacagtaaaaatgctgataaagctctatattggcctgaagctatttttgttttttttttttaaataactttaaaaatagtgacagaaaatattcaggtcctctcaactgttaactttggtgtgaaattatacctgttagctgaaaaagattgttttttttcctctgttgtgaaaattctaatttatcaaccatatcattaacagatagcccttactttaaataataattctcaaatgtgaagtatgttttaagccatttattcctttaaaatgaaaaatatattaatgattttactgccttcccattatgttgcatctaatgatgtgctgctaattcttatgaccaataagaagagttctctttccaataagtgttccaggtaaagacctgaaggtattttattagactaaaatcaatgccaaatttgaaaagcaaatacgggagacagaagtgtagaaaggtcagagtataaaactctaccataaaatgttttcaggtgtcaaaagcatttttccatttaattttaaaaagtggattttcattcaaaggaagaaaaggaagaatcagagattacttaagtagcttaaaatcactaaatcttgccatcttctacacaatttaagaaaaaagccatctcttttaaacttgagggcaacaaaattttcccaaggaaaaaatcgaataaataataaacagttctgtaacaactctgggggctaatatgttataaataaagattcaaattcataagttataaaaaattaaatggagtttgctactaattcttatttctccaattctgtacacattaaaaatggccaaacactactaaataccaaaaactactctatgttcatattctctgacccacttctgtaactttgctcatgttctttgacctacttctgggccaccagggaagcccaactacatcctaagaaaattaccaaaagagggcaatccaggtgtgacaaaattattcactataatatgatttgctatactaggaaaaaatgtccagccaaccaatagaaattttttactattttttaattcacctatatttactttttaccaattcatgtattccttctttccagaaaggattttaggtatcttaacaattcactatatatgtataaaatttggaccaaggaaaaacaatttaaatacaccattcaagtaatatggcccaaaccagttgttatggtcatacttcaaaagtttattctgaatttttgagtagccaaggtaaaaaaccaaagtagccattaaataattctcagagaaaaagagaaaccaaagttcctcagggaaaacaataattgttaacaaatggcatagcttccagatgatgggtgtgagcccacatttaaaaaataattattaaacattaaatgcatgaacattcacattataagggtcccagaaggagaaaagagagagaaaaggacccaaggaaatatttgaagagataataactgaaaacttccctaatatggaaaaagaaataaccaacaaaatccaggaagtacacagagtcccagaaagggtaaacccaagaaggaacacaccgagacatatagtaatcaaaccaacaaaaattaaatataaagataaaatattaaaagcaacaagggaaaaatgacaaattacaagggaactcctatcaggctatcagatgatttctcaacagaaactctacaagtcagaagggaatggcatgacatgtttaaagtgacgaaagggaagaacctacaaccaagaatacctacctagcaagactacctacctagcaagactctccttcagatttgatggacaaatcaaaagcttttcagacaagcaaaagttaacagaattcagcaccaccaaaccagctttacaacaaatgctaaaggaacttctctaggcagaaaacaagagaaggaaaagtcctacctacagaaaataaacccagaacaattaagaaaatggtaataggatcatacatatcaataattaccttaaatgtaaatggattaaatgcaccaatcaaaagacacagactggctgaacagatgaaaacatgttcatgtacacacttccacttcccacatcactctgcttgacgcccccccaaattgtatgtaattattttttattgttaggttaatcatgttcccattatgacttgcaattgcaattatctttcattctttctctggttattgattatgaaaactgataaacatcttttgctattgtgattatgtaactattattcacttaatatcactgtatcatgactggtcaacagaattagaattctatatcccaaaactgccatttaatagaaaaacctgtaatcactttttaaagtccagatgtatatcagaattatcttggaactttttgaaaaatacaaatgcccaggtactgcttttttttcagagctccatatgtgtttttaatgagcagccatatttaaaaacaactggactatatgaggatcttttacttttatctagtttgtttcactttttctatttcatattcagtgttctcatttcatttagtttgttttccaatttctcatctttctttcttatgttctttctcaagcctttatctagtgtagtacaaaagtttttgtatacatatacctttaaaaatatgcatcatatatatatattttagaaaacttacgaatttttgcctaactgaaaaatttatgacattttgattccacttgtttgacttagtatgaatagaatgctagatttctaaattaaaaaaaaatagatacacaacaagcaacaaaggtttactgtatagcacagggaactatagtcaagattttataataacatataaaggaaaataatttcaaaaataacatatgtgtatatgtataactgaatcacacacacacacacacacacaaaagaattctactttttgaaatttactaatgttttatctttctgccagtttttctaagtgtcctatggatgtctaataatgtatgagatacaaaattttaaatatatttgtgtaggatatgatattaaatataaacctatatttaaattattaacatcattcaagatgctctattatttctgcatttgataaaatattctcaaatgttaatataattatatattttttcttttcccctatattttttctgagttttgctttatgtatctttcttattaaggtgtctaatggtttatgatgtctatcttctttgtgaattgtaccttttaccattaaaaatattcatttcatttaaaataaatgtttaaaaataataattaaagattatacaataaggaaaatacatatgataatgttaaaagatacaaaattatatacacactatgtagtgatataaaagcatgatacatatggaaaaggtgggatggtcatacacataaccttttctccccacaaaattatgatttcctttactgcaatgaccataccatgctgttctgtgccaaaacatacctcaaggctgaatgctaggcagacggtagtagtttaatattttttaacttactaaactgtctgtacttacttgacttaatcaagatagtatttggtttataaaaatagaaatgatcagtatataacagaaataatacaaaaagtattttctgatgaagaattcattgctaccactatcaatggcaaggttgactgtagacacctttcatagctgaagggcaccaaaaaggcctcaatccacaacttccttataccactccatatatattaaaattcttccttaaggctcacaagatattaactaccaagaagtgttactattattctcaaataaaataatatgcgtccttttaaaaaatactttattcatgtttgaaaagccagaatatttctcaggtagttcaaattttttataagagagcaaccagaaatctccaaaatcaaacatgaccataaaattataacaaaatttttgtatcatcaaaaatttaaaaatcataccacaaaaacctgatagattccacaatattaaaagttgtcaagtatgtcctttaattcagttcctgtttcttgactttttcttgcttctcaaatagcaagtaactacataaaaactttcccttttaacataagtagtggtctgaaagcagaacttagactttcactgagactgctttttacaaggggtatgtgtcctcaaacacatcaatcaaaactgacagtcttttaaagactctaacatatttataaaaacaaacatggaaatggatgatattgttatcatatggactcaaaaaatagtacagaaaaaactgatccatccttcttctctataggtatcatcactggtaattcctttggtcttaaatgcttaaatatagatcttcagaagactaaaaaacacatttaaaaaaagatgttgggttacactgactccaataaaaatcactacccagtcttaaaatacaaaatagtagaattaagattaaagtccagatattctgtatcctattatacaaaaaagaatttctatactctgacatcatccatttatacatgcttccatctttttgaaaaacatattcccagtcccagttttcccataagattgaacactgatgatactttaaaattacctcttaccaccaactttgttaaaaaacaaaggggcttttgcttcatattggagacctggggaagcaaaaactaaagcagtaaaatgaaaaaggtcaaactatgtttctctacctacaatttttttcagatgtttaaagtgtggtaaaataaagagaagaaaaattttagatattcttagatttgatatcatactcacttagagaaaaatagaagagagaggaaaacaagtagatggaaaagataaaaaagattcccaagtatcaaaggagaagggagaaagttccaaagcattcataaaaggagactcatgatagccttaactcatggaccaagagattattagttttgcacctgaatggtcaattttgattaaccacagttttaagttctttaactgttatttagacaagatttatttcaaattggaagagcaggaaaagagtggaggatgacagacatccagggggagaaatttttagaatattatattaataacaaaaataaagtttttcaatcaaatttagcttaagaccatatccaatatttggggaataatttactcatccctttcataaagaattgtcaattatttttaagtgacaccatatttttaaaaattgttgttcagtcacccaattgtgtcttgactctttgtgaccccacagactgcagcacaacaggcctccctgtccctcaccatctctcaagttcatgtccattgcccaagttcatgtccatcacatggtaatcatggtaaccaggacagtgcttttgagagagaaatgagggaatggataccaaagaatatgacaattccaaaaaaggtaggtatgactcactagactggataaaatattaatttttaaagctactgttattattgcttcttggccttttggctaagatcaagtgtaaaagctactgttatcaagtataaggtaattcttcctttaataatttcctatcacagaagcagcttatttaatgcaccaaaagactctagatagggtgttcctttcaaagccaaaagaaaattttcttacacaaaacttgatactcctcagaagttaagaggaaaacgtacaggtaaaagaatgagagggtagttctgtcgcaaccatagctttagtgtttgttctaaaatacgtctctgatatgaaaacacaatcaagttagttaacaaaggtgtctacaagcctaaaagacatgacacatcactcattttgtctcattttgtttgccttccattaccaaatatccactggctcccttctacgacatctgcttaatagccagttctccttgaattctaaaatgcttaaaatgcaaaattctaatgattctaagtttagctctactgaactcttccagagtcctaagagcagcagttactacacacattctaagcctgatgaaagttattcttcataaatgccagtccttttacagcaatgtcactatgtgaccataaagggtgatgtgggaagagtaacagctgggcacctcttgttccctagacttctaaaagtctacaattctgggagaaaaaactggagagcaacctgcctgaattaaacatgaatatatgccatgatgtttcttttttgaattttgacttaattaggtccactttcattagccaaaaggggggacttgtctatagaattacaaacaatcattgtttttgaatcaagaatatatgaaactatattaaaaataaaatgattttgaaaaatgacattctgtacccctaaatgccctcagttttccattagagaggaatgaaagagaattcagtaattttttatacatactctgaagctagagtttctctcaatctttaaatttcaaagcaatacagaaaccaatagaactttgtgttgctgattaaaacttgaagaaaggatccacatgtacacactcgagaatcctgtataatggatacagtataatgttaactactattcaatgtaaactacaaacaaaacatgagaggtaaagtgaagaagagagtcctataggtatctaacttgtccccgcagacatggggacaccatgaaaatgtgaacaaaaaatactaaaactagatctcagatctctctcttgagtctggggtgacaattccacgcatatttttggaatcctagtcaaatgtcaggatgagttaccattccactcttttaacatattttacttactctggtcagcatagtttttggccttgagttcaagttgtcttgtttgagattctaaagattccactctggtctgtaaatcttttttttcttgttcttgagagtcttcaaattcaatgaatttctaataaagaataaaaatatattattttcattagataaatgaaacttactaacattataaactcccgtttcttggtatcaagaatcacaattaggcattaactactcaaaacagtctcatgtaaaggtctaggggactttcctgacagtgcagtggttgagattccgtacttctactcagggagcatgggtttcatccctggtcagggtaactaagaccctacatgcctcacaacatggccaaaaatgtttttttttaattaaggtttaaaaatctccaaatatagaagggaaaagatgacaaaataatgtttatgaaaatatatctacttcattgtaatatgcatttcaaagaaaatatataaatcttttaacttagcctataacatgtaaaacagaaaagtacagaataatgaaatatcaatatatatatattaaatgattctctgaataatgaacagtcttctaaattacctgaaccacgtgctagcatgtgctagaaatacctccattaatcaaatttactaaaatcactctcattatggagttatcaataaatctctcttcatcttgttttatgaattgttttatctgcatcatctggcaactgactactcatttctccttaagaaaatttcccccaatttgatcttttccttgttttcctcccactttgctgattgctccttcttggtcttcattcctcctcttgtccccagtttcttaacgccggtaagctcagtccctgcacaactctttttttcttcgttgtttcttcttattacctagagaccataatgttaaatgctaaatgaatgctaacaacctccaaatttctaactcagtctctagcccagatctgaattctagacttgcaatgttcaaacgcctgctggacaacttcatctgaatgtctaataagagccttagggcttccctagtggtctagtggataagaatccaactgccaatgccagggttcaagccctgctccaggaagatctcacatgctgcagagcaacgaagcccagtgtcctaaagccctcaaaccacaactactgagggctccttagagctggtgcttcacaacaaaagaagccaccacaatgagagaaactcattcactccaactacagatagctcccactctccacaactggagaaagcctgcatgtagcaacaaagacagccaaaaataaataattaattgaaggggaaaaaaaaaaaggaaccttaaactcgacatgtcaaagcttgctcctcctggtcttacctagctcactaaattactacagtcaattgctcaggctcaaaattctacttcaatccaatcctttggctaatctaccttcagatttgaccacttctcttcctcttcaccaccatcctgctctgtgccaccattatccattgcctggataagtgcagcagcagtattttccaaactggcctcctacttccacctgtgcccctttacagtgcattttccacacagtagttagggtgacactttttaaaaaatcacatcagtgtatgcctatgctgcaaatactttgatttcattcttccaaagtccttaaccatagcctccgcaggaccaatgtaatcaatcatcctcttacttatttgacatcatcctctaatactcttccttcagatatttaaatgtctcattctggtctcacctccttaatatctttgttcaaatgttagcttcttactaagactttctttacccatcatatttaaaactgcaacacccactcactacttctcttgtttattcctctatcgcacttatcctcatctaaaacactaccagttcagtttggtaactaagtcacgtctgacattgcaaccccatgggcagcagcacgccaggcttcccggtccatcaccaactcctggagcttactcaaactcatgtccattgagtcggtgatgccatccagccatctcatcctctgtcttccccttctcctcctgcttcaatctttcccagcatcaaggtattttcaaatgagtcagttcttcgcatcaggtggccaaagtattggagtttcatcttcagcatcagtccttccaatgaattttcaggactgatttcctttaggatggactggttggatctcttgatgtccaagagactctcaagagtcttctccaacaccacagttcaaaagcatcaattctttggcactcagctttctttatagtccaactctcacatccatatataactactggaaaaaccacagctttgaataaacagattttgttggtaaagtaatgacactgctttttaatatgctgtctaggttggtcatagcttttcttccaaggagcaagtatcttttaatttcatggctgcagtcaccatctgcagtgattctggagctcagaatataaagcctgtcactgtttccattgtttccccatctatttggcatgaagtgatggaactggatgccatgatcttagttttttgaatggtgagttttaagccaactgtttcactctcctctttcacttgcatcaagaggctctttagcttttcttcactttctgccataagggtggtgtcatctgcatatcggaggttattgatattactcccagcaatcctgattccagcgtgtgcttcattcagcacagcactttgcatgatgtattctgcacgtaagttaaataagcatggtgacaatatacagccttgatgtactacttttcctatttggaaacagtctgttgttccatgtccagttctaactgttgcttcttgacctgcatacagatttctcaagaggtaggtcaggtggtctggtattcccatctctttcagaattttccacagtttcttgtgatccacacagtcaaaggctttggcatagtcaataaagcagaagtaggtgtttttctggaactctcttgcttttctcatgatccaacggatgttggcaatttgatctttggttcctctgccttttctaaatccagcttgaagatctggaagttcacagttcacatactgttgaagcctggtttagaggactttgtgcattactttactagtgtgtgagatgagtgcaattgtgcagtagtttgagcattctttggcattgcctttctttaggcttagactgaaaactgaccttttccagtcctgtggccactggtgagttttccaaatttgcttgcatattgagtgcagcactttcacaacatcatcttttaggatttgaaatagctcaactggaattccatcacctccactagctttattcgtggtgatgcttcctaaggcccactcgacttcacattccaggatgtctggctctaggtgagtgatcacaccatcatggttatctgggtcataaagatcttttttgtatagttcttctgtgtattcttaccacctcttcttaatatcttctgcttctgttaggtccacaccgtttctgtcctttattgtgcctatctttgcacgaagtattcccttggtatctctaattttcttgaagagacctctagttttccccattctattgttttcctctatttctttgcattgatcactaactagtaaggctttcttgtctctcctcctattctttggaactctgcattcaaatgggtatatctttccttttctcctttgcctttagttttttgcctcagctatttgtaacccctcctcagacaaccattttgactttttgcatttctttttattggggatggtcctgatcactgtctcctggacagtgtcacgaacctccatccatagttctttaggcactctatcagatctaatcccttgaatctatcactttcactgtataatcataagggatttgatttaggtcatacctgaaaggtctagtggttttccctactttcttcaatttaagtctgaatttggcaataaggagttcatgatctgagccacagtcagctcctgttctttttgctgactgtatagagcttctccatctttggctgcaaagaatctaatcagtctgattttgtgttgaccatctggtgatgtgcatgtgtagagtcgtctcttgtgttgttggaagagggtgtttgctctgaccagtgcattctcttggcagaactctgtaagcctttgtcctgcttccttctgtactccaaggccaaatttgcctgttactccaggtatctcttaactttctacttttgcattccagtcccctataatgaaaaggacatcgtttttggacaatgttctagaaggtctttaggtcttcatagaaccgtccaacttcagcttcttcagcattactggttgggacacaggcttggattactgtgatattgaatggtttgccttagaaatgaatcgcgatcattctgtcgtttttgagattgcacccaagtactgcatttcagactcttctgttgactatgagctactccatttctaagggattcttgcccacagtagtagatataatggtcatctgagttaaattcacccattcaagtccattttcgttcactgattcctaaaatgttgatgttcactcttgccatctcctgtttgaccacctccaatttactttgattcatggacctaacattacaggttcctatgcaatactgttctttacagcatcagactttacttccatcaccagtcacatccacaactgggcgctgtttttgctttaactctatctcgtcattctttctggagttacttcttcactgatctcctgcagcatattgggcacctactgacctagggagttcatctttcactgtccaatctttctgccttttgagactgttcatggggttctcaaggcaagaaaactgaagtagtttgccattcccttctccagtggaccacgttttgtcagaactctctaccatgacccatctgtcttgggtggccctacatggcatggccatggtttcatgaaattagacaaggctgtggtccatgtgatccgtgtggttagttttctgtgactgtggttttcattctgtctgcctctgatgaataaggattagaggtttatggaagcttcctgatgggagagactgactgtgggggaaactgggtcttgttctgatgggcagggccatgctcagtaaatcttcaatccaattttctgttgataggcagggctgtgttcccttcctattgtttgacctgaggccaaactatggtggaggtaatgaagataatggcaacctccttcatgcccttatcttcattacctccatgtatggagcttccttggtggctcagaggttaaagcgtctgcctccaatgcgggagacccgggtttaatccctgagtcgggaagatcccctggagaaggaaatggcaatcccctccagtatccttgcctggagaatcccatggacagagaagcctagtaggttacagcccacgaggtcgcaaagagtcggacacgactgagcgacttcaccttacctcacctcacctaaggagtcactcagtacccccgaccctgcaccaggccaccaagcccatgcctctgctggagacttcaggacattcacgggcaagtctgggtcagtctcttgtggaggtcactgctcctttttcctgggtcctggtgcacacaaggttttgtttgtgccctccaaaagcctgtctccccagtcctgtgtaagctctggtggctctatggtggtgttgatggtggcctcctccaagagggcttatgccacacccagacctgctgcacccagagcccctgcccctgcagcaggccactgctgacccgcacctctgcaggagacactcaaacacagtgctggctcagtctctggggggcttccaggtcctatatatttcagtaatttatcttatttattacctgccttgcctcgctagaatgtaggtttcatgagggcagggatttgttttgtttgctgttgtatttcagagaaggcaatggcaccccactccagtactcttgcctggaaaatcccatggatggaggagcctggtaggctggagtgcatggggtcgctaagagtcagacacgactgagcaacttcactttcacctttcactttcatgcattggagaaggaaatggcaacccactccagtgttcttgcctggagaatcccagggacgggggagcctggtgggctgccgtctatgggggtcacacagagtcggacacgactgaagcgactcagcagcagcagcagcagctgttctatttccagtgcaaagaatgacaatggtgcatagcaggtgctcaaatatttgttaaacgaatgaataaatgaaaaaattttcagagtaaaaaaactaaaacccatatagaaaaatgtatagttcacaaataaacttgttcttgtagttcagttgctatgtccaattctgcaaccccattgacagtagcatgccaggcttccctgtgcttcactatcacccagtttgctcagattcatgtccattgagttgctgatgctatctaaccatctcatcctctgccccctcttctcctttctccttcaatctttcccagcatcaggtcttttccaatgagctggcttttatcatgggtggccaaaatattggagattcagcttcaccatcagtccttccaatgaatatacagggttgattctgttaggaaataaataccactaaatacactctagttttaatatgaaatttactatcacccacttcatctatcctgaagcttttcaatcattgtagtagacattctgcacacactatcttcctttgaagaacttctccccagtttcatgctaaatctattcagctcatgcaatttgactagtgaggacttcatctccctaggtctgggcatacaacctgaaccagactgatcagactcttctctctgggacacgtgctagtttgtggaaagaattatacctcttctcagctgaagagacatccttttcaacagacggaaagagcatgcctcaaaacatgtggcaggggcagcaagaaaccctaattagagatactatttgagtcttagattcagtatttcctggagccagcattttccaattgtttcattttttcagttacattagccaataaattctatttttatagagggaaaaggagtacgtcaaggctgtatactgtcaccctgcttatttaacttctatgcagaatacatcataagaaatgctgggctggaagaagcacacgctggaatcaagattgctgggataaatatcaataacctcagatatgcagatgacaccacccttatggcagaaagtgaagaggaactcaaaagcctcttgatgaaagtgaaagaggagagtgaaaaagttggcttaaagctcaacattcagaaaacgaagatcatggcatctggtcccatcacttcatgggaaatagatggggaaacagtggaaacagtgtcagactttattttggggggctccaaaaccactgcagatggtgactgcagccatgaaattacgacgcttactccttggaagaaaagttatgaccaacctagacagcatattcaaaggcagaggcattactttgacaataaaggtttgtctagtcaaggctatggcttttccagtggtcatgtatggatgtgagagttggactgtgaagaaagctgagcaccgaagaattgatgcttttgaatgtggtgttggagaagactcttgagagtcccttggactgcaaggagatccaatcagtccattctaaaggagatcagtcctgggtgttctttggaaggactgatgctgaagctgaaactccagtactttggccacctcatgcgaagagttgactcattggaaaagactctgatgctgggagagattgagggcaggaggagtaggggacgacagaggatgagatggctggatggcatcaccgactcaatggacatgagtttgagtgaactctgggagttggtgatggacagggaggcctggcatgctgcaattcatggggtcgcaaagagtcggacatgactgagtgactgaactgaactgacagaggcttgagttggtttctaccacaagaaactgaaagcatcctctatattcatctactttcccttaagagctattttattttctcattttattagtcaatatttccacatctttgaagcctgaaacatccaacatcggacacattggttcttaatcattcgggcgtctgcccttcccaaaccctgccctctactttcctatgaagatatttcatatttcagagatttctgggaagcctgaagcagccattgtctatttttttgtagagaattaatctaagaatgattacataaagaagtactccagaaaatccaaattttaaacatgtgttaaatcttggtttggaaatgtgcagctgctgccctcctttaaaatgctaattactactgcacaacaaaaataaatattcttcagttctgataaggcacataaacagatcacacagggcagtgaaagcctgggaggacaaacacttcgtaatagacttcaaagagtaatcaagaaaaagtaacaaatgattgaaattttcaaaactgttatccaagaaaactgtatctgtcaaataggttagttttgagccattgtttcatgaaatatccctgataccacagataatcttgggaaaagaagctcctatagggtaggataattcaaaaaacttcagaaaatggcctggttctatatggcacttggcagtaatgtgcaagtaaaaaacataaaaagttaagaaaaaaattagaaacagagttctatgaaattcaatcagctgctaaaataagagtgttgacaaaaaaaggtatagactcctggttctaatgggagtctttttctgtctctttctgtacttaatcttctcatactatatttcactatatattcatatatatttcactatagtgaaaataattaagcaataagtggcatggattacactaacagaaagttctcctctatgctcagagagcctaggtggcctagttagcatatacatgtgagtactgctaaaattcttcatagctttgtagactacgaacatgtttgactcaagctttaaaaatttaacttacttcaaaataacatgtctgctttctactcctgtattttcaaattaacacacagactgagacaacaaaaaattggaacgaagcccattctgtcactttctagtcaaagaaaaattattgtcacaattaaataaaaccacacacttacaatgactgttttccagatgccaggagaagtacactaggcagtgaagtagtgcaaagaggtttattacaaactactaagtaatgacattcaaaagactaaatcaaataacacattaactaaaaagtaaaaactctttgtccaaccaatctatacacttacttcatgacagccaccaaagaaacagctatcaaaataacatgttaagtactacaatggaaccaagtacaaggaccaatagaaacagagaaataagtaactaaatctgatttaagtaaaaaagaaagagaagccattttggctaccttgaaagaaatagattatctgacaaaatgtggtaaaaacattacaggcagagttaatagcatatgcaaatgcatagtggcataaagatcaaggcatgcccaaggagaaaaaactcaggatttggaatttcagtaaataacgtaaaaggtaaacgattagccaaacagtgagttggaaatctctcctctgattcacaaaggtagtaagtgggcaagtaagattccattcatccatccatcctttcaacacacaagctgagtattctaaggtgatgagaatgtagccgattataagacactgctggtccctatgctccactgcttgaaatctggcagaggaaaataaaccttaaatatatgtaactgacgggaattccctggcagttcagtggtcagtattccttgcttccgctacagaggacctgggttagatcctggttggggaactaagatcccaaaaaccgtgtgacaaggtcaaaaaaaaaacaaaaaactgacagactgatttgcaaagataagtaacaggatagttgtctacttggaggttactgtcagtaaggaacggctgttatttctttcactgttttttccctgagcagccttatagtttgtatgttaagtcaaatcagtactctatactaagctacacattccacaatccacagaattgtctctttcatacaattaacagttgaaaacggcaaaacaaattttttaatgctttgcttctatctttagagagactttttttttaattggagtataactgatttacaatattgtgttactttcacttaggtatacagcaaagtgaatcagttatacatacacatgtgtgtgtgctgtgctaagctgcttcagttgtgtccgactctgcgaccccatggactgtagccctccaggatcctctgtccatgggatcctccaggcaagaatactgaagtgggttgccatggcctcctccaggggctcttcccaaaccagggatcaaacccacgtctcttgtctcctgtactggcaggcaggtcctctaccacaagcaccacctgggaagcccacatacacatctatccactcttttctttagattgattccccagtagaccattatagagtattgagtagagcttgttactttctcagtgataacaacatgggataacacaaccttggtttataactttatcccaggcttgtatatgatgtaattctctccaagactttctaaaatgaggatttaacatttcaaactccgaatacaaaaaagactttaaaaatcatagttcaagttcacacacaatgcaaccacactgtaatcatatgtgacacaagaaaggatatcagaaaagtgtacactgtggaagcgacacggtatgactaaagacatttctgagacatttaaactgagacctaaaggattaaaaaaaagtctataaagagcaaaaagttcatcaaactgaaagaaactaaggaaatccagtatggccaagctcagagatttgagaaagagaatggcctgagatgaggatggaatatagataaaaaacaaatcacatagagccttacaggatactgggtcacattaaggatgatggaactccactcatactttgaaaagcttagtttctgaggatacggaaaatgggctgtgctgagatggaaacaagagtatctgaatggagaccaaaggtaaccatattaatgagagatgattatatgctagcagtgaggatggaaagatgcaaatgaattcaagctattttggagataaaataaacaggactggtgactgaatgaaaaagagagaatgaaagctcaggaaaaagtcaagcttcctgaactgaccaaaagtgaggatggtggtaccacttgttgaatataaacagaagagagagtggtatgagtaatataatagatttttgtttccccagatagtttcctccatttttactgaaaagtcaggcttttatcagtctcccatcaggcctccctttcaggcttccagcaaggcaaagaggatcttaacactaaatgagtacaaatttcctcttagtccagcctgtggcctgtgtttcaaggggacccaacatggagattttgaggccaagtttttccccttctagcccctcctcatagctggaggaggggctagaagtagataacccttccttttccctggtattcagtaagcttcatcctttcacctcttctgccttgaaaaatgtgctctctcagaagtgctggttactcagtcatatccaactctttgctatagaccccatggtctatagcccaccaggttcctctgtccatggaattctccaggcaggaaaactggaatgagttgccatttcctcctccaggggatcttcctcatccggggatcttcctcatccagggatcgaacttgggtctcctgcattgcagacagattctttaccatctgggccaccagagaagccagggacgctcctgcaggaaatgaactgacagactcatccacactgaggtttacgtggtggagagggcttcactggggtattttaagttcaaatggtgtgaaatccatgagctgaaccaggaaaactggaactttacacaccagaaagtagactgtgccttctcagaatgcacacccttgggggtcagccatatgcctcacttctcacagcctcagggctggatgagccccatatctcctttttgggatgctttccctctgttctgcaaaccacaggttctgcggggccacaccctctcttggttgtaaggctgcttgatactctatccaaggaggagacaaccacaatgttttgtcccaatgctcccacccatcccacctgggagggcaggctgggctggatccagttgctcttggatctccagatgaaagctccaggctatgccactgatctgaaccagaacattaataagaatagaataatagaattgattttaaataccaaggcaaactacctaagaggtattcaagagtaccatatggaatctttatttgtaaaagtatctcattatttggaatctaattggtacaaccaacatggaagttagcaatgtggatcaaagttcttagagaatgaatgaaaaaaatgttacttttaccatactttaagagctttgatatattacctcatatatagtgtgatcctacaattataaactggaggaaaagtaaatgggcaaaagaaaagctttggtggcctatattaaaaaggctgtttaacagtgatgggatttaggatgactttatctttttttaatagccttatttttaagtagtcttcagacttccctggcagttcagtggttaagacttcccacttccaatgcaggaactggttctacccctgttcgggaaactgagatcacatatagggttagtgaagccaacaaaaaaaaagaaggaagtctaaagatgctgggttttttgtttgtttttgcaataaacatgtaaaattaacaaaggaaagggggaaatgcaaactgtaggcctatacccctttaaaggtggctcaagagctaaggatgaaccttgattcatttgcatttcatctcagaaaaagcttgatatatcaagcattcattaatattgtcatttatctgaccaaaaatttttggttttcctaatgtggctgcatgaggtcttaattgcagcatgcagaatcttagttccctgatcagggactgaacccaggtgcactgaaatgggaatgtggaggcttaaccactggacaatcagggaagtttctaagagcattttttgaaatgcagttaatcaaaaaaatctgaaatggaatactgaaacagaggaaaatcaatgtgaagggatagtttacttttaattatatacaactggccccctgaagaagggaaaagctacccactccagtattctggcctggagaattccatggactatatagtctatgcggtcacaaagagtcagacacaactgagcaacttgcactcactcactcactcatggagatagtaaaggacaggggagcctggcatgctacagtccatggggtcacaaagagttggacacatcttaactactgaacatgttatatatacaccatgacagtatattagatctgctgaagttgaatgctaaaatacaagagtgatgtatttcaggactagaatattgaagtgtggatccattccagaaagcttattattactataacttgcatgaaacagtacttttagggaattccctagtggtccagtggttaacactccacactttccctgcgggggcacaggttcagtccatagtcagggaattaacatgccccaagcttgcatcacagtcaccaaaaaaaataataataataacattttttttttttaggcaaagtaaataggattttggaggctgtaccctagccagagacagtttaaaaaaaaaaaaaaagtaaaatgaatgctcataagaaacctgtaagcattcatcattgatttaatgtgattcaatttcttgccagcagcataactttataaaaacggccaacctacagtacatttggcaaatggtagggttagggcaatatcaaaaccaaggcaggagagaggcaggttctcaaactacaaagcagtactatccctagagaattctggttcctttcccccaacacaggagagtctgtcagatccctcagatgtgttggtacagggtgcacacctctccataacccacctgtttgtccatccatttttctaagctactctctcacacacagttttttaaaaaagtgttaagggactgggataaaagcccaccaatggacattttcatcttgtgttacaaatatatcttcattagatactcctttctcctctcaattactaattggccaacaacaaatgtgactccagacaaacttgtgggagcaatgagacacttggaaaaaaaaaaaaaaaagtcggtatacaatacaaattcatctcaggattcaaaaagaataatctttgtgataagcaaaatggtttcaagttcagatggcttataggagctattctgccacaatgttctggagaaaaacaaagctttgaaaaggcatggtccttaagctaaaaaaaaaaaaaatccctagagactgttgctttattggaaaaagatagtaaagtgaagtgaaagccattcagtcgtgtccgactctttgcgaccccaaggactatacagtccatggaattctcccggccagaatactacagtgtgtagcctttcccttttccagggcatcttcccaacttagggatcaaacccaagtttcccacattgcaggtagattctttaccagctgagtcacaagggaaacccaaaaatgctggagtgggtagcctatcccttctccatcagatcttcccgacccaggaatcgaatcagggtctcctgcgttccaagtggattctttagcaactgagctatgagggaagccggggagaaagatatattaatggacaaaaaacaagcaaaaaacctctacaacctttaaagtagtaactttgtatatagtacttttcttaaaaaaaaaaaaaaaatgaccaaataaaaggctgacttactgctcagaatctaccaatatatatccacgacccccatttactctgtaaagtgagggaaagaaacatttccattattttaaataattattgttaaactcagttcatttaaatataactatttttcaatatagtatcttttaagaaataaaagaacaaaccatattattaagcaatgcctgaggaatgtaattccccaaagcctccccaatccaaaatgcagaaaaaacttccaatacaaatgacttagtttcttcaaacctaaataacaaagtgggggtgtggggtaggaggagagcacttacagatgatgagatgcttaagagacacagagacaggaaagggagaaagagaaagatataccaactgaatgcagagtttcacagtattgtaggtgagataagaatgccttcttaaatgaacaacgcaaataaaatgaggaaaataacagaatggaaagactacaaatctcttcaagaaaactggaaatatcaagggaacatttcatgcaaggatgggcacaataaaggacagaaatggtaaggacctaagaagagcagaagagattaagaagaggtggcaagaatacacaaaagaactatataaaacaggtcttgaagatccagataaccacaacggtgtggtcactcatctagagccagacatcctggagtgtgaagtcaagtgggccttagaaagtactactatgaacaaagtcagtggatgtgatgaaattccagctgagctatttcaaatcctaaaagatgatgctggtaaagtgctgcactcaatatgccagcaaatttagaaaactcagcagtagccacaggactggaaaaggtcagttttcattccaatcattccagttttcatttcaaccagagatcaaattaccaacattcgctggatcagagagaaagcaagggaatttcagaaaaacatctacttctgcttcattgattacactaaagcctttgactgtgtggatcacaacaaactggaaaattctgaaagagatgggaataccacacctccttacctgcctcctgagaaacctgtatgcaggttaaaaagcaacaactagaactggacacggaacatctgactggttcaaatttgggagtacagcaaggctatatattgtcaccctgcttatttaacttatatgcagagtacatcattcaaaatgtcaagatggatgaatcacaagctggaatcaagaaatatcaacaacctcagatatgcagatgatatcactctaatggcagaacatgaagagtaaccaaagagccccttgatgagggtgaaaaaccagagtgaaaatgctggcttaaaactcaacattcaaaaaactaagagtatggcatctggactcatcacctaatggcaaacgggtgggggaaaagtggaagcagtaacagattttattttcttgggctccaaaatcactgtggacagtaactacagccatgaaattaaaagacacttggtccttggaagaaaagctatgacaaaactagacagtgtattaaaaagtagagacatctactttgtcaacaaaagtccatatagtcaaagctatggttttcccagtcatgtacgaatgtgaaagttggaccataatgaaggctgagcaccgaagaattgaagtttttaaactgtggttctgaagaagactcttaagagtcccttggactgcaagtagatcaaaccacgcaatcctaaaggaaactgaccctgaatattcattggaaggactgatgctgaagctgaaactccaatactttggccatctggggtgcagagccaactcatgagaaaacaccctaatgttgggaaagattgaaggcagaaggagaaggggatgatagaggatgagatggttagatggcatcagcgactcaatggacatgagtttgagcaagctccaggagatggtgaaggacaggcaagcctggcttgctgcagtccctggggtcacaaagagttgggacacaattgaatgggtgaacaacaacaacaactagtagctcttgtaggtcttcacagaactgttcaacttcattggctttagtggttggggcacagtcttggactagtgtgatgttgaatggtttccctggaaacaaacagagctcattctgtcgtttttgaggctgcacccaagtaatgcattttggactcttattgactataaggactactccatttattctaaggaattcttgcccacagaagtagataattaaattcacccattcccatccattttagttcatcaactgctaaaatgactatgttcactcttgccatctcctgaaataaaagtttactattcttcatagtaagtgtgtgcttagttgctaaatcgtgtttgactcttttgggaccccgtggaccatagtcttccaggctactccgttcagaggattttccaggcaagaatactggagtgggttgccatttccttctccaggggaccttcccaacccaaagatcaagcccgcagctcctgcactgcaggtggattctaaacttttcttcaaaacacatcaattttttttaccaaacagttcatttgttactttagggtactactgctatatcctaattagaaatgtctatcaaaaaattctaagcctgagatggctggatggcatcacggacttgatggacatgagtctgagtgaactctgggagatggtgatgaacagggaggcctggcgtgctgcgattcatggggtcgcaaagagtcggacacgactgagccgactgaactgaactgaagcaatagttaaaattaagggttggcacttaaccatttgtgtggaaaatttattcagctagaagaaattttcaatcagtaacataaatatttgtggctaaaactaattaaaaagcaatcagagccttctttcttatgagtatacagtgtgaaaactacagccatctatggaccaggcaatgggttctcatcagaccctgaatctgtcagcgtcatgaccttggacttcccagctattagaacagtgcaaataggtatttgttgttaaagccactcaacctctggtatttttgttatagcagcctgagcagaccaagagagaacagaagtggctgacaccatctcttctctctttttctcttgaaagcagccttgatgcccagagttctgaatattaatttttaaccatgaggtatattgtatgaagtccagagtcttggcctggactttgatgccagcaccctctatttctaaacttcctgctgtgaggaaaaacttaaacaaacaaagagaaatccctaacaaaataacaaccacaaaaacaatcagagaaggaattccctggtggtccagtggttaggactttatgtttccacttcagggggtacaggtctaattcctcgctggggaactaagatccttcaagctgtgtggaacagtcaaaaaaaaaaagagagagagagagagaatcatggtgctaacatgatttttaagtagtctacaatattttgacaacagtttcaatgatcttaatatttcaattttttaaatgcttaaatatttctagaatatctagtatgtataggacaatgtagccaaagtgtctgtaataactatacttaggagaactcagtttttctgtatatgcctaagtcaaaggactcactgaagaattttctggaagttgtagcataacttggtaccagcagtaaataaggacaataacttgaatgcacaaaagagaatttcaaatagctagcctcggcaatttgacctttagtatatttatctatccaccaaacaaccgaacaaaaaataacctactgcaccccagtaatttagtgggagaattaaagcaataggttagtcaaacacaacactgaaagtactatgaaaggaggatagtatgctatcagttcagttcagtcgttcagtcgtgtctgactctttgcgaccccatgcatcgcagcacgccaggcctccctgttcatcaccatctcccagagttcactcagactcatgtccatcaagtccgtgatgccatccagccatctcatcctcggtcgtccccttctcctcctgcccccaatccctcccagcaccagagtcttttccaatgagtcaactcttcacatgaggtagccaaagtactggagcttcagctttagcatgattccttccaaagaaatcccagggttgatctcctttagaatggactggttggatctccttgcagtccaggggactctcaagagtcttctccaacaccacagttcaaaagcatcaattcttcggtgctcagccttcttcacggtcccgctctcacatccatacatgaccacaggaaaaaccatagctttgactagatggaccttagtcggcaaagtaatgtctctgcttttgaatatgctatctaggttagtcataacttttcttccaaggagtaagcgtcttttaatttcatggctgcagtcaccatctgcagtgattctggagcccaaaaatgctatgggaagatataaaatgggtacaacccatacttcagtgtcgtaaaaggcattccagaattgaaacctgaaacatgaataatggtagccaggcaatcgaagagaaaagagagtcccatgcaaagaggcagcttttaagaaggcctggagaaactaccttttacataacaaactcaaggtgttcagtatggctctaaaaggaaaagattagactagtaaagtcagaagcagccagactacaaggccttgtatgttagaaactttagtcaattcaaaaacaagattttagacagacccactaaaggcttttaagtgtggaaacgatctgatcagattgccattttggagagatccaggcacagtgtggtggacagtgtataggctggcaatacacgatgcaaatagatcatttatgggacagtttgagttgcccatttatttattcagaaatattcaaagggtatttcttatgtgccagagctagtatccagtttgaatgaaagaagctccagctcttcacagtagtaagctttactttcagagtagtaaaaatagttttgaaaagtaaagagattccagatatatttaggagttgaaaacaaaagaaggcagcaatggggatgaaggagagagaacagttaagaatgatgacctggcttctggctaggtagacagtagtatctactcaggaagagaatgagcaaagcaagcttgtgagttaagttcagttttggacacgctgggagacattcatgtccaataagcaacagtaatatgtatctgaaactccagagagagagatatggacttaaaaggctgttcttagtaagctatcagttccataaaggaagaattttgttttactcaccactgtatcccaatagccacagtaccaggcacacagctggccttcaataaatatctgttaaatgaatgaacgaaatacactattttgcaatagtcaacaaaatggtcaccaaactgatcagaatggattatatgagctaggcagcatacagagtgagaacttaaggggatcttagaaaaagcaccaaagaacaccattgctaacgggagtaagaataatccacagataagcaagaggaaaaccaagagatttcaaagttagagaaccaaaatataatgtttcttacagaataagtgaccgaaagagacaaatgttgctaagaagtatgaggaataagacagaaaagagaagaaagacatctgagagggtgattcacttttgtgaattttctttttttttcttcttttttgtttttgttttttttgttgagcctcacagaacttggtcctcctactagggatcaaacctgtgccactgcagtgaaaacatggagttctaaccacttagtgccagggaattcctatcacctttgtgaattttcaagaatatgaggaggagaaattctagtatgcctaacatttcatatctaaataatgactctacatatctaaataatgagatggactgcttagccttttataaacttgtttgttctatctaacatccctgcctctttactctgttatcacctcacctctatttcctgtgtaacacgtatcacaatctataattaactggtttgttgttacaatataaactgtaagaaaggaagggctacttttcttgcctgatctgtttgtggacacattcccagagtctagaatagtgcctggctcaataaatatttcttttttctgatcattcaggtgtcctgtttatctccctttgggaatgggatagggaagaattaaaagattatggagattcctctcagcccttaaaaaaatacctgcaagaaaagcaagtaaaaatacattttagggacttccctggcagttcactgattatgactccgtgcttccaatgcagggggcgtggcttctatcttggctgagaaactaagatcccatgtgcttcctggtgtggccaaaaaataaatttaaaagaaaccaagattttaaaagaaaaaatattttaaagcatagcaacagaatcgagaaacacaaaaatcctaaatttgtcccctacagaggatctaatcagtgggagtgcaaattacaaggaaaaaattcttcttaggctctataatcctagtggagcaggtaagcaatcagaaacaaggtaccctaaaatgtatgcaaggctaaaaataaagttgccagagaaaacattaagtggagggtagtttctcaatctctgcatttcaaagcttaaaatgggaaaaataatccattaaacttttataccataatcctaaaaaaaattagacaattttaactgctttgtagaactcacgtttaaatttctatttatagaaaagtagttaaactgcaataatttcttcctttccagatgagtgccattagttcactataaaaacattaacttactcatctttataaccaacacatgctctgctctaaaaaattaattcacagacttccctagtagtccagcggttaggactctgtgcttccagtgcagaggatgtgggttcaatccctggctggaaaactaacatttcatatgctatccagtacagcaaaaaaaaaaaaaaaagcaaaacacaaactcaaatggaatactagatattagaaaatgttctcctacataaagttatgactgtatggtagaatgcattaatttttatgataagtacttttaagtactgaagggagaaatgtcataacatctgcaatgtactttgaaatggttcacaatgtaaaaatatgtgtatgcatgtgtgtgtgtgtgtgtgtgtgtgtgtgtgtgtgtgtgtgtgttgtaaaatttgttgctgctgttcagtcaccaagttgtgtccacctcttagtgatctcacacactgcagcacaccagacaggcttccctgtccttcatatctcctggagcttgctcagactcatgtctgttgaattggtgagctatctaaccatctcaccctctgccaccctcttctcctttcaccttcgatctttcccaacatcaggggcttctccactgagtcggctcttcatgtcaggtggccaaagtattggagcttcagcatcagtccttccaactgatttccttacatttaagaatttgatacattttatttttgtgcatggtgttaagagaacattctaatctcattattttacatgtaactgtctagttttccccccaccatttattgaagactgtcttttctccactgtatattctcgcctcctttgtcatacactaagtgacaattaactgaatagcaaggagagataagaaagccttcttcggtgatcaatgcaaagaaagaaataaagggaaacagtagaatgggaaaaattaaagatctcttcaagaaaactggagataccaagagaacatttcatgaaaatatgggcacaataaaggacagaaatggtatggacctaacagaagctgaagatattaagaagacatggcaagtatacacagaagaactatacaaaaaagatcttcatgactcagataaccatgatggtgtgctcactcacctagagccaggcatcctggagtgtgaagtcaagtggaccttaggaagcatcactacaaacagttagtggaggtgatggaatttcagttgagctatttcaaatcctaaaagatgatgctgtgaaagtgctgcactcaataggcaagcaaattcagaaaactcagcgtggccacaggactggaaatgctcaaaattctccaatccaggcttcaacagtacatgaaccatgaacttccagatgttcaagctggatttagaaaaggcagaggaacaagagttcaaattgccaacatccgttggatcatgataaaagcaagagagttccagaaaaacatctacttctgctttattgactaggccaaagcttttgactgtgtggatcacaaactgtggaaaattcttcaagaaatgggaataccagaccacctgacctgcttcctgagaaatctgtatgcaggttaagaaccaacagttaaaaccagacatggaacaacagactggttccaaatagggaaaggagtatgtcaaggctgtatattgtcagcctgcttatttaacttatatgcagagtacatcaagtgaaatgccacgctggatgaagcacaagctggaatcaagactgccaggagaaatatcaataacctcagctacgcagatgacactacccttatagcagaaatcaaagaagaactaaagagcttcttgatgaaagtgaaagagaagagtgaaaaagttggcttaaaacccaacattcaaaaaactaagatcatggcatccagttccatcacttaatggcaaataaataggaaaacaatggaaacagttacagactttattttctgagctctaaaattactgcagatagtgactgcagccatgaaattaaaaggtacttgctccttggaagaaaagctatgaccaacctagacagcatattaaaaagtagagacattactctgccagcaaaggtccatctagtcaaagctatggtttttccagtagtcatgtatggatgtgagagttggactataagaaagctgagcaccaaagaattgatgcttttgaactgtggtgttggagaagactcttgggagtcccttggactgcaaggagatccaaccagtccatcctaaaggaaatcagtcctgaatattcattggaaggactgatgctgaagatgaaactccaaaactttggccacctgatgcaaagaactgactcatcggaaaagaccctgatgctgggaaagattgacggcaggaggagaagggaaatattgaaggcaggaggagaagaggaagacagaggatgagatggttggatggcatcaccaactcaatggacatgagcttgagcaggctccaggagttggtgatgggcagggaagcctggtgtgctgcagcccatggggttgcaaaagtcagacatgactgagcgactgaagtgaactgaccatgggtatgtgtgtgtttatttctgggcattttatcttgtttcactgctctatatttgtttttgtgccagtaccatactcttgattactgtaccattacagtatagtctgaagtcgttttgagtcacttcaatcatgtccaactctctgcgaccccatggctgtagcctgccaggctcgtctgtccatgacattctccaggcaacaactggagtgggctgccatgccctcctccaggaatcttcccgactcagggatcaaacccacatctgcattggcaggcaggttctttaccactgatgccacctgggaagtctgaagtcgggaccctgatttctccagattcatttttctttctcaggattgctttggctatttggggtcttttgtgtttccatataaattttagaatttgttgttctagttctgtgaaaagtgtcagtgataatttgatataaattgctttaaatcaaatgatcaccttaggaagtatagtcattttgacaatattgatttttccaatccccaaacacagtatatccttccatctgtttctgctatctccaactactttcatcagtgtcttatacttttcaaaatacaagtctttggactcctaaggtaggtttatttccaggtattacgttctttttgatgtgatggtaaaagattgcttccttggtttttctttctgatcttttgatgttagtatatagaaatgcaagagatttgcatattaattttgaatcctacaactttaccaaattcactgatgagccctagtgtttttctggtagcatctttaggatgttctgtgtatagtatcatgtatatcaaacagtaacaattttactacttcttttccaatttatattacttttatttctttctcttgattgccgtggctaggacttccaaaactgtgttaaataaaagtggtgacaatggacattcttgccttgctcccaatcttagaagcaatgaattcagcttttcatcactgagaatgatgtcagcaatgggtttgtcatatatggcctttattatggcctctattcccactttctagagagctcttatcataaacgggtgttgaattctatcaaaagctttttctgcacctactgaaatgatcatacgctttctttttattctcactttgttaatgtggtgtatcacactgattgatttgtggatacttaagaatccttgcatctctgggataaatcccacttgatcatggtgaatgactcttttaatgtcttgttgaattcagtttgctagtattttgctgaggatttttgcatctatattcatcactatcagttcagttcagtttctcagttgtgtccaactctttgcaacccccatggactgcagcacaccaggcttccctgtttatcaacaactcccagagcctgctcaagctcatgtccatcgagtcagtgatgccatccaaccatctcaccctctgtcatcagtataattggcctataatcttttcttttgatatctttggttttggtatcaggctgatggtggcctcacagaatcagcatggcagtattccttcctctgtaatttttttataacagtttcagaaggataggtgttaactcttctctaaatgtctgatagaattcacctgtgaagccttctggtcctggacatttgtttgctggaaattttttaaccactgtttcaatttcagtacttgtgaatcatctgttgacattttctatttcttcttggttcagtcttggaaggttatacctaagaatctgtccatttcttctaggcggtccattttattggcacatagttgtttgtagtagtgtcttatgatcctttgtatttctgtgttatcagttgtaacttctcctttttcatttctagttttattgatgtgagtcctctcctttattcttgatgagcttggctagaggtttatcaattttgcttatcttcttaaagaatcagcttttaatttcattgatctttgctactgttttcatctttatttcatttatttctgctctgatatttgtgtaatttttttccttctactaaatttgggctttatctagatgctttaggggttcctctttctctagatgctttaggggtaaggttagtctgtttatttgagatatttcttgttcctaaggtaagatggtattgctacaaatgtcccccttagaactccttttgctgtatcccaaaagtgtcggaccatcatattttcattgtcatttgtctctagctatctttttatttcctcttttgatttctttagtgatccattagctgttcagtgacatatgtttagcctccatgtgtttgtgtgtttttttttagtttcttcccctgtaattgatttctaatcccacagcactgtggtcagataagatacttgatataatttcacttttcttaataaagttatcgaggcttgatttgtggcccaagatatgatctgtcctggacaatgttccgtgtgcacttgagaagaaagtgtatttagcagctttcagatggaatattctttaaatatcagtaaagtccatctgatctaatgtgtcatttaaggcctgtttcctgattttctgtgtggatgatctgtttcttgatgagagcgagttattaaaatctccccaaattattgtttttctgttgatttttccttttacgactgttagtatttgccatagatattgaggtattcctatgttggatacacacatatacatatatacaactgttatatcttcttcttgtattgatcttttgatcattatatagtatccttctttgtctcctgtaacattctttattttgaaatctattttgtctgatatgggtactgctactccagctttcttttatttccatttgcatggatacttttttctatccccctcactttcagtatgtaggcaccagaagtcttgagtgaattccgcggccttgtactgaagctaataactaaatatcactggccaaaatttcaaaaattatagaattcaaacacatatattttaaaatatcaccttttttgatagacacattacatacattattaaactgcttctatgcttatatttcttatctcaacctagaaatttaggtaatagctacattctttgtaagtgctgagcacagcaaaaaaaaaaaaaaaaaaaaacaggcatttttaaaataaccattagtcaagggaacaaaagaaaatgtatttggctacattattctaatactagttctcctgggaaccaaaagtatttaagtacatagtgtgtagttaaaggtaagctaaggaatccaagaaactcactcaccaaacacaggcacagaattggatcagtgacctgtgtcatataccacagtaatctagtaagtagtttttactcaactaattcatcctggtaccttggccattttcatagtctcttttgtgattttaaataagtaaaatgtgaatgtcactatcccagggatacataatagatactaagatacttaaattcagaaatctctgaaaggtaaatggtaaactgttagctcctcagttgtgtctgactctttgcaaccccacagactagcttgccaggctcctctgtccatggaattttccaggcaagaatactagagtggattgcaattcccttctccaggggatcttcctgacccagggatcaaacctgggtctcctgctgcaggcagattctttaccatctgagccaccaagaaatcctgaaggtaaatggtaagatctatcttaatagctaaacaataattatctctgattaccatttcaaaaggtgacatacacaccctctcatcaaagtaagcaagaagaacagactgttcatttcagaaagtgcctggaagtagggactgatgggcaaggacatatctactctgacaaggggcagtgtgaagcttatttcaatagttcagcaaaaaaaaaaaggtattttcaaaatatgaaaatacatatttttaaaatgtactggttttatgtataaattcatttgcgtatacagagatcaatgaagcactaaagtgttattttgagcattctaaaacttaggtttaaagaagttaagatgtaacagtccaaaaagctgttgacccttgctgtaactaaaccaagagagagaaatgaagtcagcatctcagttatctttggaccaaaaatctttagttccctaaagataccacaagatacaggttttaaagaccactggatttcttggattccttagctcaccttccttggtagctccatggaaaagattctgcttgccaatgaaggagatacgggttcgatccctgatgcaggaagatcccacatgccacagaacagctaagcctgtgtgccacaactactgagcctgtgctctagagcccaggagccctactgaagtccacacgccctagagcccatgctccatgacaaaagaagccacagcaatgagaagcctgcacaccacaactagagaacagccccgctcgtccatgcagcaacaaccacccagcacagccaaacataaataaataagattaaaataaaaaaacactgaacaagtggtttgaaaacttcatgtcaaatgttcaatggaccagcaaattgctctgtcctaacagatcatctgtgcatataaataaaccaccattccactactgctccactgtagtgaaataaaacctacttttaaaattattattatttgcctcactgtgcagtatggaggctcttagtccctccctcccccacaaccaaggatcaaacccatgcccctgtagtgtaagctcagagttctaaccactggaccaccaggggattcccaaaacctacttaatagcaaattaaattccttttgataccagagtaatagaattaaaactaaagaacgatcataaatatcaattcaaataacaactttgccaaagaaacaaaataaacaacattgaagcaaatatggaatttctgtttttaagatcctaagtcctcaacaaatataagctcaagtattcaaaattactcttcactcctgttttgaactgaaaagacttcaaatattcctaagtgtttactgaagaagttaactttcactgtaaattatttcacaaacaaaaattaatttccttagcatttttgaataaaatatttttatggggacttccctggtggtccagtggctgaggctcctcactcccaatgcagggggccttggttcaatccctcgttagggagtgtgatcccacatgctgcaattacagatcctgcatgacgcaactaagaccaggcacagcctcaataaataaattttaattttaaaaaataatatattctcatgaaagaatgagaactacaacatcaatatccacgcctgccttcctgcccacaaatcttatcattcactctcatgtgcacagacttgcaaagaaaacaacctgattacaagtcttcatatgctgtgctgcacttagtggctcagtcttgtcgcactctgcgaccccatggactgcagcctgccaggctcctcggtccacggggattctctaagcaagaatactggagtagactgccacgccctcctctggggatcttcccaacccagggatcaaacccaggtctcccacattgcaggtgagttcttcaccgtctgagccaccagggaagccatgaatactggagtgggtagcctatcccttctccaggggatttcctgacccagcaatcaaactggggtctcctgcattgcaggaggattctttaccagctgagctaccagggaagcccataagtcttcatataaaacatcaattgttactgctttaagtgctgattcattggaaaaaacttaattagaaaattctcagtaatatccctcacctatgcatttaatcacttcattttagacaaaaacccacagaaaagcagtcctaaaaaaatcacataatcacatcaccttcttcccagcaaagatattctgtcttcatatatgcttctactactcaaggaggatgaagagggaacatcttcatttttatgtgcaatctccctccagtcaatcacgctaaactctcactttaaaactaaattcgctatgtataactggatcactttgctatacatctgaaattaacacagcactgcaaatcaactatacttcaataaaaaaattctaaaacgaatttcttaagttttctttaattcatttgcctatttcagggaaattttttttaattactcaaaacaaatcatgtgtattctaaaagaatcagaatttacacaaacataaaaaacactaacatattcttcctaagaataacatctctctctagttttttttttttttttttggtctgtgtcacacaacttgtgaactgtttttttaatcactgatttaacagatcaattgttcatagattcacaggtttaccttggatagagtagacaggaaatgttgagctgaaaaagtgaaatttaagctgagtcaaaagtgaggagctagtcaggatgaagctctgagggaaaagtattctaggccaagggggtgaaggcatcagacagtacttggttaaatggaaaaatatatatatatggctggggacttcgctggtggtccagtggctaaagcttcgtgctcccaatgcaggggaccagggttacatccctggtcagggaactagatcccacatgcctcaataaagtcaaagatctcgtgtgccacaactaagacctggcacacacataaataaatattttaaatatacactgttgttgttcagtcgctaagtcatactagattgttggcaaccccacggaccacagaatgccaggttctccagcccttcattatctcctggattcgctcaaattcaagttgattgagtcattgctgccatcctaccagcacatccgctgtcgcccccttctcctcaagccctcaattcttcctcagcatcagggtcttttctatcgagtccatgcctcgcatcaggtagtcgaaatgttagagccgcaccatcagtccttccaatcaagggtgatttcctttaggactgactggtttgatcttgctgcccaagggactctcaacagtcttctccagcatcacaatttaaaagcatcaattcttcagtgctcagccttccttatggttcagccctcacatccatacatcactacgggaaaaaccacagctttgactacatatatatatatggctggagcagggagcccaaaggggagagtggtaagctataaaatgagatttcttgactaggatttgaagctggttataaatctatataaaatcagcccttcttcagattatttttatagactcaaaaccagcaggttaactcgtcataacaaattcaaattaaagcaaagaaaaagacagagggtattcaaattaagtactatcattataataaagattacatttcctatttaaaggccacaaaacttagagaaaattaaacacagaatcatttctgcaaatttacctaagagacactgaatttctgagtacttgggtaaaacttgatctatgatcttacatgaaaactggtaacaagacgactttacatttgtggtcatctagccatcaaccttcttagtctcaggtcatgcttcattacatagaacttaccggtacctttgaaaaagcatcaattacaaaagaagtcattggatatccactttttacatgccatttacttaagaaattaatatataatccagagtctagcagcttagtcagttgtattttcagattctgcaacctgtggcagatggttttcctggcatgtgtgaccctggcattttgcccatgtttacatggactgacaggagtttaaggctgatgggaggaatttcttgctttttaaaattatgtatttatttacttatggctatcctgggtctctgctgctgtgtgtgggctttctttagttgcaacgagctgggtgaggggaacaactcttccttggggtgtgcaggtttctcactgcagtggcttctcttgttgcagagcacaggctctagggtgtgtgggcttcattagttgtcaagtgcacaggcttagttgccccacgccatgtggaatgttttcagaacacagatcaaacctctgtcccctgcatttccaggcagactcttaaccactagagcaccagggaagtccaacaatttcttttatctgtgataataaagtcatgccgggcctgttcctcacctgtgtgtatattcggttaattccacagtcttcccttgtacatccataaaatagcaaaggcctctctgagcatgaagacatggcaagtcatctcaggagtggtacataagctccattccataaagagtgctagtaaaactagtggaaattgtgatttcatccttagattttctcttccaacctttccttccatatatacttggaaatacttttgaaataaagtcagttttgtttggcaaattcaatagcatccctttgagacaaatggatcgcaaaatcagaactaaaaagcatcatgcagtcaaagttaaggaaaacaacaactatttgacctcatacaaaggtattaagtaaaaaaagtttacatggtggtactatttcgtgtcaggaaatgagctgcacatctttaaaacttttcaagtatttctgaaagacagtatgtcattccttcaataattagtaatttagcttccttctatcaccatatatttacccaggtttgctagacgctcaggaaacaaagatgaacaggacacttcacctacatcagataaattccacagaaataatgccaacatatcctgaaagctagaatctttgaccacctcaagaagttaaacacctatcacttgcactccagagctccaaaaggctcaatgtcaaggttggggcaccgaggtcactaaagttaaaagctgaggtattacaaagttaaatgctggccaagtgcagtctctgaaaagagttgccaactgtcacccacacctctttaacccgtcccctgccacttccccgtcctttttgtaaatagtttttaaagggaactgtccaaggttaccacctgacaaggaagagtgcattgatgtggtataccaataaaataaaattgtatactctctatatttacagagtattcccatacaacatctaagtgtcgacaaagtctcaaccaaggcaatataacacataaaataaaacttcctcagtagggttaaaatatcaagaaactgaccgaaagaggaagataccaaacttcccaaagcagcaacccccaggaaaggtactggaaccagcggaagttacatatccaggacagttgtttaaaggcgctccacccaccccaaggtaaaagtttgaaacgccgtctgactacccccacggtgggtcggaaacttccctaaactacaagaggcaagcagataccctaaaataccgctctcagccaaccccaggtgtcctcaggccaggctgtggcttcctccccaggccttcttcccccatctcactctcttctccaggacactcacccatctccctgggcgtccaatgctggccgggggtactggggcctctcggccgccaggctcattccgacgagcctcgggcttaggcctgccccaaggaggccgacgcgcctcccctccgagacggagcgcgaccccccggccctcgggcccggccctcaccctcccctctggccggcctcacctcctctgcgtgcttgcgcagcgccttctctcgctcgtactgggtgatgagctgctcgttgtcgtcccggagcagctccagctccacctggtgctcttggtcctgcgcgaacaccgagtccaggttctccagcacggctaccaccagtggcatcagctccttgaccacctcctcgtcgtagcgcccgatgagccgctcgaactcgcggtagatggagccggccaggccggacacccgctccgacatcacggccccggagccgccgggctcctcctggtacaccacaccgtcctccagctccatggtggcgggctgcccgccggccgggggcgtctccggctgagggggcgacacgggcccgcacgggacggggccgctgcggctggagctggggctgggcccggcggggtgggggcccgagccggaggaggggaggggtgaagggagcgtattcagcccaaccgccgctgcaccaactgccggggcggccgggctgcgcgcgccacacgtcactgaaggggcgggatccgcccgtgtcggcccgtagggcgggaccccgcaggaggccaggcgcggtcgggggcggggccaatgcagcaccctgcgccagcggaggcggcgttgcgtcactactgggcgccgcgcggacgtcgtgtaagccaatgggaaagactgcgataggagggtggtgagaagtacccaccccaggcgcgatttgcggggcgagccccaaaggaaaccgagggtttctggaagagtgattagcagtccagaatagctaacattttattagtttttacagc

SEQ ID NO: 199 - DNA, 30723 bp, Hippotragus leucophaeus
  source 1..30723: mol_type = genomic DNA
agttggtgatgccatccaaccatctcatcctctgtccttcccttctcctaccaccttcgatctttcccagcatcagggttttttccaatgagtcagttcttggcatcaggtggtcaaagtattgcagtttcagcttcagcatcagtccttccaatgaaggcgggtcgagccggcccaagaatgagcattcctaacctgtgcccacgtggggcggactgagcgggctggaccacccgttaagaacgcgcttttccctgcctctaggcctttatagcccctcccaccaggaagttgagccccgcccaccagggggcgtgtggtcgggtaagtcccgcctccacgagcaagctctctatccttactggctggtgggaaggggcccccccttcatcacagtgctgtccccgcctccgcccgaaccccggggcagggcactgcgcctgcgcagtagagctcccgtttagcgcctctgcgcggtccgggtggcaggcggagaccctatggcggacacccgggaagaatcggaaccgcttctgagccgggcccgcggcggcagcggccgcgactgcccaaggggcgtacccacttgcagcagcgtccaagagagcgctggtgagccgcggcctggggaggggccgggccgcgcgggggcggcgcgtctgggtccccgcggcccgagtcgcgcccctgctgtcgctgcaggcgcgccccgcctcccccggccggggtccgatcgggccttgcggagggctgggcggctgcgccctgcggaccccgatcccggcctgggcgtggagctgggggcgcggggtcgctggggggagtggtggtctcgccctgctccaccgaccggctggacagagaggcctcgctcagccggggagtagccagccccgtccccccgcccaccccccagtcccctccgtcccgccccacccccaagtcccctccgtgggctcggggcctcgtactttccgtggatcgccttggtgactcctaggaggacgtacttccattttctccagttcttaccggggaaagtgaggcacagagaggggcgttcccctacccaaggtcacacagccaggaagtggccgaggtgaaatccagctgggagtgaattgtgagccttcccaaaccggggcggcttcctgcctttgccctctgcagctctggcctgcccttcctgtttatccgcagaaagactgctcattcctggggaggcctgggagggtggaggccttctgtccctgtcagatcccaggggcattgggtgctggatttgggagggaagggcctcagcctccttttacggagggggaagctgagaccccgagaatgtccacaactggtgcaagctcacagccctggggcctgtcgcagcttctgctgccccgcacggggtgctccttaaggggccatctgggctcctgcttgcaggggtctgtgctgtgtgcctgactgttggggtgggtgcctgaccggagacaggaaacatgcccacctgcccatctcagagcctgtcccaggacagttttccatccagcctgtgccaggcctcccagggccccggaagagggacataggatatggtggtgttcagggggagcagactttgtgtctggaggtccgggtgcctttctggtgctgccactgcccggctgtgtgaccttggcaggtctaacctttctgtggttgttcagtcgttcagtcgtgtctggctctttccgaccccatggactgcagcatgccaggcttccctgtccttcaccatcttcctggagttggctcaaactcatgtccattgaatcgatgatgccaacctttctgagtctcggtaaaacagaggtggtcactaggggtgccctgaagggggccctggtgaggattcagggagcgtctgggtgcccggccaggtggcagagctggtgttcactggtgccgatagctgttctgagcagagaactgtgatcattgcaggtccagccctgggagaatgcacggccaggcagatgagaccctcactgcagagacaagaactgaggcaggcagtgtggctggtgcgggggggactctggggagggctctttgtcccgaccctgtggccttggtgagggcttctgcgaacacagacaagacaccctgtgttctggatttccctggccaggctcttcagccaggctctggggaccctcactgaggttaccgccagctcccatgcagggctgctggataggaccctgaactcagggtctgtctggcctacagccagactgtcctaggaaccacggtgggggaaggctgctgctgggtgcccctcgggccccagtgggcccctgtggtcaggtcccgaggcagcccctcctcatggaccacgacttcagggtggggatagtcgttttctcttccccttcctggtcagggaatgaccctcttactggttatggaaaagtcagaggacaagggattgctgtgctctagaaggggctgtgagaagaatactgataggaagtgttgatgaagggcttactatccgtcgcgcattagctacagtaacccattcagcctgcacatcagtcctgttgtgtagggcctgcaggaactgaggcacagcgaggtgaggggactcgcccagggtcacacaggcccagccagggggtgaggggagctggagccagcgggggaggggatttattctgggatgttggaaaggggaggcctggggcagggggaccagtgcagggctgacgggcacagtgtttgaaccctcttgtcctctgtgctctgacatcctaccctagtgtgcccaggtgattgcccaccccccgcaccccaccccgggggaatgagttcctagacctccaagctgcaggatggtgctcctggcagggctgacggggcctgggcaagggcgtggaggctttggagagcttggcctcggtggagccaagttcggggtgagtggcgaggagagcacaggctggaggaagtggcaggggaggaggcgggcagagtgtggactctctcctggggtgggggggcccaggggaagctatgaggtgcacgtggaaggctgctgcaggggggacagggcgggagggccctgggggtctggtgcttcgagggccgggtggccggagttgagcgagccccttcagcggcccccagtccgggtcctggagcgagctctggggcctctggctgcccgtcttatgcaggcagcttgtctccttgggtcccctcagatcgcagtgtgcccaggaggctttctggggaagcagtggtcgccaccctcagagcctgcccgggggaactcctgggcccctggggttgagcgtggaggttgtccgtgtggggaccccgaggtgccgacggacatggtgcttgttctcggtgacacagcaggtgatggcacagccccgtcccctgtctctgtccatggtcccccatgtcccccattggcccctggaccccgctgcacgggcccggaagacagtggcacagcctccctggggacggcagacaagagttggcagtggtctggagctctgcccaggcgtccagcgtcccctttcccgggcacctctctgcctctctgtctcctctcggtacccgtgaagggtggttttggcagctgctgacctccagggaccagacgtgagagtagagtcttcagcaggagtggtgactggtcagttcagctcatctcaaagccccgcgatccgctgggggctgcgtgccggctctgctgtcctgggtgcctgggctgcaccctgcccgctccccgcggcctctccgggcgggtcccccgtctccctggactgcagctcctcacgcctgcctcatacccctgtgtcagggagtcgtcccgtgcagagtcggagtggcgcccgtgctcaccaggcggcaggcggcacacccggccaaggggaccgaccaggtgcacagcccaaagctccctgatggggggcctggggtgccgggctgcggttggagccgcccaactcgtcctgcccgaaggcccctcgcagtcgatcttccctggcctccaagtgcccctgtctggttggcgaaggctccctcggctcctgcccttggggtgactcggctgtggccccctggccctgtgggcccatgacacgagctggggtgggggggaattagggggacacgatgaccccagaaggcccttcttaggtctccgtatctggtggaggtcacgcagcacctcggacttctagacgtgaagtgtcagtgtgagacccgtgcccttgtttggcagagggctggctcggagcaccaccccatctcacagttgaggcagctgggccgcggtgtcctgacaaaggccgcccggaggcccgcggtgggacggggtggggagggcgaccatgaacacagtccgtgcgccatgtcggccctggggctcctgcactcgccttggggggctgttaagaacccccattggacagggggcgatgggcaccgtgggggctgctcctgtcctgggcccggagcctgtcgttcagaccctgccccccaccgcagggcgcaggcatctcattccagagcctctggaaggtcgcagccgggtcctcaccttgctttccccaggagtcctgggctgggcgagcgtctcccgatcccactcctcacccgccgtgtcccctctgcccgcaggcgccgcagccaggcgggatctgtgcttggaccaggctgtggtcctcatcgaagacgccatccaggtgggtgggcctgtgcttgccctggggctcgtggggctgggggacgctgccccactggccccttcgcccctgccgtcctggggccaggctgcggttgctgggccatacggttgtcgcccccgtgctgactgggatttaaggcttggtcccctccagccctccttaggagacgtgtgccaggtgcccttctgggccactcatttctccggttcaccatctgccccagccttcgtgtgccgtactgctctgggttctttgaaaggtacccagaggtggcatgaccttccttcacctgcagacgacaccccgggttaatcagggagatagactgtggaagctggcagtaccctctgtgctggatgaggctgggggcatcctggagggtgacccagctgaggcgaggcggggtcggtcttgcacagaagtgaggagagcctcacgggcagacctagctgtgtgcacaactgtgcatccagcaggccggggtccgtccaccggctggccccggggtccggccctcgggcgttactcctctgccgggaaaccttgtcgcttgggagggtgcgaccctgctgggtggccacgagcccccagtccctgtggagcggactctgtgatcccggggccgtgtccctgctgtggatgtgtcgtggggtgaggggctgccctgcatgggctggctgtgcggtgcggccccgaggggaccctcactgccccgtgtgacctccacttccagtatcgctccatcaaccaccgcatggacgcccggtctctgtggctgtacaggcggtactactccagcagcagccaggggtgagcgggcacgcgccccatggggctcctgcagccgggcctgggggggtctcggggggcaggcaggctcccctccctggggtggacgaggagctgctgtctcccctccttaccagagcagaggcagaaagggcccctctctggtgagggctcctttccagaatcttccggccagccgtggcacctgagtttggactcgatgtgtgtggtctgaccacacacgggtggccccagagccagaagtgtgggccccagcctttggacccgtggcgtctgccctgctgctttccaggcatcctgcctgctgggctgctctttgggcccccgagcgtggctggtttgtgccttctgaccagtttcggttccttttccaggattctgagcttcaccattttcttgatcctggctttggccttcgttgagaccccttcctcgctcacgcgcacctcggacgtgcgctaccgctcggccccctgggagccgccctgcggcctgaccgagggtgttgaggcgctctgcctgctggtcttcgtggccgatgtctccgtgaaggtgaggggccacctcgcccaccttgccctcccgccctgccccggcttcccgcgttcatccttccccctcccagagccagccgtctgtccccaccatgcactttgacccgcagggcacagacctgcctcttggacggccctcccctcccagaccattgatgggggtcagctgagccatgggggctgtgcagcctcgcgggacccgggaagggcacggctgagggtccacagtgccaccctggggagagacccctgctgaacagcgggccctggaggagggcttttcacagccctcactgccccggcccagagtggaggggccggcgtggggggtggggccggcgtggggggtgggcagatgccctgccagtgtgccagtctggcttccgtgacccggatctttccagaagctggggcggggcgggagctgggctgtgtcagggcgtcagagccacagggactcggcggttagaccccgctgctggccacacttcccatcacttctgataaacagcggtgacgccaccgcgccagccctcatgggcacgtccagggctgagccagctgcaccctgcctgcggtccctttagggggcagttcagcctctgtggtctgaccccaaggggcatgggtaagcctcagtgcgtgtgttaccaagagccccgggcagtgtcttatttctcctttttcagcctataatgtggttaggaggtctgggggttttaacctggaactgaaactggtgagttttcattggccttttttgagtggccggtctgttggggaagtcttggaaggtgggagagagtgtgggttttacctgcaagtggtggcctctgggggggtcagtgatagaaagttaggcgactgccacccagatgacaaacccacgttcccaaggccggcccctgggccactgcgctggttcctggtgtttccggaactgtccccacgcacaggcctcagtgctgaccggacaggcaggacggctgtgaggacaggctggagcgggtcagtgccgcgcccgcggtcacgaggaggctgggcgaggcgcgtggcctcccgcccacccggcgcccagcttcctgctctgagtcatgcagggaccacgcggctcctcaaggctgcccagcgacccccgtgtccacacggcgcaggcctcgcaccggctgcccccgctcagccgccgtctgtcttgcagagctacctgatcgggtgggcccagttccggaggaacccctggctgctggcctaccttgtggtgctggttgtgtctcttctggactggatcgtgtcgctgagtctcgtctgccaggaggtgggtggtcaggcggccccaagggggagtggggagctctagagggggtgagggcgcaggtgaacggtgtgggttatgggggagagccctggggcccagcgtccctctggcctagctctgcgccatccagcccatgtcagtctcccacaggccggagccgtgtccccaccttcaggcccagggagggcgtgaggccctgggggcgagttccagggtccggtctgcccagaacacccagaggcaccgccctgtgattcaacagatccgagcttgcagatgtgggtttgggggcgtctgtagccttgagggccggtcggggacacagaagccccgtgaggtgcttttgaaagaatttaccgttcgggctcagacagggcttgagtaagaaagcgagaggggaaagcccctgccctggggctgtggagctcaggagagaggccctggccctcgggggggtgctggtgcttccaagaggtgcggtggtgacttagttctgggggtgctggaggccggggagcggggacaccctgggtgctgccagcaggaatggcacgtggacagaggccggggggcacccctgcccctcctggtgccctcccgcccagtggggcagctgatgcaggtgtcaggggtgttaggggtgggttcccagctcacagcagggctggggggccggggggtggtgccccctgcagccgcccccacccccgtgcctcctccatgttgctgcatgagcaccctcctccctgaggagctgccgccccctccccaccaaggagaaggctcgccccctccccagacggggcagaggccagcccagccaccaccgggtccatttctgagtgatggccatggtgtccatcaagtatccccgaacattctgggtgagggtcgtccgtgaaattagggaggagagaggcatgagggcccttactgtgcacagacactgtctgtgtaaccagcagggaggaccgcgtggcttgtgtgctgaggggctggggacccgaactcacacttgcaatctccctgccccgtccccacatccctgggtctctgtatacaaggaacttcactcctgaggggctcaagtccgtggcagtcctgcctctttgttcctggaattttgtgacagttgtttgtcctggatgtccctcgggggagcccacacagacctccctgtccctctgggcggcagcttcccaagcccaccgtggtaactgaagctctgcgctctgcctaccggcccccagtcctcttcacagacagctgtggttcagaaacacggtcctcgggggtggtcctgggagaggtaggggggcagggggcagagtccatgcctgcccacctgcctgtctgctgaggacagctgactgccttgcttggggtggggctggcgagtcccccttggggggccacagtggggccggtgctgggccgtgccagtggccagggtggggaggtctgtactgttggccccgggggtgacccccatccccatccccccaagctgcagggggcaggcgaccagctgagcagaggtgggggtgagggtgcccagtgcggctgccagccggaggtgaggggagggtgccctgggcttccaggcagccgtggagggcttgggcagggaggggaggccatcagccttgtgtgtgtgagacaagaagatgcccactaggacatgtctggagttgacagcttgggttgtagattgaatgtggagggacccttaacactgtaaggacagaccagttccctgggccgtgaggccagcgagaggggaggaggggcctggggtccagcacgtggccgggcacagagtgggtgacccaggtgtcaggcagggggaggtgcctgccagccaggctggaacacaggaggtgatcttgggctcagaggcttggcagtcaccgtgggccggtccagtgccctcgggcaggagggcaggttggctggaacagatgagcaaagggcagtgtggtgttttggttgtgagtggaaggtattgaagcacgtggcatgtgtgcatgtggggacagggtaagagctctggggggcctctgaggggccagggtcctgagcacagggaggagggtcctcgggtgtgacaggagggggagaggaaggggtgtgtgttgatgtgtgtttgtgtgagcgtggaggtgcgggtgtgtgtgagcatgtggaggggtgggggtggtgtgtgcgcatgtgtgagtgtggaggtgcaggtgtgtgtgtgtgtgagcatggaggtatggggtgtgtgtgtgtgtgtgtgtgtgtgtgagcgtggaggtatagggtatgtgtgcgcacgtgtgtgagcatggagctgtgcgtcagcatggaggtgcgggtgtttgtgtgtgagcgtggaggtgcaggtgtgcgtgtgtgtgagtgtggaggtgcaggtgtgtgagtgcgtgaacgtggaggtggaggtgcgggtgtgcgtgagtgtggaggtgcaggtgtgtgagtgcgtgaacgtggaggtggaggtgggggtgtgtgtgtgcgtgagcgtggaggtggaggtgcgggtgtgtgtgtgcgtgagcgtggaagtgcgggtgtgtgtgtgaatgtggaggtgcgggtgtgtgtgaacgtggaggtgagagtgtgtgtgtgagtgtggaggtgtgtgtttgtgtgtgcgtgagcgtgagtgtggaggtatagggtgtgtgtgtgtgagcatggaggtgcgggtgtgtgtgtgagcatggaggtgcgggtgtgtgtgtgcatgagtgtggaggtgggggtgtgtgtgtgtgagcatggaggtgcgggtgtgtgtgtgtgcttgtgtgagcatggaggtccagagtgtgtgtgtgagcgtggaggtgtgggggggtgtgtgagcgtggaggtgtgtgtgtgtgtgtgtgtgtgtgtgtgtgagtgtggcggtgtggggttcctgctcactttctgccggtctggtctgtgtgggaggctgtgacccagagcataggaggggctgggggctgccgattgaggagccctgggccagccccccgagggcaggacagcggcttcccagacagatccaggggcgcccgccctctgtgagaggggctagggggtgctggggagacaggctggtcaccccctggcccggtgctggctcgttgcggggcctgagggccctgggttccgacctgtgctcagagggacgtggaagtcaaggtcggccgagtgggcagcctggggacagccggggccgtgcccgtctttacagggcgccgggtctctgggcccatcgtgggggccgcgctcagggtcccgggtgcgggtctcttgcagcccctgcgagtgcgccggctgctgcgccccttcttcctgatgcagaattcctccatgatgaagaagacactcaagtgcatcaggcgctcgctgccggagatggccaggtgggcgctgggccaggtgggcgctgggccaggtgggccgtggcgtcaggtgggcgtggggtcaggtgggcgctggggacagatgggagctcagtcaggtgggcatgggggccaagtgggccctgggacaggtgggcacggggtcaggtgggcatggggccatgtgggtgccgggaccaggtgggcactggggtcagatgggagctgggtcaggtgggcgctggggtcaggtgggcgctgggtcaggtgggcatggggccaggtgggcactggtatcagatgggagctgggtctggtgggcaccggggtcaggtgggcgctggggtcaggtgggcgctgagtcaagtgggctggcagggtggggtggggatttctgctccctgctgggggcctggggctcccttcctctggccaggggggcttgtgggcaggaggcatttgggggtctctgtttcgcacctgaggcagccctcttaatagccttgcttgacccctgccccctgctccatcctgcatatgcttcctgccttggctgtgactgctcacttccctccgtccctggcccccaccctccccctgcacccccacccccgtgactcacgtggctgacccctcactgctggcccaagttgatggtgctggcctttctccttggcgagtcccggggtccttggagctgtctgtcctggcacaggtttgctaaggttgcacttgtgccagagtgcgctgagcagctgagcaggtggctgggtcggggcagggagctccccgctgggcccggtcagcggagccgggaccgcgtccacccggcgctgagtgccgctccccccgcccccagcgtcgggctgctgctggccgtgcacctgtgtctcttcaccgtgtttgggatgctgctcttcaccggcgagaaggtactgcgctctctgctctgctccgccaggcagcaccctgccaggtgacccacagtgccaccccgtcagtccactggctgttcactgaccctccttctctgcacccctcttagatggaggcctctcagaccagccatcagggagcccctctcagcccctgcctgtttctccagaggggacccttcctgcctggacccctcccctctcagcctctcactgcttctcagcccccggcagcttcttgctgcgtggaggtgtcgtctgtgtagttcttgtgtgcatgctgtgtgtgtgtacatgcatgggggtgtctgtgtgtgtgtctttgtaactgtgtgccctgtgtgtgtgtgttttatctctgtgtgtgcatgcacgggggtgtttgtgtgtctacgtaactgtgtgtgtgtgtatgtttctatctctgtgtgtacatgcatgggggtgtctgtgtgtatgtctgtttgactctgtgtgtgtgctgtgtgtgtttctgtgtgtgtacacacaagggggtgtctgtgtgtgtgtctgtgtaactgtgtgtatgctgtgtgtgtgtttttttatctgtgtgtgtgcattcatgggggtgtcttgtgtgtatgtgtatgtgtaactctgtatgtctgtgtgtgtgtttctctctctgcgtgtgcatgcatgggggtgtctgtgtgcatgtgagactgtgtgtgcgcgctgtgtgtttctgtctctgtgtgcatgcatggggttgtctgtgtgtgtgtgtgttactgtgtgtgtgctgtgtgtgtttttttatctctgtgcatgcatgggggtgtctgtgtctgtgtctgtgtgtctgtgtaactgtgtgtgtgtttctgtctctctgcatagatgcatgggggtgtctgtgtgtgtgtaactgtgtgctgtgtgtttctgtctctgtgtgtgcatgcatgggggtgtctgtgtgtatgtaactgtgtgtgtctctgtgtgtacacgcatgggagtgtctgtgtgttctgtgtgtgtgtgtgtaactgtgctgtatgtgtttctctgcatgtacacgcatgggggtgtctgtgtgggtgtctctgtgtatgtaactatgtatttctgtctctgtgtgtacacgcatgggggtgtctgtgtgttctctgtgtgtgtgtgtgtgtaactgtgtgtgctgtgtgtttctctgtgtgtgcatgcgtgggggtgtctgtgtgggtgtctgtgtgtgtgtaactgtgtgctgtgtgtttctgactctgtgcatgcatggaggtgtctgtgtgtatgtaactgtgtgtttctctgtgtgtacacgcatgggagtgtctgtgtgttctgtgtgtgtgtgtgtaactgtgctgtatgtgtttctctgcgtgtacacgcatgggggtgtctgtgtgggtgtctctgtgtatgtaactatgtatttctgtctctgtgtgtacacgcatgggggtgtctgtgtgttctctgtgtgtgtgtgtgtaactgtgtgctgtgtgtttctctgcgtgtgcatgcgtgggggtgtctatgtgggtgtctgtgtgtaactgcgtgctgtgtgtttctgtctctgtgtgtgcatgcatgggggtgtctgtgtgtatgtaactgtgtgtgtctctgtgtgtacacgcatgggggtgtctgtgtgttctctgtgtgtgtgtgtaactgtgtgctgtgtgtttctctgcgtgtgcatgcaactgtgtgctgtgtgtttctctgcgtgtgcatgcgtgggggtgtctgtgtgggtgtctgtgtgtaactgcgtgctgtgtgtttctgtctctgtgtgtgcatgcatgggggtgtctgtgtgtatgtaactgtgtgtgtctctgtgtgtacacgcatgggagtgtctgtgtgttctgtgtgtgtgtgtgtaactgtgtgctgtgtgtttctctgcgtgtgcatgcgtgggggtgtctgtgtgggtgtctgtgtgtaactgtgtgctgtgtgtttctgtctctgtgtgtgcatgcatgggggtgtctgtgtgtgtgtcactgtgtgtatacgcatggggttgtctgtttgtgtgtgtgtgtgagtctgggtggcaggggcagctctgctgggaggtgggaccagtaagtctcaggacccacgtgtctgtccagtgtcactgctgtttatggagcgcaggacgggtggggtgggcgagggtgcctcccctggagtgggtgaggggtgggcctctgacctggggacacggagggtcccgaggtgtccgtggagggctggcccttgggtggcagctaggagagtggccttgcgaggctccctgagtgatgaggtggttttctgtgcctgggcaagcgcctcccgcccacattgtccagggcacacgcatggcccgtggactccggctgggagcgggcgggctggcccccgctgggccctcttggcccaggctgtgatgctgcccgccaggctggtgagagctgctcactgtggctccaagcaggcctgcccagtggccggtgtcagtgtggggcatccctggacactgcctctcaggcccagaggtcctgagtgtggtctgcccggcctggagctcggagcccactgggaggcgatggagagatgggctctgaggctgcgcagccatagtgggaggtccacacttgttgggtctggggcctgggctttgtggcccgaggcccggtgactcctcagtgctgctgtgtctgcttctgcaggacgctgggcaggaccgggagcggctgacctacttcttcaacctgcctgaggcgctgactaccctcctggtgctgctgaccaccgccaacaatcccgacggtgcgggggcccgaggcagggcggcactggggggtgggcgggggcacagggctagagctgagcctggcactgggcgtgggggcccccgaagcctctttgtcaagagctggggattaaaggtggagcccctgcctcctctttgctggttttctctttcccctttttcgagtatccttctcagtcctactctccaccctcttcttcccttttctttctggtcttctttttctgttctttttccttttctgctcattttctgagtcctgagaagctagaggtggacacacttctttgtgttgatggaccgacctgggctcagcaggcccctgggctcagcgggcccctggtggcctcctcctctttgaggctcagccccaccatgtgtgaggccctggggtctctggtggctgtgacattgactgtgtcagggttgttgatggggccttggtctacttaggccgggtgtgtggccaggaggtgagggtgttgtggtccttgggctcagctgtggcctggccagcctggctggggtctttcgtcttgggctggggtggtcacccaccatagagaccctcccaagaggtcagccactggcttccataccgggtgagagctgtgcccgggaccctgagcactgcccctacatgtcctgtgagtcttccagtcactgagggagggctgggctttgtctgccgggagcactcacaggaatgtgtacaggatgagcgttccccgaaggtagtgagctccccgcccccacaggtgtgcgggcagaggtgtgaggggcagaatttgggcaagaaggccttccaggtccaccaacacagggccctcctttctgttgaaaagacagtggtttaagatgacgaaagggatcagctggacgctgggattatgagtgttttattttctctgatttctttcagtgatgactcctgtgtattccaggaaccgagcctatgccatcttcttcatagccttcaccctgatcggtgagtcggggcgggtctgcaggggtcacttggggcaaggttctgggtgtgttccccagccctgtgacctccctccacgtgacctctgtagttttcactctgtgtgaccaccagtgcctcagtgcctgctgggcaggccaggtggcgcccccatctgtacacgagggcctcgcgtccctgccctgctccctcagccagcttgctgctggcgggctggctgccgctcctgtccgcacggtcctcgctgaccgtgtggtcctgctgaccatggcctttcctctcccaagggagcttgtttctgatgaacctgatgacggccatcatctacaaccagttccggggctacctgatggtgagcggagctgccccccgcccggctgtgcctggagctgcccctggaggcctggcggggagctggccggcagggtggcccgggggctgtgtgggtgtggacgtgggtgggagggcggggcctgtggtggtctcggcccggcccccgcctccctgccgtgggtgacctccctctctgctccccgggggtgctggccccacagccacccctggccccttccctgccccacctcctctagggggaaaagcaagaagactaaagctcccggggcagtgaccacaccccccaccccccttgtaggtgggccaggggccccaagtccactgagaaggaatgtgtaccttagtgaatttcatagcggtggctgccggcagggcctggcccctgttgtctctgactgccccccaatgcccacagggtgaggggctgctccctgggctgtgagtgagccggggctgtctggggcgaggggcagggtggcctgggacagggctgggccaagcccctcagccccattccccttttcagatgtctctccagacctcactgttgcggagacggctggggacccgggctgcctacaaggtcctctcgtccgtgacagcagagggagaagcccaccccgagcggtgagaatgggggctcccacccctcccccgaggctgctctgggaggggtattcatgggggagcatttcccgagatccctgctggcagtgggtcacaaggctcctttggagtcaagcatccctgggcgggttccatggtcctggtgtccgagttaactcgtgtcctcatgacctgctcgagattccggtctggtgggggccacgcattctggcctgtccccctggtgccttcccacacccgagctgtgacttggggtccaggacgagaaaggcttgggacgcacgtccactctgccccccactccgtgacagcttggaggcagtgtcacagagcagctccggtccccaccgctcactggtcccggggcctgtgggtcgcacgctctagcatcctcagccgctcctctctaaggcaggaccacggggtctcgggattttggagacaggaagaccatcaagcgctccttcctggagaacttgtcactgcccgggttgcttggggcagcggtcagggcgcctgagggtgctgagttggctgggctcactgagggcatcttccccacagacttggggtgaagcctgaggatttcttgcaagtgctccggaaagtccagctggacagtgaccacaaacaggccatcacagaggtactggccccccttcccgccgccccacctgtgcctctgggctccctaggccatgtgggtgttatttcagactggcccggctggcccggtcctggtgggcctggggcggctcccttcctgcccgtggcctggctgcccagcacacccgtgcgttcctgctttgcagaagctgcattcccgtggcggcggcctgctgtcaactgacgagtttcagaaactctttgacgagtttgataagagggtgattaaagaggtaactgtggctggaccaggggcacctggggtcagcggggaattcctcgatgtctcttggcattgatcccggcgccggtactcaccttcccagggattctggcccctaggatgtttgtgggagcagagctggtgtggctcttggaaactggggagattttgtgacctcatggaattcccaggccacagggactgtcgtcctgacccagaggaacttcccagttttctccattcttcatggtagacttctcttctcacatgtcctaacccgagaggtgcctgagtttgtccggaaccttagtctgttgtccttgacactgatttttaaagttagcaggcgggcttcagcatccagcttaacactgtgtccacaagaccccggcctgcctgcattttatgtggcaggtgtgtgggaggcggcaggggaggaggtgcggtgacacagccgagctgttcccaggcagactgtggggccgcggagggggctgccgctccagccgctccagccgctccagccacctggccttgacagggctgagctgggcttgaatgcggattgaagaggtggagtcagtcgtctcctgttgatcggatccctcgcagctcagtgtcaccattgagccagtcagctcggctgctgtagcgagtattgcagcctggaggtacttaaataccagggcttactgtctctaggtctggaggctggagtcggaggtccaggcgtgggcgaggccggcatgtggacagaggcccaggtgtgggcggggcctgtgtgtggaccgaggctggaattggaggcccaggcgtgggcagggctggtgtgtggaccgaggctggaatcagaggcccaggcgtgggtgaggccggcatgtggacagaggcctaggtgtgggcggggcctgtgtgtggaccgaggctggaattggaggcccaggtgtgggcggggccggcatgtggacagaggcccaggtgtgggcggggcctgtgtgtggaccgaggctggaattggaggcccaggtgtgggcggggcctgtgtgtggaccgaggctggaatcagaggcccaggcgtgggcgaggccggcatgtggacagaggcccaggtgtgggcggggcctgtgtgtggaccgaggctggaattggaggcccaggtgtgggcggggccggcgtgtagacgccgtctgctccctgtgtcttcatgtgtgtttccctctgttgtgtgtctgtgtcatctccccttcttataaggtcagcagtcctacgggattaggaccaccctagtgacctcattttaacttagttggctcttgaaagacccagtttccaaatgcagtcacatttgaggtcctggggttaggctctcaaaatataaactttgggggatgcaccttagcccataagtgtcttctctaggtctgtggtcaacctccgtggcctcaggccccagtcagaggtggttttccctgagaacatgaggcctttctaggtcccccagaggcaagtcctgtttggcctggagctatgggtgctgtacccggggggccagcagcatcctcactgcaggacccatggggtacaggagatggttatagggacagacaggcgggcacttggtatgttaacatacacgatactgtctgtgtccaggtgacttgaaggagatagtaagtacgtgcaggttttataaaaaccatgatgatggttttcaaaggataataaatccggaaacacctttctagatgatggtcctggggcaggaggtttgctgggcccaggaggcagctcttggcagctgttgttttgatttgctgtgatccagcccttttctgggtgcagcctgacctgggtgagaaaatgttgggaaggtgggctcctttctcaaggttcgctgggccagccagaccctccctgggcacttgccagctggcctgtaggatgctgctgggtccaggtcgtccaagaccaactctccccttgtcttcagtcaggatctgatatcaaaaggaggtgggtggttgtggtggtggctgatgactggtcgcacgtgcaggccacgcccctcatctgaccacaccctcatctggccacgcccctcctctcaccacaccctccgccggcctcgcccctccacggaccacaccccctctctggccacacccctctctgaccacaccctccgctggccacgcctttcctactgtggttcacgagatgctcgctcttcccataggtcctagatctaaagtgcagaactatgatttgaggcgggagtttgggtcctagaagtctggggagctgcgatgtccttgtcgtggttttatgacgtcctccttccctcctagcgggcaggcaggtgcttcaaggattgttagcacgtgagggcttatcccaggtgccctgacaggctgtgagtttggaattgcttctgaagagaggcgctctaggtggctgacagcaggacatcatgggtcttcatgagagtcctccatgtgcggttgccttctgccatcacccaggccttggtccattgctcgtcagtccgtgccaattggctgcagagaaggtaccatgccagcttctgaaagcctgtttctcttttacttttgttggctgcatcatgcggcatgtgggatcttagttccctgaccagggattgaacccctgacccctgcagtagaagcccggagtcctaacaactggaccaccagggacgtccctgtttttgttgcttttgaggttaaaaacatagtaggcattcattatagacagtagaaagaaatagaaaaacccacctaactgtccaccttctaagaagtcatttcacagaaatcatttcaaggtctgttgttttcttaataatggtgtgatgaatgaattcattcttcttgtaatagtttaacataacggataatgctggagtctcttttggccaatgtatcagtctgggttcaggcaggagacagaaatcacgtagaaatttaacattgagaagtattagctgtgataagagagtccctgtaacatatggggaagctctgtggtccccgagggtggaggaagatgcctggggaagaacagacctgggcagggaccccttccccaaggccagggtctggacacctttggagaagttgtggtccagagtccagggggacagatgtttgctggtttacctgggctggagctggtctgtggtcactggtcaagcaggatgccaccgtctagggtgcagcaggcacttgccatgagcagagcgtgtggagtgcagagggaactgggcactggggccggctggcggcctctgggcaccagtacccatgtggaggacattcttacggggtcaggctgtgctgcaggtcaccaaggagccgtgcgtctgggtgtggggctggatcagagccccacaggtgtccttccccgacttgaggtgtggttattgtgaccgaggagccaagtgttcagtttgatcaagtttaaatttgaatccagtggtcacggccagtgagtagccgccccgtgcaatggtccatctcgtgctgcagtgactgctctgcgcctctgtcctggtgcacaggcaggggcctctctgtggggggagcaggttggcgtgggtctccgggggggggcaggttggcgtgggtctctggtgggggcagcagggtggcatgggagtgcagagtctcacagacatcttcatggtatatttgttgcccacctgccctcctctgatcaggctctactccagcctggtgacggtgtgtgagttgcctccgttctgtgctaagttttcatagttattagcaagtaatttatacgtacattttcacgtgacacttggcatacgtttaagacaacttcatgcttgtccatctcgggccgcttgcagcatcagtgcccttctgggttatttccctgcctcttggtgttagacgactgtggcgatcatctctgtgcataaaaatgacgccgtttgagaggctttcctgaggctggagagtctgggtggcaggcaaggcgggaagactgagtcccaggagaagggggttgggcgtctcggtcccccgtggccgaggccggctccatcgtgtttctgtttctgagtgtgcgtgtccccccagcacccgccgcggcccgagtaccggtctccgtttctgcggaccacccagttcctcttcggccaccactactttgactacctgggcaacctcatggccctcggcaacctcgtgaccatctgcgtgagtgtgggtttgccctggcgtcgctgcccgccggctctctcactggcccccgggctgagccgccgaccgctttggcttcgcaggtgttcctggtgttggacgcgcacgtgctgcccaaggaccgtgacgactttgtgctaggggtgagctctgcagccacggggctgtcatccagggtgatagggcgtgagggggcagagcacacagcctccccacctcgggccccggtccctgggaggcagggccatcctggtgcttcacagcggagtctgtggagtagggagacgtagggcgtggggttggaggccctgtctgatggccgggggagcctggattgggggtacaggtgtgccagttgtggttgaagccgtgcctggggtacaggtccccctaggagaggatgtggagcaagaagggggtgctgagatgcccatgtctgggggtagggggctcgggaagagcctcccagaagggtgtgagcagcgccaaagaagtgggaggggagggtcacgcggctccagcgtgggagggcgtgtctgtgcgccacgggttgcaccatgtgcagcaggccgggacccacggggccctgtggacaggcacatggatctcatcggccccactgtgggtggggacgtgggggaggtcggggagccgggcgggacccacggggccctgtggacagaggcgcatggatctcatcggccccactgtgggtgggggaagttggggaggttggggagccgggcaggacccacggggccctgtggatagagacacacccggggccctgtggatagagacacatggatctcatcggccccactgtgggtggggacgtgggggaggtcggggacggggccctgtggacaggtgcatggatctcattggccccactgtgggtggggatgtgggggaggtcggggagccgggcgggacccacgggtggtgccggcactgaacgctgggcgcgcttctccctttcagattctcaactgcatcttcatcctgtactacctgctggaggtgctgctcaaggcgttctctctgggcctgcagggctacctgtcctactccagcaacgtgttcgacgggctcctcaccatcgtcctgctggtaaagtctgagacagctgaggcgcggcctctcgggtgggcggtgtgcactcagcctgtgcacagggtctctcagctgcccctggacctcagggggccgtagggcctgggcctcccgcctccggtgacaaaggggctggctctcccgggtttggctgcctggcggggggctacaggaggctcatttccgctgcctctgtgggtcgttggggctggggcagggtgagggcaggctgcctctcctgacaccccagggacacctgcaaggaacctgcagaccccgccagccggcccagccccgccaaggacagtggagcctcggcgtgctgagggacgggcaaggtctcaagcactgggggtcttgggaagtgtttccccggatcctgggggagtgaggggttctcctggtgtgcacatcacagcagcaatattagtgcaatatgtattcgagtttgatggatcagagccgtgggccctcggcagcagcagggaggcagctgagaggagggccttccggtccatccttgactgcagtttctcccgagcccggaactccgaggccctgtcccagccctgccctccgcacgtgcagccccactcctgaggccagggcatcctcagcagcaggaccagcggagggggcaggaccggctgtggtttctccccagatccccttggggcccgcgtgttagagccaccggtaggcctgccgtagcgagccttcttctcttttgtgattaaaggttttggagatctccactctggctgtgtacggcttcccacaccggggctggtatgtgtcacggagaacccggggaggcctggctagcgccccagggaagggtgtgcgtcctgcctccagccactggtgcaggtggctctagggccgaaggcctgactcgcaggcgagtggccacagctcctgccccgccatggcctgtggggtcagacgccttctccgctcttggggactttgcgttaaaggccttgtggccgcctgcaggatgatcgtgttcccagagctggggtgggaggctctggaggtgcccctgcgatggggcctggggcccaggtgtgccgggggccggaagcagggaggcccccgccatcacttcccactctgggtgtcagttcacctccctgtagacgtcagggtggctcagggcttgctgaactcacgctgcccccagttctggccacacgtttggccaggggtcccagggtgccttgcggcgtggcgtgtggcagccttgggggtcttgctgcccaaagcacagctgccctggtgaacttgcgtgctgacctcgcgccctcagggggcctcttggtccgtcggctgggctgccttcgtcatagtggcgtgcttctgagtcatctgacgaggatgggctggatgagtcctgccccttggggtctcggcaggggtctgtgtcgagggggacggaggcgggagcagtgaagcctcgaggccgcctggcggctgtgaggccagctctccgtgtttcttacgcgcactgaaaacccacagggtgcttctggtgggaggcggtgaggggtgtgtcctgggtgagaatgggtaaaatttaaatagaaatgagagcacagtaaggcccatgagggacacccaggggacggggtcagaggataggagacggatctggagccgtgtctctgccagctctgctggggccggagctgggcgtctggagccccagggctctcccgtcacattgccctgcaccacgtggggggctgagccccaggaggtgttgccacgagcgccctgggccgcgggctcaggctctgccctctcgtctcggcggagcttttccggtcgatggcgcctgtggggcgacttgctggcacccctggtggctctctctgcgtctctgtctctggaccgcgcatctcctcgccagctaagccgtctccgcgtgtctctgcaggaagccggcgatgctgggcctgctgtcgctgtgggacatgacgcggctggtgaatgtgctcatcgtcttccgcttcctacgcatcatccccagcatgaaggtccgccggcgcctgccgggccacgctctgggggtgggcgtgcctgccgggcaggggctggggctgcgcaccgtccccccaagtacctggggtccctctgcctgcgccccagccttgcgtccaggctgggccatgctggaggcggttgggagcataagggcgtctggcccagacagcaggggggtgtcggtgggacccttgggaggtcacatgctcctcggggtccctggcctttggggggggccggtgtgcccccaggcatcctgagcttctgaatggccttggcacgggctgccggtggctagtggtgccccctccaaggacccccagtgcaggagtggagtggcttgagacagtctctgagccccggtttctcataatgttcccgccaggagtagccccaactttgcggtggggggacagtccgggcgggggtgtctctcccatctgctttcccgagcacttctcaggagaaaagaacccgaggacacctgccccctttctgagtgtccaggtccttcccctgtgtgcgtcctgccaagctgtgcacctggcctggccaggggtgacccgttgtcacccagtggtatttcccatctgaaggggttcctgggtgcagaggactgtggccctgagccctccatccatacacacacctgtgtgaccctacacgggcactgcacacaggcacgtgatcacacacacccagagcacacacaaaatcatacacatgtacatgtaatcacaccctcatataatcacacacgtcatctcacacacacgcatgcacacaccaacagatgcatttgcatgtaactgcacaattacacatgcgtgtaaccacacacatacacataatcgtgcagtcgggcacaaaataagcacaagtgtgtgtatacacacgtgtgtgtgctcacacatatacacggtcatctacacacatgtacacacgtgcatgtacacatgtgcgtataatcacgtgtgtccacacgtacagcagagttccctgcctgctagcgtccggtgctgtttctcctgacttatcaagtggggaaactggctgcttggaaagctggtctctggagcttagattcacgtgaattggggtccctggctgggtctctgaggccccacacctcaaaacccgtcacccagggctgactggccatctccaggtcagcctttctcgagcctccagatcagctttcgtgggccggtgggcagtgtgggccaaggccctgcacatcgtggcttcaccagcagtcttgggaggtgtctgcacgtataggggtttgtgtgtgggggtgggcaggtgtgtatagttgtgagagtgtgagggttggtgtgggtgtatgtacaggtgaggcaggtgtgtgtgtgtgtacaagtgaggtgtgtgtgtgcaggtgaggtgggtgtgcatgtgtgtacaggtggtgtgggtgcatgtacaggtgatgtgtggatgtgtgcaggtgtttgtgggtgtgcaagtgtgtgtacagatggtgtgtgtgcaggtgtttgtgtgtctacaggtgtttgtgtgcaggtgtgtgtagaggtgaagcgtgtaggtgcatgtacaggtggtgtgtgggtgtgcatgtgtgcaggtgtgtgtacaagtgaggcaggtcacccgttctcttgccgtctcagctgatgtccctggtggccagcaccatcctggacctgatcaagaacatgcgggccttcggcgggatcctggtggtgagtctggctgcccgtgttggcctctcgggggaacaaggccaggccactgggtgggcagctggagctccgtggaaagtggcggccttcagaaggaaggtccctgcattcgggtggcagcgggtgactgaggcctggggaacccagggcagggcaggacactggagagaggagctggggtggtctggtggaaggcacggcccaaccataccgccttcccaggccagagagcctcttggtcacttccgaatccctcgtgtgtcctaggccctgggccacactgagaagatgaaaaacagaggtaccagggacccccccgggacccacagaggccccagagtggtcagccatccttgcttgaggatcagccgcttttgctgagagagtctcgatgtaccctaccctgggccaggcaccccctggagccaggtcttgagcagggggcccggctaacgctctagtcacgaggcctggcagtaaggagagagggtgaagaaaccctgctgttgtggacaccagggggctccgtggtgcctggggctgtcatgcgatgctcaggggacctgcttcaggcactgcccacaggccccagtctgcctcgtggaggaaacaggtccagagaggggctgggttagcctgggggtgcgccttgtcctccgccccccagacacattagcgacgggtcaggggcggctggcagccccttctctgactgtggcacacagctgcccaggggtgtgtctcagacgcctgctgttgagcgtggggagggcagtaggcttctcccagagggacgtggccgctcctggccctcttcccgggatgccttctgcagcccccgctgcccagttctccatggggcccgcctcctgctgcacctgccctggaggagggctcagttctcccccagttgtccccccaggctcccgtgtatccccagggcttccctctgggacaggttggtggccaggaggggtgcctgggagcagagtccccatgtccccggggagaaacccctgctggcacgcggaccccagcaggccccgcctggctgtgtggggccccgcctggctgtgtggggccccgcctggctgtgtgggcccccgcaggcgtgcgacgccgacggcccgcttgcctccccaggtgatctactacgtcttcgccatcattggcatcagcctgttccggggcgtcgtcgtggctcctagaaacagcaggtgagctgggtcctgggggtgtagggggagcgtctccggggacgctggagccagggtgaggcctcggaggtggtgtggggttggttccccaggagggacctcctgggtcccctttcttccttggcctccctgctcttctcccccacccccactctagcagccctctctagaatctgcactgagggtgacccctgaccccggagcccaggctgcttgctgcaaaagggatgtccccccacccacatctgcccatgtgtccacagcactggcctcactgccctcggcacctcctcggttggggggcacgtcctttttgtccccctttctcaagggcccgctaggtctatgcagagcaggggctgagccggggctgggcacgcaggcgtgtgtcccaccgtggcccccacgccgaccgggttgtgccctgccacccctccctgcagccgagcctctgttaacggttccgcgccctgcgggagctttgagcagctggagtactggcccaacaacttcgatgactttgcggtgagtcctgcgcccccgcccctcggtaccccacccgccgcccctgctccccacggcctcctggaaaccccgtccgctccctgcaggccgccttggtcactctgtgggacgtgatgattgtgaacaactggcaggtgttcctggacgccttccggcgctacgcgggcccgtgagtgacctggcctggccgccccgaccgcggctctgcgcggggtgtgcgtctgggtctaacctggggtcgcagggcatgtggggcagcaggtggcttctgggggggcctgtgacctggggtgaaggggctcagcccagagcctggagagctcagacggcccccgcgctgggccaggtctgagctccagccccgctcttcctggccggctgcccctaaaggccaggctgggccagcctgggggttcgggcagaaacagtgacatggagcagggagcggcgggtccagaagagggctgcgctggactcacgggcgcccccggcctccccctcattctccacaggtggtcagaggtgtatttcgtgctgtggtggctggtgtcgtcggtcatctgggtcaacctgtttctggctctgattttggaggtagtggacacccctggcccagactcttctcagttggagtttctaacttgatgagctggggttcacctggaacttggtcgaagagcttgtgctgggttcccatggctctggggtgccgctctgccctcccttggggcagctcatcctgaaggctcctgacctttgacctgtggggtggggctggaggagggccctcagggaaccgctcctgtagctgccgggggtcttgtcgggcctcgggtccctgtatccagggggagcttctcagccaggccggcacaggaggggttcatgcagggcccgggcctacccgccacccatccctccgtcccttctgccagaacttccttcacaagtgggaccgccgcagccacctgcagtccctcacggaggagctggaggacacctctgagatgaccgaggagctcccgttcaggtgcgtgagggcgggcatggggcgggaggcggggtgagagggagggtggggcctggggcaggaggcggggcgagagggtgggtggggcaaggagggcggggcgagagggagggcggggcgtggggggccagagtctgggctgagagggggtggggcaggaccaggaggtggggcgaaaggacggggtggacggggtgtaggacgagaagcggggttgacaaggagggcggggcgggaggcggggctgagagggcaggggcggggcctgggccggaaggcggggccaagagggagggtggggcgggaggcggggtgtggggctagaggcggggccgagagcgagggaggcggtgggcaggtgctccccttgggacctcctcctgccgtggagctgagttcctctcgccatgagcgtatgtagggaagcctcctcaggtgccgttagcctccaggtgaccctgttggtgggtgagatgaaacctcggctcgtctttcccctggtaacctggagcgtgttcctttggtggctcagcgaggcgacggccgcaccaccctctgtgaacgtctgtgtgtgtcgcaaccgcacagagtgggcttctcccggcctttgagggacaccccgtaaacatcccagaggtggacccgagccccctgccggtggttccgcgcagctcctggtcccgagaagccctgacgaggcctctccgtcgcccctgcacacctgctcccctgcaggcgcccggggcgtcccgtccatcgtttcccctgttccgcagggacgtcctggaggagcccacggaggaggagctggtggacaagctgagccgccacccgcacctgcagctgtgcaggtgacgtccggacgccttcccggctgcggcggccggcggccaggcagcctcgggaggctctcaggcccgggaggaggcggccgcggcccagaggaggggccttccccttgggcagacccgctgcgcggactgaggctggacaggtgcaggccctgattcgcagccgagcaggaccgctccacagcccctcgggcgctgttcgagccactctcctttataagctgcttccgagggattttcttttctaaatacagcgggtgactctacagggaccactgacgtgtgaaaggagacgcagcggcctttgcctcacgccctgccgtttccgtggtgcctttgctgctggtggccttcagggaccaggggcccgtgcaaggcccacattggccgactggcagctttccagggcatgaagcttgagatcctggttttacacaggaagctggactgttgttttactgttttacggcctgtgtgagtgtgatcgagtgtgtttctgggtga

SEQ ID NO: 200 - DNA, 113430 bp, Hippotragus leucophaeus
  source 1..113430: mol_type = genomic DNA
tccataacatattttggagcaagaatgtaaaatataaggggaatgttatgttttcttaagataattggaatgtatttatcaagctcaaaggagttaattagtgtaaatttgttgctattttattaaaatcaaaggtgataataaaagaaacaagtcattccacaatcaagaggaaaagaatcacaatagttcccatattttacaagagcactttcattcagatacaactagcagttacttagtatgaaatggcatcctttccatggaaatatgagcttgagaagaactcttcagggaatgatcaaaatccagcaaagcaaacacaggtggcttctacctgagtaggaggaggggtacattttatattgataacagttctgataagggtctccagagacacatgccaagcatttccactgggacatcccctggggactttaacatcatttaagttatagtgaggtcaggtttttttgccccaactctattgcctaaacctttcataaatggctctgatacaacacgttgtggtaatcctctttttccatgagcaggggctgcttttcttctggaagctggtttctctttcgacgacataataggctagtaagccctcccagcacagcagtaaggacagacccaatcacagctgccccagtgagccacggccagattcgacgtgcttgttctaagtagggcttaatgtaatcttgaaaaatgtccggttctgaaatagaaagacatcccaatgtttttactatcatcatcatcaccatcatacttgctccatactttggagtcagaggcttaagtctgaatgccagctttgctacttactagctataagagcttgggaaagttacacctaataccccaaggcttgagtgtcttcaacaggaaaataggaaaacaataccaccttgtttggatgtttcaaacttcatagatagtatctgacctgtaaattgtatagtgactgctccctgccagctactctaactcctctagctatttattgttatttgactccatatttctaaataataagcaaatactactatctcttaatttctcaagtttatctctggagtttgtcatgcataagcaataattttagctctctcacaacttcctttttctccatcttttcaatataataacatcatgatttggggccaaatccacatctaggactttcattatttatactatttcaatttgattcacaattgaacctaatagtattctatgattacattatgattacattttctttctcacatcattttcctcttggagttaatgatttattttatatatatatatatatatatatatatatatatatatatatatagctaagttgcttcagtcatgtctgactctgtgcaaccccatagacggcagcccaccaggcttcgctgtccctgggattctcaaggcaagaacactggagtgggttgccatttcctcctccaatgcatgaaagtgaaaagtgagagggaaatcactcagtcgtatccaactcttagcgaccccatggactgtaacccaccaggctcctccatcgatgggattttccaggcaagagtatatatatatatatatttgcttgattttaaaggaaccatcactatttataagacactctaaaatgtctgtttcgtgatacaaaggaaagaagagagtgtatcttgggctgactttgtaaaaaaatatgactttatgtgactcaagtcttaagcaaaagtaattcatgtaactttggggtggttcccttaaaaagaaaaagaatgccttctctttttccctcttctccttccaactaatgcaaatagcatgttggtgagccagtgcaggccatgcgatcaagggtacaccctaggtcttatagaactacaggaaagcagcagctctggtccctgaaattatggagcatgtatttgactatataccaagactgctatttgagcaataaataaactaacttatctaggccatggatatttgagcctactatatctgctccccaaccttaccttcccactgatgtgggaactgtaacagcttttttttttataacctattttgttggctacaattgattagttctgagtgaacctctgactcaagatgggccaatcagaattggccattactcagaattcattgtgcagaattgagtccagtgactcaggagccagtaacagtcttagtgctagagaaggggtggggaggggaaaatgagtaagggaaagagagagaagaagacgaatctttagactgcttgtttcctggttgctactgttcctcagtctcagctgcatttttgtcttttttacatttctagtgtttattccttccttgggttttgtaaaccaataaattatctttttatgtaatcttgtttctgtggaatttctgacatttgcacttcaaaaagtcctaattatttttaaaggttaattagattcctgcaataataaaagatggagtaagtaccttaagatactctgaaattacagttacatgagagctacgttatcataaaaaattacatcaaccaaataaaaataaaatgagtatttttttatataaaataactaggaaagaatgggtagcaacgtgttgtgaatgtaaaatgagattctcaatgttcaccataaactcaagaactcagaacaattaaaacaagagaatttgttaaaaattaattttatattatatttcagtcttcattcaaaggagaaaagagtggcatttccctgacttaagtgggactacagagctctcagaccctgtctgtttcccctgttactttctgagttcctgtccttcacactgccttttgccagctgtcactaagatacttctaacattcttaggctccattaagcataatttgaaaaatatagccaattactgtttctcttcttcatgaaggggcaataagctgcaaagaattaacattataaaataaataataataacaaaatttataactttggattaatattaatttaaatcaaagaaataaaagctaacagaactaaaataaattttaaaatgtgaaaaatattttcatcaagcataaaagttagttttaatacatttaaaaatcatattgaaaatgagactacaaatgtttagcttgcattgctattaatcacttcaatatatcatgcattttgactgtgacaaaaggcagatacatagaggttacataataataatgattttctttattgcttgctgctcagctcaaatgctttcaaaattttaagatactatttctttatctgtctttctgctttccagcttattttattatttctctattctggttcatttcaagcacttttaaattttactgtcaccagtggactatcttctttgaaacaacctgtatttcttaatggcttcaatctaaacttttgacttttccttctcagttatttgtttttcagcctcaatagtgctcctttgaattatttcttaatataaaaagttttctattatttttacctacttaaaatttcatttttcttgttacctattctctatagaataatcatacagttttctatttgtttggtgctctgtcttttccaaagcatattcacatgcccacttatctatacaagaaatgcatgaggtagttaggactcattatgctaatttaatgaattccaaatctgcaacttagaaaatttgctgtaatatttaaactcttcaatgcatgtgtaaccttaggtatgatgcctttcacagcaaaagtaatttatacctcttatttattattcttattctatactgttcatggggttatcaaggcaagaatactgaagtggttcgccattcccttctcctgtggaccacattctgtcagacctctccaccatgacctggccatcttgggtggccctgcatgacatggcttagtttcattgagttatacagggctgtggtccatgtgatcagattggctagtattctgtgactgtggtgatgaaaaggcaaaaagttaggacattgaaagatgaactccccaggtcagtaggtgccctatatgctactggagatcagtggaggaataactccagaaagaatgaagggatgcagccaaagcaaaaatacctagctgtggatgtgactgatgatagaagcaaggtctgatgctataaagaacaatattgcataggaacctagaatgttaggaccatgaatcaaggcaaattggaagtggtcaaacaagagatggcaagagtgaacttcgacattctaggaatcagcgaactaaaatggactggaatgggtgaatttaactcagatgaccattatatctactactgtgagcaggaatcccttggaagaagtggagtcatagtcaacaaaagagtccgaaatgcagtacttggatgcaatctcaaaaacgacagaatgatctctgttcatttccaaggcaagccattcaatatcatgttaattcaagccatgccccaaccagtaacactgaagaagctgaagttgaacagttctgtgaagacctacaagaccttctagaattaatgcacaaaaaagatgtccttttcattatagaggactggaatgcaaaagtaggaagtcaagaaacgcctgaagtaacaggcaaatttggccttggagtacataatgaagcagggcaaaggctaatagagttttgccaagagaacgcactggtcatagcaaataccctcttccaacaacacaagacaagactctaaacagggacatcaccagatggccaacactgaaatcagattgattatattctttgcagcaaaagatggagaagctctatcagtcagcaaaaacaagacttctgactgtgactcatgaacatcttattgccaaattcagacttaaattgaagaaagtggggaaaaccactagaccattcaggtatgacctaaatcaaatccgttatgattatacactggaagtgagaagtagatttaaggaactagatctgatagagtgcctgctgaactatggatggaggtttgtgacattgtacaggagacagggatcaagacaatccccaagaaaaagaaattgaagaaagcaaaatggctgttggagtaggccttacaaatagctgtgaaaagaaaagtgaaaagcaaaggagaaaaggaaagacatatccatctgaaagcagagttacagagaatagcaaggagagataagaaagccttcttcagtgatcaatgcaaagaaacagaggaaaacaatagaatgggaaagactagagatttcttcaagaaaattagggataccaagggaatatttcatgcaaagatgggctcaataaaggacaaaaatggtatggacctaacagaagcagaagatatttagaaaaggtgacaagaatacacagaagaactgtataaaaaaaagatcttaagatcttcatgacccagataatcacgttggtgtgctcactcacctagagtcagacatcctggaatgtgaagtcaagtgggccttaagaagcatcactatgaacaaagcaagtggaggtgagggaattccagttgagctctttcaaatcctaaaagatgatcctgtggaagtgctgcactcaatatgtcagcaaatttggaaaactcagcagtgcccacaggactggaaaaggtcagttttcattccaaatccaaagaaaggcaataccaaagaatgctcaaactaccacacagttgcactcatctcacacgctagtaaagtaatgtttaaagttctccaggccagacttcaaaaatccgtgaatttccagatgttaaagctggttttagaaaaggcagaggaaccagagatcaaattgccaacatctgctggatcatggaaaaagcaagagagttccagaaaaacatctatttctgctttattgactatgccaaagcctttgactgtgtgaatcacaataaactgtgtaaaattctgaaagagatgggaataccagaggaataccagacctcctgacttgcctcttgagaaacctgtatgcaggtcaggaagcaacagttagaactgggcatggaaaatcagactggttccaaataggaaaaggagtacgtcaaggctgtatactgtcattatgcttatttaatttatatgcagaatacatcatgagaatcactgggctggatgaagcacaagctggaatgaagattgctgggagaaataccaataacctcagatatgcaagtgacaccacccttatggcagaaagtgacgaactaaagagcatctcaatgaaagtgaaagaggagagtgaaaaaattgggcttaaagctcaacactcagaaaactaagatcatggcctccagtgccatcacttcatggcaaatagatggtgaagcagtggagatagtgactgactttatttttggggctccaaaatcactgcagatggtgactgcagccatgaaattaaaagacacttactccttgaaagaaaagttatgaccaacctagacagcagaagcattactttgtcagcaaaggtccatagtaaaggctatggtttttccagtagtcatatatggatgtgagagttggactataaagaaagctgagtgccaaagaattgatgcttttgtactgtggtgttggagaagactcttgagagtcccttggtctgcaagtagatccaaccaatctatcctaaaggagatcagtcctgggtgttcactggaaggactgatgttgaagccaaaactccaatactttggccacctgatgtgaaaagctgactcatctgaaaagaccctgatgctgggaaagtctgagggcaggaggagaaggggacgacagaggatgcgatttttggatggcatcaccgactcaatggacatgagtttgggtaaactccaggagttggtgatggacaaggaggcctgcatgctgcggttcattgggtcacaaagagtcagacacgactgagtgactgaactgaaccgaactgaattcttattccaaagtagttccatcaatatttcaaatgaatcagcttgcaataaaagtttatctttttcaaacttgttttggtcactgattttgttcaattttctcttctggattcccagattctttccttctgtgctcctgtgtgacacttggcacaattacctatgtgttatagttagttatatatatgtcttacttttcaaacttgatcacaaactcttgatagcaagtagtgtatctttatctttcattcttctattcatttatttattcatttactgagacacaatatatgccacgtggttgttcacacatgtgaaaggatcagagcccctagcctgaaggaaacaacaactggaagaggagactgacaagtaaacaatttattttaagaacaatgctgttctagtgaaagtgtgtaaaagatataatgggatgatagggaaaagacctcctctatctgtctggggagtcagagaatgcatcccaggagactatccctctgagtagaaaaatgaattaggacttgaaagtagaatgctgatagcaagccatccctggcagaaggaacaggatacacctttgcatacacacaggcaaatgtaagtgaacaaatccatgaacaacagagccctcatcaaatcctatgtgcagaatgaaatattccaattactatgcatgtctcctcctctcatttttaaaaataatttattcattttaattagaggttaattactttacaatattgtggtggtttttgtcatacattgacatgaatcagccatgggtgtatatgtgtttcccatcctgaacccccctcccacctccctccccatcccatcccttagggttgtcccagtacactggttttgagtgccctgtttcatgcattgaacttggactgatgatctatttcacatatggtaatatacatgtttcaatgctattctctcaagtcatcctactttggccttctcccacagagtccaaaaaaatgtgtctctattgctgtctcacatattgggttatcagtaccatctttctaaattccatatatatgcatttatatattgtattagtgtttttctttctgacttacttcactctgtataataggctcaagtttcatccaccttattagcactgattcaaatgtgttcttctggcgtgctgcgattcatggggtcgcaaagagtcggacacgactgagcgactgaactgaactgaactgaatattccattgtgtatatgtaccacagctttcttatccattcatctgacaatggacatctaggtttgtccatgtcctagctattgcaaacagtgcaataaaacaatcccattcaccattgtgatgaaatgaataaaatccttaggaataaaaagtgacagtgaagttgctcagtcgtgtcccactctttgcgacccccatggactgtagcctaccaggtttctccatccatgggattttccaggcaagagtactggagtgggttgccatttccttctccaggagatcttcccaacccagggattgaactctggtctcctgcattgtaggcagacgctttaccagcttaataaatctacctaaaaaaaaaacaaaagaccaatatatagaaaactataaaacactaatgaaagaaatcaaagatgacacaaatagatggagaaatataccatgttcatggatcagaagaatcaatatagtgaaaatgagtatactacccaaagcaatctatagattcaatgtaatccctatcaagctaccaatggtatttttcacagaactagaacaaataatttcacaatttgtatggaaatacaaaaaaatctcaaatagccaaagtatcttgagaaagaaaaatggaacttgaggaatcaacctgcctgacttcagactatatcacaaagctacagtcatcaagtatggatgtgagagttggactgtgaagaaagttgagtgccaaagaactgatgcttttgaaccgtggtgctggagaagactcttgagagtccaagggactctctctgcaaggagatccaaacagtccatcctaaaggagattagtcctgggtgttcataggaaggactgatgctgaagctgaaactccaatactttggccacctcatgtgaaaagttgattcattggaaaagaccctgatgctgggagggattgggggcaggaagagaaggggacgacataggatgagatggctggatggcatcaccgactcgatgcacatgagtttggaggaactccgggagttggcgatggatagggaggcctggcgtgctgcgattcatggggtcacaaagagtcggacatgactgagtgattgaactgattgactgacagtcatcaagacagtatggtactggcacaaagacagaaatatacatcaatggaacaaaatagaaatcccagagataaatccatgcacctatggacaccttatttttgaaaaaagaagcaaaaatatacaatggagaaaagacaatctctttaacaagtggtgctggggaaactggacaaccacctgtaaaagaatgtaactagaacacttttaacaccatacacaaaaataaattcaaaatgggttaaagatctaaatgtaagaccagaaactataaaactcctagaccagaaactataaaactcctataaatcataagcaaaacactctctgacataaatcacagcaagatcctctatgacccgtctctcagagtaatggaaataaaagccaaaataaacaaatgagacctaattaaacttaaaagcttttgtacaacgaaggaaactataagccaggtgaaaaaacagccttcagaatgggagaatataataacaaacaaggcaactgatgaagaattaatctctaaaatacacaagcagctcatgtagctcaataccagaaaaataaactacccaatcaaaaaacgggccaaagaactaaacagacacttctccaaagaagacatacagatggctaacaaacacgcaaaaagatgctcaacatctcccattatcagagaaaggcaaatcaaaaccacaatgaggtaccatctcatgccagtcagaatggctgctatcaaaacgtctacaaacaataaatggtggagagggtgtggagaaaagagaaccctctaacactgttggtggcactgcaaagtagtccagccactacagagaacagtgtggagattccttaaaaaaactggaaatagaactgccatatgacccagcaatcccactgctgggcatacataccgaggaaaccagaattgaaagtgacacgcgcattctcctctcattgttaaaatcaaatatcaagtcttttggaatatatttagaagaaggaagctcttaacaaagtagcaccatatagaaagcaggagtacatttgccaacagtattcaacccattttggtttcatcttttaaccagttatgcatgtgacaaaatgacctgctactcaattttctaaatgatcaataatgaactgcctgaactaaattatattgaaaaattttaagacatttttagtaaggtggttaaagtttagcaatgaatagagataaaatttaaactccttgaaagtactattggagcaatagactaattcataaaatggaaaataggcaactgtttttgtttattttaaagcaaaacttctctaaaacttgtgcaaattcacagctgtatggaaatactctaaatacataaaacatttaaaatcaattttattttaaaaaatctaactataaataataaataccattaatcccttaaagtgatactcttttcccttttcttttccaatactttttgttgcctttttggtaaaaagtacccatttggacattagggaaggaacaatgaggtggagcctggttggctgcagtccacggggttgcaaagagttgaacatagctgagcatgaacacatgcctgcatacaatggggtggaccatgaaagtcactaccacattgtgatcgtaaaggactgtaaagactggacgtttatatgctgatgtctcccacatcagtatctgcaggccacaacctcttctgaggttcaaggccatctagctacctcagagatatctttactctgatgtgccattcaccccatttcaccatgtaactgacactaccttgagattctctccaagtctggccctgctcctattgttactgccttaatgaagtcaatcaccatttatcataggccagaaagcttaaagtcatctctaatatttccttctttctcacctattacataaatcattttccaagttccataaattttgctttcaaaataacttcaaattcttttgtcctttctaattcgcctcctatcaccgctgctgcaattcaaatttccttcagctctcccctggatacttgtaatagcattttcatcagcctccctgaatgtgctttgcaactgccataaaacttcctacaagctgcagcaaacataatcttatgaaaactcaaatttcaccctgatttgtttaaaattcactaatgaatctgttatcctagcaatatggcccaaattcataatcaagactcccttttcaactaatgaattcctcctgtcatggatattctctgaaatgtcactttattgactcctagagataggcacatctctaaataaatgagtcattaggtaagtagtggtttaaggtctttttctttcattaggaagagactatgttgtttgccaccatatctgtagtgtctcaaagaatgccttgtacaagacagttactaaacatatgtatgtaaaaggaatgaataaaccaataaaatcacctaaaaaatacctagagcaatagacggcttgaaatacatttaaaatgtctaaaaatgagctgagtattaagaggtgtgattttttttttttagcaagctttatttatgtgtattgtactatacataagaaagtgttaggccctcagtcgtgtccatctctgtgaccccattaactgcagcccaccaggctcttgtgtccatgggatttcccaggcaagaatactggagtgggttaagtatactttatttgtgtgtaattacatgtaaggcatacttacatgcatttattcttcatgataaatatcacttgtgttcaatttaattcattgattttaccctataccagatattctttggtatttagattagagaagcttggaagatatcaattctgattttgtagggcttacagccaaggtaggaagaaaggaagtgacatcactcaattctgccttactctttgcgatcctatggactgtggcccaacaggctcttctgtccatgggattttccaggcaagaatactggagtgggttgccatttccttctacaacagccaaggtggagaggggaacaaatcacatgtagaaaaactagcatgcagttctaacaaaggagtgattaaacatgactatatgtctatatgtatatgtatatataattattccatatttgagagtttgacaaatagatgaagaggatcagaatttagttagagagaatagtgtgatcaaaagcatgagcccatgaaagagtctattatgttctggaaatggaaatcataacatcctgatggtgaatctttgaaaaattgttatcaacatgttcctttctttacacactctgggtgtttctagaaggaagggaaaacatgtcactggagatgacccttctttttgactcacaggaatttaccccccttatcacttctctacccttatcacatctttaccctgttcacagtgatcttaaggtttcaaagaactgatttcttccacgagccattttagtcctccttccattggctatgatcttcagataaaacagaacaggtcaatcaaacccatatctgtccaactaatggctccccaaagggcaagagaatattgataaaatacagattctcctgttgaccttaaggtgtggttctgctatgccacatactagctagatggcctgggacaagttattcatatgctttatgcctctattttctcatctatgatctggaaaaagaaataatagtatcttcataaggatagttatgaaggttaaagcaaataatgcatacagcatgtctagaagagttcatgacacctaaaaagattcataatgtgtgggctactatgaagtgactcagtttatctcatctgtgtaagtttccattgctcatgcttctcaaattggacaatttagcattccagaaatgcataatacactttatacctctattttgttattcttttagtttagaatattccctactcttttccatctgctacctgcccactctcccttcacggcctctgaactattctgaagtcattgtttcctcctctgtgctctcgtagcattatgtttatgactcctttactgcacttaacacagcctgatgtttcatagtttctttgccagtggcttgacttgtacaccatttagagctccttgaggctagaggtatgtcattaatgtatgtgtcactaaggtgtaataaaaggtaggaagttgataaatgtcatttatctgttcctttaattttactaatatattcactttttcttgaattatccatgaatataatgaaacatcagtgcttgttgaatacctcttatccacaagctctgtgttgttttattgcttttgaccatcttctgttaagtggaaaggaccctgtagaattgaaatctggctcttacgtatgctggtatttgatactgggaaggtcactgagattgttttagcatcaatgtcctcacctcattctagggataataatacttacttaatatattctgactaacaatgcatgtagagtatggagtagactctcagattgtgggggaacattgctatctgttcctcatttatcaagaaaatatacacatacttaaactaaggaagattatttaaagcctaggtatagttccaatcctaggcttttataacactaccttaatcatagtcatagcgattattattattatatctattagcattattattaataggatttaatatcaaaatgttcacaagttttcttgataaccctagcaggaatttcccaaagacgattctaaaactggtagatatttttcttgtgcagactgcactaggttcttaatgcccttaattatcacaatatctctttgaggtattattcccaatatcttaggttaagaagctgaaattcagggaatggaagtcagaattcccaaggtcacaccaaagtctgtttaaagcatcaggtctcacactcactgttttctgattttaattcttgtgctcttcccaggttgccacacacagaatgccttatattaagcacagtggataagagcttaaagattcttgcagcttgggccatgtaataataaattagtgatgaactaaggattataatgcactttccaagttaaagcattgggggataacactttaaaatcataaggttttgcacactctcaaaaaatattggtcacatcagactgagcaattcatatgaaagaaactgagctttacctgaatcttgtaggtagctatagtcatagcctagatctttggatgaaataaagaaatcaccgtttctgtagagagggatgaaaggaaccatgtaggattcccggttgtgcccaatgggtgcattagcttctggataaacatcttgaagaggatgatactttcgaagccactgttcaaaaatactgcagaggaaaggattattcataatcagaaacatatttttgttgaagaaatatctggagttcttaaagtaaaataacaaggcatatcttaaaatctaacaccatggaaatataccaaacatagttttcatgctttgaaaagattttgtaaagcacagttcatgctgtcaggccctgatgaaatccactcatttgagagaaatattagaggataattttggaaaaggaatttcttagatgataagtgaaagttaaatgacaagttaaaacccttcagaatgccacagagcaagtgtaattattggctgagtgacaaccgagacatagtcataaataatatatgtctcttatctcaaagaaagttcacccaaagaaaaaacatgcaaaactaaattggaatcaatattagaagttggctattttttggtcatggttggggactttatttcaacctcctgttatatttagagaagtatatgtttaatgagggctgcccctgttggttcggcagtaaagaatctgcctgcactgcatcagtccctgggttgggaaggtcccctggagaagggcatggcaacctactccagtattcttgcaactcatggacagacgagcctggtgggccacagtccatgtggtcaccaagagttggacacaactgaagtgacttagcttgcatgcacaactacttcatgagtcttgttgaaagagctcaccttccatgacagaagttaaacatacttagcacttaccatttcccaacttcccagtaagctagagtatgaccacatgatcaatactcagccaatcagacatacccattcaagactttgaaacaggagatactgacacaaagaagcaaggacaatggacaagcattctagcagtgggcaagggaagtggtgctaacaacatcctgtttataagcatgagataagaggtatcagtaaaggtaagcactgcccagaggtaccctgtgttcgagagcacagtttggcagatgatttggctgctgccctcctctctcgttcttacctgtttctcaacctgcatctccactatctcctgaattatccattattctttcagcaaatttgttccctgtttaattcagccagagtgagtttctgttgcaagcaattaaaaaccctgacaggaacaaaagctaaaaaactaagagatcaaaactgtccagtaaggatggaagtgaaactaagtataacagaacatgtagcagataattaaagggatgacaaagaaaatgcctctgtatgaccaaaccacataacacagagggaagaacactagacctggggtcagaaaactccccttgggtcctagatttgtgatttaagagctgtatacattgtaaaagctcataagcaaatcacagaaactcttgaaggcttagccttcacatccttaaaatgaaagtaataatatctatcccatttgtttccaaacaaattatccaacgtggtagtttttaggagagtgctaaatagataagctattgttatttagctctaaaatttaagctcagaggcaaaagtttcatgcaagaagctggtgtctaaaaaagagagtgatgtttcaagaaaacagagaagtttaaaaaaaaaaatttttttttgaagtacaataaagatgagaacaaggaagccagatggcagcagtgatgattgtttttggtgatgaaaaagaattctatttgtttaaaaaaatcaggatttcaaatgttagttgtggtcaaagttgttttcattgtgaattaattgaaggatcagtaggctgctgataaatacctcgattattaaatacattttctgagtatttactatatgttaagttttgaagaaatatgaacctatgtaaagctcaagttctgtgggttttgacaaagttgtcttaatgttaagacaactttaagactctaaaatgttttaacctgtttaattttccttttattcatctgaataatgagataaatatttaagtcatgaaggtattgcaaggattaattaagcaacctaaatgtctattgacagatgaatggataaagaagatgtgatatatatttatatatgtatatgtatatatacacacacaatggaatattgctcagcccataaaaaagaatgatataatgccattttcagtaacatggatggacctagaaattactatgttaagtgaattaaataggtagataaagacaaatatcatattatattcccttatatgtaatataaaggaatctaatataaaggaatctaaaataggatacaaatgaacttatttataaaacagaaatagactcacagacataggaaaaacttatggttgctaaaggggaagggagtagaacagtaaaataggaatttgggattaacacatatacactactatacataaaatagatatacaaagacctactgtattcaatgtcttataataacctctaatgggaactgtattcagtgtcttgtaataacccataatggaaaattatctgaaaactatatatacacatgggcatccctggtggctcagtggtaaagaatctgccaatgccggagatgcaggttcaatccctgggtcaggaagatcactaggaaaaggaaatggcaacccacaccagtattcttgcctgggaaatcccatggacagaggatcccagtgggctacagtccatgggattacagtagagttggacatgactctgtgactaaataacaacaatgtatgtacatatatatgtacaatataaactaatccaattgctgtacacctgaaacattgtaagccaactttatgtcaataaaaattaattaattgaaaagattaaagggttaattaaaatagcataagtaagatattggaacagatcctggtaaagactgaaatctgagaagggggcagcagaggatgagatagttagattgcatcactgactcaatggacgtgaatgtgaacaaactttggcagacagtgaaggactggagaacctggtgtgctgcagtccacggggtctcagagtcgaacaaagcttagtgactgagcagcaacaactgagatatatggctaagcgttggacaaacggtgaggagaagctgtcctccgccatagcgtctttctcttcttcatgattcgtgttacactggaagaacgttagctggtgagagatgtgagacaggctatcatagaaatgccaaagctgtgcatatttgaactagctcttttaaaatggttattattctttaagtagaaatagggaaacagtattcaaggggatttttttttttttttttttggtgtgtacttccgtttcctcaactgaagaaattaggaactggcttaacaaataaatcccaaattcttttcaagtcttgtattttatgaattattcttcttattttgatgtctatggttttcttcttttcatgaaagcattacttgttcattacacaaaattcagaaaatagaaacaggcaaaaaggagaaaattaaaaaaaaacacacacatacttgctcaatatttctgttagttttttaaatatgcaaatataacactatatacatattttaacaaaaaattataacatagacactattttatgactttttattagtactaaatgttgaagttatatttaagaatgtttaaacaatattcagcagttttcaagtggtaaatctattttttaatgagaaggaggccctctgataattaatctctccccatccctattaaactttggctgatttagaaacagtccaatatacaatgagctattagataagagcttcaggcagacattgtgccttttgtcaattgagaaaaattactcttatagttcagtttatatataatcttatttctgccaagaaataaaaattctttaccttaataggacaaggacatcaattcttagcaccaagagatataatggatgaaaccattaatgtgctcacccaccttttccaccttttaaaatgaaagtattaatcctgtttaaattcttcatcagtagttctcatcttcagttaatttcatcaaactatgtctagaatggctcacatcagaatactaatgtttaacttggataagcacactgacattttgggaagcaaattatcttcttatcacagatttatttaacctgcatctagatggttttctagaagcctgagcaacaatgaaatgcacaagagagggtttaggaaaaggttaagctaaatcacagacaaaaacaaggaggaatgtgttttctgtataaaaatagcacagatgtcaggtcacttccattcttataataagacaaagttagataggtggaaaatcaataacttttattggactcatgagagaaccgaggtcacagagcagactacttctccccaaactgcagagataagtgcaagcagaggaactcaactgctattcccttttcaggaggagaagctggatccataaacccaaacactttgataaatgcctggagactggtgatgagtgaagctagtgatgagatggacagctagtgatgagagacactcctggaacccatagtctgacggggattcccacgcattccctggcttttacctccaggaactctgtccgattttcacaataaagatctgagaaagatcctctcctggctgtgttgggggacggagagagtatccattgtgaaatatgcccagaggtcttctccacaccaaagcccttcaatccagaggaaataaccaccagagtattattccagtaggaggaagggaactcctctcagtccagcctctttcagctttcctgtctcatttaaggccacatgggtcaggacttcaaggaaacagattgggaatatgacaactaaaaacggagatcagaggtgggaaaatcaggaagctataccactgcagaaacactcatgacagtcacagccccaagacactggccaactaaaagactgaaatttaatcagagtactatagaacactttccctctcctgtgctttaccatgataccaacagagttctagtatgataagagtgaattataactaaaagatctgtgagacaaatcgtttctgaggaatagtatcacttcgagtcatagaataaatgtttgattataagcaaaaatgtaaaataatagtctctgtggaatagtatcaatgtgagccatagaataaatgattataagcaatcctccaaaaagtacagtatggaagggcagtggaaccatttaggagtttgaaagtgaaagtgttagtcgcttagtcatgtccgactctttgccaaccctgtggattacagcccgccaggcttctcagtccatggaattctccaggccagaatactggaggggattttcccgacccagggatcaaactcaggtcgcagattctttaccatcagagccaccagggatgtccttaggtttgagaaaactggtgaatatggtatctgccaagtgaccaaagctaacactgcccatggtcagccatgttgatagtgtgtgcccttgatatgatgtggacagaagagtgctttcccctcggtcctcttcctcctcaagtaactccagtctacaaaattccagtcaaggggcattctgtaaaacacctgagcagtactcctcaaaactgtcaaggtcatcaaaaacaagcaaagctccaaaaatagccacagtcaagaaggagggaggagacatgatcactaaatgtaatatgagatcctggatgggatcttgaaacacaaagagatattagataacaactaagtaatcttaatggtggctcagatggtaaagcatctgcctacaatgccggagaccaggattcaagccctgggttgggaagatcccctggagaaggaaatgacaacccgctccagtcctattgcctggaaaatcccatggacagaggagcctggaaggctacagtctatgggatcgcaaagagtcggacacgactgagcgacttcactcactcactcaagtaatcttaatagactgtagttaataataatgtattgaaattgtttcatgaattgtgacaaaacttccatactgatgtaaattaagaataggggaaactggatgtgagatatatgcaaactcagatatgtaaagagaaaattattcttaaatttccttttcaaaaatagaacaacaaagaaacctaatgtgattggatattagggaactgatttgctttagtacattcactggtacaacaaaattgtataaatataatacaattctttttcattgacttattcaaccatttcataaatagttgaatacatatatacatctataaactggttctttgtcaggtattgatgtagttctgtgtccttgtagtacttagatctagtggtggagatggatactaaccagtaatttcagaaatgtatctttaattacagactggcaaatacaaaagcaagatggtaatacagtttagtgaagaggtctgattgattctgcctcctttgggaaagtctctgatggtgttagagaatgagagaagtgatatgtgaatgtttctgaaaaagagaacagaatttgcaagaaccttcaatgggatgccacattctcttatctgtctcactcctcccatagcttcacttattttctatagctgatgacttctcaatttatatttacagagtaaatcttggtctgacatctcagcccaaatttccagctgcccaactggcaccctcattgaaatatctcaaaagaatcttaaagcacagcacacagaatcttcaaaaatcatgatattaacatctcttccttatgctacccttctccactgatttgtaactttgggaataaaaatatctgtccagcaagaatatataaaagaccaacgtatctatggagagaacagtttgagatgaagctagagaggaactgggggcaaaatcaagaaaggcagttgaggacacgcaagaaatattttcaatttctcctaagaggaataggaagtcactgtttgtctctgcagtggtgagagataacatgaatagataattttataaaaagtataaaatgtataaaaagattgcactgtgaagaaagaactggaggatagtcagaactgatgtgcagggaacaagggatgaggaaatcacaagaaaatgtatccacattaaaaaaatgatgggtagctttccaagtggtacaggtcaggagtgaggcatcacagaagactccacattttctggttaaaggggactcacaatcaaaacagaagcagaaaaaaggaaactggacaaattcggtaaggccctggaggcagataaaaacccaggtctttgggctgatatacctgggcttcttcttcctctgacactccagtcacctctgctggggacttggttttcttcttccttattctccccgagtggatcctgaattacttctgtcactgactaaggcttgcattttggggcaggcagggtttggcaacaggactggaaacatacagaaaaatagatgctggaatatgagttaaaggctccacttcagaagttatctctgaaaatagaaaatagtctatagtcatcaactatagtctatagtcatcctattttctttccctgtgggaggaacaaacctagagacattgttttcagagcaagtaaaagtatgctggaaaatatcagtgctatctctagctacaaaatctcatctttttaaccttccttttctctgtgcctaacacatagtaggtgttcaatatttacatgatcattgttgctgccctcctgagtttataatctcacccaggagaatgagttcttaataaagccatttctgttaatacaacctctcagtgtatgttgcttattgacttaagcctcaacaaatcaaggaggtaactgttatatagatcccattttacagaagagaacattgactcaaagggttgaaactctgccaatgctgacccaacaagactgtggcagagaatccagtgtttcatgtcagatttatgttagttttacaattatactcaacttgcagagctgtggccagagcccaggtgttctattccaagttaaacagtcttccactaacaagcgaaatgttagtgattactatttaaagcagaaagatggacaaagcattaatgctttgctccaggtggtgctagtggtaaaaaacccatctgccaatgcaggaacttgagatgcgggttcggtccctgggttgggaaggtgcccttgaaaggagcatggcaacaacgccagtgttcttgcctggagaatcccacggacagaggagtctgggaggctatggtccatagcgttgcacagagtcggacacgattgaagtgacttagcacccactaaccattttagggctgtgcacagaaattagaataggtatcctttgtcattttactttacctgagaaatgaacattttattacaaagtgtctcaacattgcagagaagagttgtgaaatattaacatcgatagtctaaagacttgtgatttttctttgtggaactaagaccctttttacttcctcccaaaggccatgagaacccatagaccaacaccggcttagtaggtcacaaagcggcgacagagaagggggccaaagagaacggccttggcacggattctgggtctgtgcgttgacctgtccttgaggaccaacttagagttcctcccgagggaggccagtgagcagctgtgaaatgactctggaagtgctgagtcttatctagaagctgaaactcactgcaggcacgtgggagaaagaggagctaagggaagaggtgcagcgcatgctgtgaacacaggggagccctgcaggatgtgcagacaaaagggcagaaatccagcctcaaccgtttataagcaagggttcaatgtctgagtgcgtgctacgtcgctcagtcatgtcggactcgtggagaccccatggactgtagcccgccaggctcctctgtccatgggattctccaggcaaggatacttgagtgggttgcaggtcctccttcagaggaccttcccgacccagggattgaaccctcacctcttatgtctcctgcattggcaggggttctttactactagtgccatctgggaagcccaaagtttcaataaaaagtcctaattttgatgctgggatttgagggccgcaaaagaagccaaaaacataaaatttcttgagaccttgaatcagatttttggtattggttttttgaggggagagaggataatctttgttagcctgtttactcatctgtaaaatgtggataataaacttcaaaatgtcatgagatgccgggggccagagtgaggacctctgcccatggcaaaggtcatgaggaaggaggcttggcatgcgcaaaggcgtgatcaagcctcaggaaaccccctgttcccgagcatctaccccaaaaccagagtctgttttatgctctcccccataaccgtttctctcggagaaggagtaaacgtgcagctccaaggcaataaaaattcctgggcgtgacaagagtgtttcagcttacgcactcctctgaaggttatctagcccacctgtataggttcgtccggccacatgtgattgtttccagcctcacaatctgagaggtacgagatgttttagacttcagttcagttcagtcgctcagtcgtgtccgactctttgcgacccatgaatcgcagcagccaggcctccctgtccatcaccatctcctggagttcactcagactcacgtccactgagtccgtgatgccatccagccatctcatcctcggttgtccccttctcctcctgcctccaatccctcccagcatcagagtcttttccaatgagtcaactctttgcataaggtggccaaagtactggagtttcagctttagcatcattccttccaaagaaatcccagggttgatctccttcagaatggactggttggatctccttgcagtccaagggactctcaagagtcttctccaacaccacagttcaaaagcatcaattctttggccctcggccttcttcacagtccaactctcacatccatacatgactactggaaaaaccatagccttgactagacggaccttagtcagcaaagtaaagtctctgcttttgaatatgctatctaggtaggtcataacttttcttccaaggagtaagcgtcttttaatttcatggctgcagtcgccatctgcagtgattttggaaccccccaaaataaagtctgacactgtttccactgcttccccatctatttcccatgaagtgatgggaccggatgccatgatcttcgttttctgattgttgagctttaagccaactttttcactctcctctttcactttcatcaagacgctttttagctcctcttcactttctgccatgagggtggtttcatccgcatatctgaggttattgatatttctccctgcaatcttgattccagcttgtgtttcttccagtccagcgtttctcatgatgtactctgcatagaagttaaataagcagggtgacaatatacagccttgacgtactccttttcctatttggaaccagtctgttgttccatgtccagttctaactgttgcttcctgacctgcatacagatttctcaagaggcaggttaggtggtctggtattcccatctctttcagaattttccacagtttattgtgatccacacagtcaaaggctttggcatagtcaattaagcagaaatagatgtttttctggaactctcttgttttttttccatgatccagcagatgttggcaatgtgatctctggttcctctgccttttctaaaaccagcttgaacatcagggagttcacggttcacatattgctgaagcctggcttgaagaattttgagcattactttactaacatgtgagttgagtgcaattgtgcagtagtttgagcattctttggcattgcctttctttgggattggaatgaaaactgaccttttccagtcctgtggccactgctgagttttccatatttgctggcatattgagtgcagcactttcacagcatcatcttttaggatttgaaactgctcaactggaattccatcacctccactagctttgttcatagtgatgctttctaaggcccacctgacttcactttccaagatgtctggctctagattagtgatcacatcatcatgattatctgggtcatgaagatcttttttgtacagttcttccatgtattcttgccacctcttcttaatatcttctgcttctgttaggtccataccatttctgtccttgattgagcctatctttgcatgaaatgttcccttggtatctctaattttcttgaagagatctctagtctttcccattctgttcttttcctctatctctttgcattgatcactgaagaaggctttcttatctcttcttgctattctttggaactctgcatttagatgcttatatctttccttttctcctttgctttttgcctctcttcttttcacagctatttgtaagccctccccagacagccattttgcttttttgcatttcttttccatggggatggtcttgatccctgtctcctgtacagtgtcacgaacctcattccatacttcatcaggcactctatctatcagatctaggcccttaaatctatttctcacttccactgtataatcataaaggatttgatttaggtcatacctgaatggtctagtggttttccctactttcttcaatttaagtctgaatttggtaagaaggagttcatgatctgagccacagtcagctcctggtcttgcccgtgtccgaggtaaggggcagccaggagaagccacctctcgcccaaggccaggggtggttttagacttactaaaggcaaattcttttggggagttggaaattattaatatagtgggttggttaggaattatattggtgaagggtttttcatttcttgtgccaataattgctgctaattccctaccctgggtatgacaagggtgtctcaggtcaaacctctctgctgacagactaccttgtgtgacaggattatccatactcctgccacatgattatttactacctctcaaccataaacagcacagagagttttggagtattttgaaagtcttagttagcatagggcttttctgattgttgagtcaatgattgcctccatatccttaggcacctgggaatatattaatcaatgtatttggaatatagaaaaggaaatatagtagtttttaaggttagcaatactagactttttgagttaatgaattttcccttttgtaatagatcactgtactttgttataaatcactgtgtctttgctatgtaaaaatgtaactttatcactatcttaagactaaatagatcttaaggggaacattggtgaaaggattttcatttgttgggttgatgtttgctgctaaatctccatgttccctgcccttataatgaatataactagcatataggagaaacaagtattaacctttaagcatataggagaaataagtattaacctttaaggttaatcctgttaaccttgggttaaataaatttctttcttgattgtaactcactacaccctcaccctataggaatgtaactttatttggagggtggtgcctggtttaagaaaaaacacccttggaagaaataagttttttggttatcagaaagaaaggatcataaaatgtcagcaggtttcatggccagaagatgatgtaaaatccctaagacctttttatgtgaagcacctgatttggataaaggtcaggactgctgacccccgtgtgactctgtattcatccttatgtgtaacaaaaggtacataagcaaaccccaaaataaagaaattggatcagtttccggaaagactgattccctcatgtcattcttttctgctctccatttttctggctaaattcccatctggagcatgggtgctcgccacatctacttacttgccctggttttcaagcccacgcgagaaggagcccaaggagggcactttccgatattcaagtggcaccggtggcccaacgtagatggtgcaaattccttgttttggaattttattggtatcccacgtaaaccaagttattcagcatccttttctctcctactattttctggctgaattcccatctggtgcatgggtacccaccaagcctattaattttgcctgcggtccgatctcagtgcctcctctccttcaggagaacaggaagacgcctgcggcctacgtaggtggtgactggtattccatgtgaaccaagttattcagcctctttttctctgctaattttctaatctctctctatctgtaattaaataagttatttctaaggacgccaatgccatccccaccttcgaattccctggatccaccggggctggaccccagcaatgagatataactaaaattaggtgtacagtacacccagaacagggccaacacacagtaagtacccaacagtgggtaattgttgctgttattcttacacccatcagaaggcatcgtttctgcagtttaatataaggagccaatttgaattcccttagaatagaggttttatatttctattccttgggaatttttggtgtatcacaagaaggatggagttagcttaaaaaacaaatatgtcagtgaattttatttcttgttttaaagaaattatatgaacagagagtgaattaattatagaagttaacttcccagatgctgaaactgcattgctcagattcagattttggttgtgatactcagaagctgtgcaaacttgggcaaactacttcacctctgtgtgcttcagtttccttcccagtaaaatgacagctacaatatgggttgaattgtgccccccctaaattcatgtgttggttttcagaaagtggttatatttagagatagggtctttaaagagctaattaagtgaatatgagatccttggggttggttataatccattatgtctggtgcccttataaggaggagaaatttggatacagacaggtacaacagaaggaagagcctgtgaagacacagggaaaagagagtcaagaagaaatcatgaagtgaggtctcaaaagtcaccagttttgcccatcccttgatcttgaaatttctagtctccaggattgcaagaaaataaatttctgttgtttaagccaccaagtctatggtactatgtcatggtagccataatggatgaatacacaacagcacgttatctgaagggtttcttgcaggtatttagtgaataaatatatgtaaaattacttagaataatacatataatagaatacagaatgctgttacttttattaaaagtatagctactttgtttttaagtttcttattggagtataattgctttaccatgttgtgttagtttctgctgtggaacaaactgaaccaactctatgtatacatgcatccctccctcttaggcctccctcctgccccattcctctctacccctcaggtcatcacaaagcactgacatgaaccccttgtgcaatacagcaggttcccactagccgtttattttacacacggtagtgaatacctgtcagtgctaatctcccagttcatccctccccttcccctactgtgtccacatggccatttttttgttgtgttcttgaattttgagactgttttggagttcttcttcctttgttgttgctgtttagttgctaagtcatgtccaacactttctcagtcccaagaactgcagcccaccaagatgtttctgtccatgagatttcccagacaagaatactggagtgggttgccattttcttctccaggggatcttccaaatgcaaggattgaacccatgactcctgcattgcaagtggattctttaccatgaagccaccagggaaaccccttttcttatgatttccttagacttttatttgccactgtatcttttgcctctttaaggctcagggcataaaaacaccaaccagatttactgtttccctcctttgatcattacatatgtcatgctagattgtaattatttgattatgtgtcattctccaatagtatatgggtgatccaggaagagtaattacttcgtcttattggtcactgcagaccaaatgtccatcacagtgccttctcattaacaagagggctagattcatgtagatcaaaaatatgtaaaatttgagaattttgtagtattttggggagagggcccacattttatcaaattctgaaagagtatgaactaaatattaaagaatcatttacttagtggttaactattagaactgagagaaggagaaatccaagagatgctgatgatttattttgagttggttatctctaaaagtggagttactctctgacccacaccagttagcaaagtgtctggcatgtaataagcattgttgttgttgttgtttttcagttgcttagtcacgtccaaaactttgcgaccccatactcggcctccctgtccatcaccatctcaaactcatgtccatcaagtcagtgatgccatccaaccatctcatcctctgttattcccttttcctaccacctccttcctcttctgctgagaccactggaaaaacttggagccttcctttggatttgaaataacagcgtcccaataattcctcttcttcatgttgctggctaatgatattctagaactcatttaaggagtatttggaaatttttactgaaaagcaatacttttaaaagaaatggacactttaagagcataaattgttaggaatgagtagctgcaaatgaaaagcctgctatacagctaagaaattcaacctcagttgagtataattccaaatgtatactctactccacaatttcttagcttagttgaggaaagggcaaagaagtctttgggaaatggatactgagtgaaaaccagattaaaatcatttaagctaatgataaagcttgacggaacttagggtacaaaccaaaatatcaatgatagcaaactgaaaaaaaaaaaaaaccccagcaaactaaaagtctaaggggagaaaaaggcagtttcagaagttactgttttttcttttcccataaatacttactggtatcattaagtggcaaggtacactactaagaaccatgtacactgacatatgtaaaaagacagccaatggaaatttgctgcatgactcaaggaactaaaaccaaggctctgtaacaacctagagggatgggaaagggtgggaagtgggagggagctttaagagggaggggacatatgtacacctacgctaattcatgctgatgcacagcagaaaccaaagcaatactgtaaagcaattgtccttcagttaaaaataaataaacatttttaaaaacatgaaaaaaagcaagccatagtgctccccaagtgatgataacatgcacccagagttgacagacactgcattagacaaaagttgaaatcaaatgagccaagctgcactcacagaccagagctagtcagagtgaatttgtgaaaaaggtatcctaaagggccagccctctcagctgatgctcagtgtaagtgagaggaaggctattcatgcttctcagtagacactactgattgaccttcagagtctctgtgctcttacctgggaagttgtgctaataaaccttaccttgttcctttcactatgatgcccattttgtaattcattaaacactgtattttgaacccactacatgttaagttccaaggatggaaaagaagtgttcccattctcatggatctcactccataccatgataaaaagataaataaaatttcaaagcaatgtaaatgacactttggagggggcatgtgtataaaacctatgggattacagaagcagcagctaactgctggagtcaaggacagtttcacagtagggatgatatttaaactggatggataggttatggggaaggcattgcacaagccaacagggagcctgggcactcatgctactgaaaaatgaaagtggcttggtgtgtcagaatggaatatagagttgtgtaggatcaacaggaagtgagacaagaaaggtgagaagagtcagactgtaaaaaatcatctatccaccaaggagatggaaggttgtagggatggggaagtagttttaactccatcctcagagttaatttgccatgtaagtacatttgataaggagtgaacatgactgaacttcaattttctaaatggaattatagtagatatgattaaataacaataaatcaacatatattacttctgtctattgaagatcgcatattgtaacagtgggccaatagtgaaacatatgcagacaattattagttttctgcaggtagttacaatgcctctctttcataaaaaatttctcttctcttaaacttttccttcactttctactatttgtcatcagagtgatgcttgtaaacaactaatcaattcagtaatgattcccatttattaggtagtcatgtatctagtactagccttgggattttgacatatatcatcatattatttctccaccaagactgcaagagaggtattagtaacagtagcagtagtgagactttggctcatataacactcactatattatcaggtaccattctaggtactcctatatgggaactcaattaatccccaaaatacttccataaggaatgttttgttgttatccctattttgcacatgagaaaactgaactacagaatggttcagacaatggcccaaggtcacatagcttggattcaaatccaggacttggcaggattcaaatgcaggagtgacaggattcaaatctaggcagtctgatctcagtgccagctcttggccttagcaaagcatggcctcatggtggtattcacattacaatacagaaaaacaaacaaacaaaccaaaagcaggagtctaaataacgttcctcagtttatttagttaataaatgtagcagcaggactccaactcaggtttgctgcactcagcgcttcccataaatgcttccagttgtgtgttttgcaaacacacacacagacacacagagtagacctgtgtgacttgcacactttccagtttagtcaggaaaagaaaaagaatgttggaaaagagattttgagtctcagagattttccatgactgagtattagaaataaaggctcaatctgttcactgctataatcatagaacttagaatagcatctgtacacagctgacactcaataaatgttggataaataactatcccagggggatatggagaatatattgtatatattcagtgaacggtggtggtggtttagtatttaagttgtgtccaactcttgtgacccatgaactgcagcccaccaggctcctctgtccatgagatttcccaggcaagaatcctggagtgggtagccatttccttcttcagatatttagtgaatatttattcactaaatggggatttattgagcgtctccccatgcaggcaagtcaggcagtatacacggtagtgtggaagataaaaggctacaaaaggcagagtcctccccataagcaatatttaggaaggatttataccatttacacatattttttgtatctttcctttagttaaggctctaggacctgtatatgatgtgaaaagcctttttaggtatcgatacttaagtcatccttcgtggtaataacaatgtgttcaaggtgggcataattagtatacagtttcacccacctaaaatctctttcatgaacaccagacaatactctgtggtttccaactttccctgtgaattatgtttttaagaccattatctctatgtcttaggggcttcccaggtggcgctagtggtcagtgcaggagatgtaagagttgtggattcgattcctctgtcaggaagatcccctggaggaagagatggcaacccactccagtattcttgcctggaggatcccatggacagaggagcctggcgggctacagtccttggggccgtgaagagtcggacatgactgaagtgacctagcacaaacgcatgcttatataagcatcactttcagtatgatgttaaaggctttactgattatggtaggattcacctcattctgacggtcacggtggaaagtccatcaaactgtattacatgtacagatggagaactccttcatttggaaagataactccttcttccagacaaaaggatattgctaccattttaacacagtgcccttcagacacagcttgtacaatttcagcctctcatgaaattgatattggtttgataggaattcacagaagttatggaattattccttcccctaatagcctacatcacaacctagagatacgtgccttcacagttaaacaaagactataaaatcaattttatttcccttgctggctttaagaatccatgttaatagaaattactaagatgctcatttttcatcttggctcactaataggatatttgtcaatttatcaatatccatacctggcctgcatatttcctggtctccatctcttttccagaacatataatgagaaaactgaataggttaatttggtacccatggattttaaaagggactaatgaggaaagtgagccgacaggacaaaaatctatgattgtcagcttaaggcatttgcacttctccatatgtaatgagtctctgttaccatttgagagggtgaatgacatgaaaaaaacttatgcataaaaggatttatatgaaagtgtcacactttttttagttggagggaattagaggattttttggttggagagattagaggcaagagaccaacgcatacttctaggtagttaagtatcttacagcctctactaaaaatgtaagaaaaatcaaaggtaatgtgtgtaaatgagataagggagcaaagaagatcacaaatgtttgaacaccaaggatgtcatctggcagagggagaaaaatcattctgagctcaagtactgtatttcaatgaacagcaaatattccatgcacgcctaagagtatttatgatgttgtacaattatagaaacatatgcaacacaaatgcataaataatttataaagtaataatactaatatcagatgaaaaactatacaatgtgttcaagactagcgtaatgaacaaagaggacaatgtaaaacatcctttagaaagcaaattcatctggagccgacaacctgacatcttaatcacaactaatgattctggctgctggaaggaaagagcccaggaaaacacaggtcaaggactgaaaaagagattattttctgcgtgattttctttcaaatagtagttatatacccatctagtcacttttttttcctgcagctgaaatcttcatctatgaatatgtcctaatctttcctttcctactctactctcctattcaacttgagaaaaactgatgaatatatttcttacaaaggtcagtgatctgtcccccaacctggaatgctccggtggaacacttcctcatctttacgctggtatgtcccaaactacatttgtatatattattgtgtacctatcatttttcaactttaaaatttcctcttaataagatttatctgttattaatatgctctgcttggtaagttgccattcttatattttcctttaattctttatatatggaatcccttagctccctgcacatatttaaaataagtaattgaagtatattcctagaaagtcaaacatctagactcccatcatcacagtttccatagaccgtttcttcttccttgagtatgggatacactatttgtcttttcatttactgtgaatgtaatttttaaatacgcaacaaaatactaccaaaccaaatccataaaaagaattatacagagtaaccaagtgggatttatactaggaattcaaggttggtttaacatcccaaaatcaattaatggagttcactcatgatctcccaactaaagagaataataggattaaataatgagaatagtttttaattagcattagaagaaattcagtacaacaatagtggcatataagaagttccaaatgtttctgttattacttactgatgttaggtcaacaaatacatttggaaaattgaatttcagcttggaacaaaagaatatagtcacaagtaaatgagatttgaacactgccccggcttttggtatgtaaaccctaaacggggaattcagggatccaaacagaaggattcaaaggcatgtgatggactctggtttgactttgactcacccaaattcacgggtattgaaaagtcattcctgggtcctcctatttcttccaattcttcatatgaatgatatctcccccccaaacttagctacattagatacttaagtaaagtcatatttggtactatttacaaatttttctttttgcaggaccaaatttaatttccatgggtcaggggcagatgagtactaagcttatagttttaggcagtctgtctgcttgatatttttaaaatcaagcagatttaaatagtggtttaaatctgttgtagaggtttaaatagtgtcaactttcttgaaaaagaggctaagaagagtcaggcaagatattagcatcctatccttcacaacaaggaagaatttgatttccaatatgaggagtttctcctgtggctcagcagtaaagaatccacctgcaatgcaggagacttgggtttgatcctcagatcaagaagatcccctggagaaggagatggctacccactccagaattcttgcctggagaatcccatgaacagaagacactggtggaccatggggttggaaaagaagcagacaagactgagggactaaacaacaagcttgaaagaaagaagtctaggtgtacagagaagaggttaatagaatgctgtatgttggtggatatctgtgttcgtaaaattaacttttgccaagtctgtggtaatgtgactggtgttaattctaacctattcatcaagagcatgaacataatggttctgagagcattaaaatgctgatgcccaagcttccatatttattaactaagaagttctatgtctggggtctgtatctgggtattttaaataaaagtatcccatggatttaagcagcaaggattgagaaccacttttatagtaaataacctattttgttaagtttgatttataaaatgaatgagacagacactgaacagaacattaggtatcttaagctgagtggagctgcaaagctactgactaattgattttaaaaaataagccattcacagttctcataaaatttaaaatgtgtaattgtgttttggtaaaaacaaaatgccaagagattgctctaattgcttccacaatatttatttttatgtcttttgattcattttgaaagagtggcattgtgacagtgggatgcatactgattactgtggtgaaaggtaaaaatcttctcagatggtctctccctgaacacagatgaaaaatagttgtgttttttgtctttgtttattttactattataacttgaagaatcatgacactttatatcttgaaggcaatgaagaagaaaaattgcattttcatattagctgtctgtatcaaatcaagcaagaataaaaagaaaattgattttttttgctagaagtctggtggatagagtaacctgttttaaagaaaataaggaaaaatttccatcacctatttgccgacatctggccaaagtaaaatgtgtaaaatggaaaaatagcaaaattacctgaggatgctgcttattcagtgtgaaaagtgaaaagattttctatttagatattagactagagcaatgaggatttaagggtcacctctttgggtaccttcgatgatgtgcattacagacagcatttgggggaaaatctcatgaaattatgattggaagagtgaataaattgataaacaaaagcaaaacacaggtagatattgcatggatttgagaaaaaaatggagtatttttattgcccacaaaatattcattatgaaggtcactgtagtcgaagtaaataaacgctgacctatttttccagccccaacaggcccctttcatacatatcttgctaatttctgcccggagttcagggttgtcccagttttgaggactgatcttgatctcagtaggaagaactggttattgttgtggttcagttgctaagttgtgtccaactctttgcaacagcatcgactgtagcccactgggctccttgtccacgggatttcccaggcaagaatactggtgtcggttgccatttccttcaccaggggatcttcctgactcctgtgtctcctgcatggccaggcagattccttaccctgggccaccagggacgcccaggaagacctgggacatctctacaatagaactttaagtcctaccatagactaaccctgactgtgtgttgatatatctattccaataactctgctacttttctgccatgtttccttgatctggctactatcttattaacttatttgtgaagttcttctagaattgagtctccacctatctaaacaaaacttcccatgacaattgggtgtcttgccccaaattgaatctacttgagtaagcaattttcttttctaaacagactgtccctttcaactgcagctaatacaatgttatctgtccatcccctgcctagactggaatagaatattcagcacattctccttctgcaattaagagttagtatttgttaattcccaaattcaaatacctcctgaaaattcagcaaatatttctgagtggctactatgattcttgcacataaaaatcttaaaaatatatttcctgtacttaaaagccacacagtctggagaggaagacagatatatgaatatgctattttaatgtacactaggatgctgctgctgctaagtcacttgagttgtgtccaaatctgtgtgaccccatagatgacagtgcaaagagacaagtaaaagacagtaaaaaggaggaagtgatcagcttctattgaaagaaaggaaatagaaagtaacagtgtttgagctgaagatcaaaaggctgctagaagaccaggtgataaatgaagaccaagaagctggtggagcatttcaaggaagagattccagtttgtacaaaggctccatggagcggggtacatttgtgacaattctacgcggggatatcttaaggagctggagcgtatactttgccttcaacttttggtgccctgagttaaggtatctacttttcattctctccacaaaggttgtgtactgccattctctgaagttagatgcctgtaggcaaataggaagaagcttcatgattcatcatgacataacaaaatcttggggtttgtcagtctaagaggaagtgaaagacactttgaagaatacattatttccttttctccatagaaataattctcaagggaggagtctctgaaggaatttttattgagggggttagatgctatggaaaagtattttatatttagatcctgtcatagttattatactattgctttacagacccaaatataccttaccactatcaataataaggtggacaaatcgatatattctgttgaggtcatccatcctctttgtcaagttgcaacactgtttgctcaatacattcatgtgcagaataggcatagtggcagagatggaggtcaggaaatgggttcaaccatatagctcatacagttttccttctcaggaaggctgacctacctaccaccactgagtgccaaatctgctaacaccagagatctattacaaggttctgatcaagtaacaacccttgcaagcagagcataatttactacctggtatgttgattatattggattcctatcatcataaagtataccacaactgctttcatcagcacagatgaaaatttgtgtataattgatgcttttgaactgcggtgttggagaagactcttgagagtcccttggactgcaagaagatccaaccagtccattctaaaggagaccagtcctgggtgttctttggaaggactgatgctaaagctgaaactccaatactttggccacctcatgtgaagagttgactcattggaaaagagtctgatggtgggagggattgggggcaggaggagaaggggacaacagaggatgagatggctggatggcatcactgactcgatggacgtgagtgtgagtgaattctgggagttggtgatcgacagggaggcctggcgtgctgtgactcatggggttgcagagtcagacacgactgagcgactgaactgaactgaactgaactgtgctttctctgtacttctgcaactaccaccacccatagacccatgaaatgtttctttattgctacattctcccactcaacattacttctgactacggaatccatctcacagcaaaaccaatgcaacgcagctattccctatggaattcactagttttaccatgtattcctatctaaaagcaaccagcctgataaaatgatgaattggccactgaagattcagttaggtgccagtgaggactcacatcctaaccagctgaggccctctgtttcataaagacagtaaatgctttgaaagacagtggtggtggtttagtctctatgtcatgtctgactcttgcgatccctggactgtacctgccagtctcctctgtccatgggactctccaggcaagagtactggagtgggttgccatttccttctccagcagattttcccaatctaggaatcgaactcgggtctccgccattgcaggcagcttctttaccaactgagctacaagggaagatctgaaattatatactgttgaaagacagtatatgctttgaaattcttctgtgtatattctgtacaggcactagaaataagaatggaaatggaatggttcctttcacaataaattcttataacacacttacaaacgtttttcctgtcactataattttgaaattgtctggtttttaggtattaattttctgaaagagaagaactgcttccacatgggtacatagaaatattgcattgaattggaaatttagttgaaaaatattttagatgcttcatgatactgagtatatacacatgaaagagaattactatattcgttaaggattctatgttaaatgatcctgattattaaggtatatttgagtttcttccacacagtagtggaggaagcactatgtaagatattcagggaattctctggggcgtttttaatgtttctacattaaatactaatgaatcagtggaagactattgtaaccagagaaaggtaaaacaacttaaaattcaggttctctaggaataaaagttcgatattaaatagccaatggatgggctccacttattattggctactgtttctcagtcccaaagataccctactctacttctactgggaatgggactgtgtaatctgcacacctcctttgccaactggatccttgacagacactgccagtagactggaagaagaaaagggacttgctcatccttgtttatttcagcaactgctcgttaccctcagaagggcagcagaatatagagaacaaacgtatggataccaagctggaaaggaggggtaggatgcattgagacattgggatggacatacataaacgctaatgatactatgtacaacatagatcactaatgagaacctgccatatagaacagggaattctactcaatgctctctagagacttaaatgggaaggaaatccaaacaagagggggcatatatatatatggcatagctgattcactttgctgtacagcagaaactaacccaacaatgtaaaacaactataatccaataaatttttttttttttaagagaagggcagtagagtccagcctccagcttttttttatctaaactccgagtcatcatcaccaatccctctaagaagtttcaacattgttgggctagaactccccaccaaagtctgatatctagttctgtaaaatgctgaagaccagctgactagagcccccaatgaaacgtttgaattcctgctctatgaggcccctcttccaatgtcaaaacaccacaaagtacctatcctagctgaacaataccctctgtcagaagtctgagtccatttctgtgttttgttgttgtttagtcactaagctgtgtctgaccctttcgcgaccccatggacagtagcccacttcctccaaatgccacttttctctcaccatccccatatgtcccgtcagccttggaaggggtactgcttcctctacttcctttccctggatatattctttcaatttctttgttcactttttaattctctaatctgatatgaacggagaaggcaatggcaccccactccagtactcttgcctggaaaatcccatggacggaggagcctggtgggctgcagtccatggggtcgctaagagtcggacacaactgagcgacttccctttcactttcatgcattggagaaggcaatggcaccccactccagtactcttgcctggaaaatcccatggacggaggagcctggtaggctgcagtctacggggtcgctaagggtcggacacgactgagcgacttcactttcacttcactcaatctgatatgaaacacacacacaaatccttatcatttttcataataaactacagaaaattaagttcttattggctaattgatcatgggttaattttttttttcatacaaagttaagaaaaacccagtcagtaatcatagagcatattttgaagatataaggcataggacagtaccacaaatatttgagatgtattccagatttcatatattttacaggtgaaaaagtatattcacatactcaaattgttccaagcagacaagttttttaataataaatgcacacatctgtttttgaattaaaattaaaaatcacatcttgagttgcactagtaaatttccagtgctcaaaagtcacatttgcagacctagatcattagccttcttacttatattagactacaatgatataaggtaaagttaaggtaaggtgaagtcgctcagtcgtgtccgactctttgcaaccccacggactgtagcctgccatgggattttccaggcaagagtactggagtgggttgccatttccttctccagaagatcttcccgacccagggatcgaacccaggtctcccacattgtaggcagactctttaccatctgagctgtatgtggcagttgtatgatgccaaagatcagaatgcaaatgaagtaacactattcaatgatatttccattttccatctttgttctaattttacatgtgcccaaaagactggcagagctggggaacacagctctctcacgtcaatcccatcataataacagtgcaacacgagaaatattttggatggaaaatgaggctacagcagcacttgacttttttttttctttttgtttttgtttctgagctttggtacttactcatgaactttgcttcctgagtttacaccactctgcttcagcagttcctctgacatcaattctgtctctgcctctgaacacacttttatgtcttagctattcattgatctctcaggattcctcactctctattctctgtcccatggtctttgcttgattgcttccatatttacactcaccactgacactagtattgcctttacttgtaactgagaagacaaaattaatacttgtcagtaatcagttctgtttctgcttaagagggaaaatgttgcaagaggttgtagctcctaatttaacaataagaaaaaaatcataattaaaaaaaaatatgtttttctcatccaagagctagagtcacaatgaaaccagcaaactgattacggtgggtgataaaatgttgagaggagacaggatatgtgaactgtttcacccttggcagaataaaagtcattaaactgggcaagagggaaaccactgaaattttaataaattgattaagctacatgtgggctatggaacagtttaggagtcctgggaatcccaggcagagaaatacataaccgcttgccagtccttttctccaggactctcctggatgcctatggaaagactgggaagcctgcctgtgttctgaagatgaaggagatgcacctggagggcccactgtgctcaggggtgaaggtgttaactgactgtgttcaccccagatctttctttcatatgaagaaagctactgagaaatggaagatgctggtttataaaccaccttgggaactttcccccttgtaatctgaaactcacccccatagcagagggctgggacagccagaagcaagaggcagaccacctctgactggtaggtggagggtttaatactcaagggatctatatcgtggaggctggtcttgggggcttccaggtggcttagcattaaagaatccacctgcaatgcaagacctcaggagactcggtttgatccctgagtcaggaagatcccctggaggaggatatagcaacccacaccagtattcttatctggagaatcctatggacagagcatcctggcagtccagagggtagcaaagagtcagacaagactgaagcagcttagcatgcatgcatgtggtcttgtcttgggcagctgcaagatgagtacatctctgcatttcccaccagaatcttaaaagtttacagagaggcattaaaaaatttttttattggtatatagttaatttacaatgtagtattagtttcaggtgtatagcaaagtaaatcagttatatcagttatatactatatatatagtaatagtttagtctctaagtcacgtccaacacttgcgaccccacagactgtagcctatcaggctcctctgtccatgggattctccaggcaagaatactggagtgggttgccatttccttctccaggggatctttctgacccaggaatcaaacctgggtctcctgcattgcaggcagattctttactgactgagctacaagggaagataaaaaaaatacaatatttccaaccactgtacatactgtatgggaagtcgctcagttgtgtccaactctttgcaaccccatggactataaagtccatggaattctccaggccagaatactggagtgagtaaccttttccttcttcaggggttcttcccaactcagggatcgaacccaggtctttagcattggaggtggatcctttaccagctgagacacaagggaatcccatgtgtgtatatgtatgtgtgtctatgtatatgtttgtgttatatacacatacatatataaacacatagaaagatagtgaaatactgtgtgtatatatatatatatatacatacatatatatatatatatatatatatatattcactcttatagattcttttcccatataggttattacagagtattcagtagagctccctgtgctattcagttggtccttattggttatctatttcatatatggtagtgtaactggacaactgaattctgtcacatatgtttttcagatgttctcaatagcacctcactatctcaagcctttttgcatttctttttcttggggttggtcttgatcactgcctcctgtaccatgtcatgaacctccatccatagctcatcaggcattctgtctatcagatctaatccctggaatctatttctcacttccactgtataattgtaaaggacttgatttaggtcatacctgaatgatatagtggttttgcctacattcttcaatttaagtctgaatttggcaataagaagttcatgatctgagccacagtcagctcctggtcttgtttttgctgactgtatagagcttctccatctttggctgcaaagaatataatcagtctgattttggtactgatagtctggtgatgtccatgtgtagagtcttctcttgtgttgttggaagagggtgtttgctatgaccattgtgtcctctcagcaaaactctaagcctttgccctgcttcattctgtattccaaggccaaatttgcttgttactccaggtgtttcttgactttctacttttgcattccagtcccctataatgaaaaggacatcttttttgggtgttagttctagaaggtcttataggccttcatagaaccattcaacttcagctccttcagtattactggttggggcatagacttggattactgtgatattgaatagtttgccttggaaacgaacagagatcattctgttgtttttgagattgcatccaagtactgcctttcagactctttttttattatagtggctactccatttcttctaagggattcttgcccacagtagtagatataatggtcatctgagttaaattcacccattccagtccattttagttcactgattcctacaatgtcagtgttcactcttgccatctcctgtttgaccacttccaatttgccttgattcatggacctaacattccaggttcctatgcaatattactctttacaacatcggacattacttccatcatcagtcacatccacaactgagtctcttcattctttctagggttatttctccattcttctccactagcatattggacactgaccaacctggggagttcatcattcagtgacataccttttttccttttcatactgttcatggggttttctcaaggtaagaatactaaagtggtttgccattcccttctccagtggaccactttttctcagaactctctgccatgatccatccatcttggatggccctatatggcatagttcatagtttcattgcgttagacaaggctgtggtccatgtgatcaggttggttagttattgtggttttcattctgtctgtcctctgatggaaaaggataagaggctaatggaagcctcctgattggagagactgagggggaaactgggtcttgtactgatgggtgggaccatgctcagtaaatctttaagccaattttctgttgaagggtggggctgtgtttcctccctgtggcttggacctgaggccaaactatggtggaggtaatgaaaagcctgctagctctcttttgtatttgctcaattctttgttctgtgagcaggccaggctgtgcattagatttttaggttgcctttcttgggaactggaactgcctttctgcagttgtggttaggcctatattctataggttttttctttttttctctcctggttatgttgccctctgagattccaaaactccccacagactcacctgtgagagggtttcctactgtgtggaaacttctcctccttcacgaccccctccccatgacatgtctctgtccctaactctttggtctttctttttgtcttctatattttgtcctacctcctttcgaagagaatgggctgcctttctggatgcctggtgttctctgccagtgttcagaagttgttttgtggaagttgctcagcattcaaatgagcattacaaatagctgagaaaagaagagaaacaaaaggcaaaggagaaaaggaaagatatacccatttgaaagcagagttccaaagaatagcaaggagagataagaaagtcttcctcactgattaatgcaaggaaataaagcaaagcaatacaatgagaaagactagagatcttttcaagaaaattagagataccaagggaatatttcactcaaagatgagcacaataaaggacagaagggtatggacctaacagaagcagaagatattaagaagaggtggcaagaatacacagaagaactataaaaaagatcttcatgacccagataacatgatggtgtgatcattcacctaaagccagacatcttggaatgcgaagtcaagtggtccttaggaatcatcactatgaacaaagctagtggagatgatggaattccagttgagctattttaaatcctaaaagatgatgctgtgaaagtgctgtactcaagatgccaagaaatctggaaaagtcaacagtggccatagaactggaaaaggtcagttttcattccaatcccaaagaaaggcaatgccaaagaatgttcaaactactgcacaattgtactcatctcacacactagcaaagtaatgctcaagattctccaagctgggcttcaacagtatgtatatcatgaacttccagatgttcaagttggatttagaaaaggcagaggaaccagagatcaaattgccaacatctgctggatcttcaaaaaagcaagagagttccagaaaaacatctacttctgctttattgactatgccaaagcctttgactgtgtggatcacaacaaactggaaaattcttaaagaaatgagaatacctgaccacctgacctgtctcttgaggaatctgtatgcaggccaagaagcagctggacatggaacaacagactgtttccaaatagggaaaggagtacatcaagactatagattgtcaccctgcttatttaacttatatgcagagtacattatgagaattgccagactggatgaagtataaactggaatcaagattgccaggaaaaatatcaataatctcagatatgcaggtgacaccacccttacggcagaaagcaaagaactaaagagcctctttatgaaagaggagagtgaaaaagttggcttaaaattcaattttcagaaaactaagatcaatcacagcttccaaccccatcatttcatggcaaatagatggggaaacaatggaaacagtaaaagactttattttggggggctccaaaattactgcaggtggtgagtatagccatgaaattaaaagacgtttgctccttggaagaatagctatgatcaacctagacagcatattaaaaagtagagacattgctttaccaacaaatgtccatctagtcaaagctatgatttttccagtagtcatgtgtggatgtgagggatggatgagaaagaaagctgagcactgaaggatagatgattttgaactgtgatgtttgagaagactcttgagagtcccatggactgcatgaagatccaaccagtccatcctaaaggaaattagtcctgaatatacattggaaagactgatgctgaagctaaaactccaatactttggccacctgatgtgaagaactgactcatttgaaaagaccctgatgctggaaaagactgaaggcaggaggagaaggggctgactgaggatgatggttagatggcatcactgactcaatggacatgagcttgtgtaaactctgggagttggtgatggacagggaggcctggtgtgctgcagtccatggggtcgcaaagagtcggacaaactaagcgactgaactaactatctcaagcctaggtcttgggcatagctcccactgtcaatgaatggtaggcagactgtccattcctaatatgggcaagtagattaggagcttctgattgcctggtttcagctctaaagaagaacacaatagtcacatcttctcgatgacctccttcagcagggggaagaatttcacctccactcctgtcatcagacaaaaattaactgcctgtgggagagagctaagaattctgtcaccagactccatgctataactgatattagcacacccacacaacgcaaatctggaaacttgttctgatttctcttcccccctgaaataaaaggcactttgctgcttctgtttttaaggaaatgagactttttttagaaacgatttttcttttggtaaatatttctctctctccagataaactcctctgtttaaggatacagctatagaaaactcttttcagtactgccatttttgacattgtgagtctagtaacatgtctttcctgagattccaacagattctcatcctcactgctatttctagactattgtgacatcttgtgcttgacaatagttatcttgggccttgttgacttcaggatggaaataacatttgtatcatacatccttggttttctctgttctcagcgttgccaatcctacatgcaaaaactttgtttttatatttccagaaatcttcatatcatctaaatcaccttaatgaaacaaatgcatatggtaaaaagacattttatgaataatttgacaaatgaggttctaaatgtagcatttcttatgaatagtttgcacattagttatcattctttgattaattttttctttgggaaaaatatgggttaatctcctctagatgactatcttttagaattgaaaccatccatcttttttctttattttttaaagcatttcaatgtgcttcatttcaatgctttttccccccttatttccttagcaatatttcacttaaattataaattcaggcatgtatctcttactgtttgttaaaggaaagaaaagccattccaaatagatcttttttcttaatttttctcctcaaaaaaatttgtcatttcttttttagtttgttaccacatttaaaaaaacattgacataatttgacattttcaattccttttctgttttcattctactacagttaagactatcagactcgactcaccacttattatgattaaaactatgctcccttaacccaaattcgtatgttaaagtttgcatctatagaaccttcagttcagttcagttcagttcagtcgctcagtcgtgtctgactctttgcaaccccatggactgcagcacgcccggcttccctgtccatcaccaactcccagagcttgctcaaactcatgtccatcaagtcgctgatgccatccagccatctcaccctctgttgtcccctctcctcctgccttcagtctttcccaggatcagggtcttttcgaatgtgtcatttcttcacatcaggtggtcaaagtattgggagtttcagcttcagcatcaatccttacaaggaatatacaggactgatttcatttaggatggactagtttgatctcctttcagtccaagggactctcaagagtcttctccaacaccacagttcaaaagcatcaattcttcagcactcagctttcttcacagtccaactcttacatccatacctgactactggaaaaaccatagctttaactagacatacctttgttggtaaagcaatgcctctgctttttaaaatgctgtctaggttggtcataacttttcttccaaggagtaagcgtcttttaatttcatggctgaactcaccacctgcagtgattttggagcccaaaaaattagtctctcactgtttccattgtttcctcacctatttgcaatgaagtgatgggaccagatgccatgatcttagttttctgaacattgagttttaagccaactttctcactctcttctttcactttcatccagaggctctttagttcttctttgctttctgtcataacagtggcatcatctgcctatccgaggttatttttgatttctcctggcaatcttgattccagcttgtgcttcatcctgcccagtgtttctcatggtatactctgcatataagttaaataagcatggtgacaatatacgtgacatactcctttcctatttggaaccaatctgttgttccatgtccagttctaactcttgcttcttgatctgcatgcagatttctcaggaggcaggtcaggtggtctggtgttcccatctctttatgaattttccagtttgttgtgatctacacagttaaaggctttggcatagtcaataaagcagaaatagatgtttttctggaactctcttgctttttctatgatccaaaagatgttggcaatttgatctctacttcctctgccttttctaaatccagcttggacatctggaaatttaagattcaggttctgttgaagcttggcttggagaattttgagtattactttgctagcatgtgagatgagtgcaattgtgcggtagtttgggcattcttcggcagaatcatagaatgtaactatatagagatagggtctttgaagaagtaattaagttaaaatgaggccattagagtggtcttttagccaatctgacttgtgcccatataagaagaggaaattaggacatggacatgtacagagagaagaccctatggaaatatgagagaagacagccatatacaagccaaggagacagaaactaaaccttccagtacagtaatctcaaacttctggcctccagaattgtgagaaaattagaatgtaagcatcttaatgtcaaagaccttgtctattttgtaattgtgtgccagcaacttgaatatgcatttattaaaaatataataataactattaaagctacaatttcagattgctaccaatattagcagaatttaatggctgaggaaagtaagacttagaggagaataaatagcttgccagagatgacgtagctagatgtagcagccttaggattcaaaatgtcacatacctgatgctaaaatctgtgaccttaatcacatgatttactgcctccgagtctcctgatttctgaccttttgataaattttgcagccctgttcatcccttgaatctgacatttggtgcaattttagcaagcctaagctttggatatctatatgattatggtgagtaccttcctatagtcacactacttctgccttctttggttaaatcttccctgtcatgttagatattccattcttaccctgccccacaagaccttgaaacactcttccctttactttgcaaaaaagtgtgtccttgggtaagttacactctctgggcctcaatttcttaacactctctttcagatttaaaagttcagcaataatagtcacaactcatgtttctttattgtctttcatttgggaatcttaagttatcatgattttaacttccacaatttaatttccctactaccaagacatactaatcctacaaagagttgggagattccccacattgtaggagggccattctttacgggtttagttgtagcacatggcctcttcatcaattaatcaagcacaacaatgctttcataagtatttcatgaatgtgctagggtctttgttaggtgtctggtgtgcgttgagatgctacagatggtcagtgcatagatgtgaccgtgtgtgtgcatgctcagtcacttcagtcatgtccaactctttgcaatcccatggattgtagcctgccaggctcctctgtgcatggaattctccaggcaagaagactgaaatcccctaccatgccctcctccagggaatcttcctgaaccaggaattgaacccacgtctcctgcattgcaggtggattctttaccactgagtcactggggaagcccagatgtggccttaaagttcaaaattgagtgggagatacagacaaacctatgatatgtttagtcaaagcaactgatatcagagttaaatccaatgataacagtaacaagaaaatcagttgtggaagtatggataagcacgactagaatggtataactgctatttgttctagggatttaagtccagggagcatctttaaagctggtagaatccaaaagtatgaaaagaaaccaagaaacagggaggtccttctctaccatctgatctgattcctagaggagaatttcagacactcctctggtttctgagttcacctccttccctaaccctggaatttctgtctttctaaccaagcttcagccttgcaatcaccagcaggcaggaaatctgctgttcattcctgaagcttcagggacctgccttctgcttggactatttctgagctaccatgttggcaaggcatttggtttgcaggcatgtgggtcagggcagccttcttagcaagatgacccaggaggggcttgaggaatagaatggaaaggaagcctcatcagcgatcacagccaagaagtcactccaaaagatatagttaatctgtagctgaggagtgaggcaggcttggcatccttggaatgttttgtttcaggttagtacctagctgggattccctttccctcaagagacagactacaggagaactgaggaagtgttgttgatcctagagagcccttgaaaatagagtaaagaacaaaagtagtacatatgcttcataaaagtgctttatactctactctctttccaagaactagttgtcatatgtgtgtgctcagttgcttgagttgtgttggactctctgcgaccccatggactgtagcccactaggcttctctgcccatgggatgctccaggaaagaatactggagtgaggtgctatgctctcccttcaggggatcttcccggcccagggactgaacccgagtctcctgtgtctcttgcactgcaggcagattcctcaccgctgaggcaccagggaagccctagttcttgcataatgcattagaaactgtaatgctactttcctatgagaagaggaataataccacactgtgagtgaggaaacagaggtggggagagcttcagccaccgtcccagggtcatacttgtatctcaaagcagagccaggatgcactcacaggccttctgctcccaggtctcgtggtccttctgctagaggacttcccatccacgcttagcatctaggaactatgctatgagattctagaggttgggcgtcccttcctgccttctccaacttggccacatttacttcctgagtcagtgcctgctgcctgctcagcaaagatgagccctacccacatcagaggagagtttaagatgaatgcataaagaatatgtgtttttatatatatgtatttatatgaatatatatatatatgagacatatgacatataaaatgacatcttagatgtgtggaatatcatcaaaatagattacatgatatgccacagggtatgtccaagggatgtttgaataatttggagtctacattggaaatctttgcaaagttaaggataagttattctattttgggcaaaagctaatgtggctgcagacttctgtactatatatgtgtgtgtgcatgtgtgtgtgtagtatgggtttccctggtggctcagtggtaaagaatcacctgctattgcaagagacacaggttcgatccctgggttgggaagatcccctggagaaggaaatgcaacccactccagtattcttaatataatatatatatgtaataataatattatatatacatattaatatattgtatcacacacaaagcagagagaggacttattgtttgttgaattaacagctaaatgaatgcatgcatgcagagatgtgcttgtttttgtccacttgagccctcctaagcaacgaggtattaaggaaaaggaagtatttctaaagctctctctctgtttctctgacagttatccatagagtaccctcaggcatcaatgttcatcttcctttcggaggaacttatgggcataaacattccagattccatagctaaaaacatcagcttggcttgatgggtgctgtagtcttaggttgctttaaagtttcaaatgtctctgtccttagcatacccaaaatctgatcttcttagagaaaaagaataaacaacattccagactattcgcttttttaagggaatcactcttcaatcctttcttcttttgagaaagtcttttacatatctgagaacagcgtagagtcccttgtcagaccttaatctttatagcagagaaaaataatttatactataaactggacttatctgtttgccagttacctattaatcataactaaaagcatgattacaatgtcactaagaaacccgctaaagccctgtaattgtcctaatgcattctactgtcatctcatcaaaagcacattatccagaggactgtaaagtcaagaaagaaccaaggagtttgagatcagtccattcttttgacaaagaagaatactgaagaacaaagagttaaagcctctgaagctataaacattgaatatgaaaaattatataaaaggtcatatattaacttctgaataccaagaaacatgccattaatatttaaatgacaattaacaactgcagaaatatttgtaagcttaatgacaaaaaagaccaactaagaaattatgaggagcctgtacaattcaacaataaaatgacaagttaacctaatataacgtagcaaagaatgtaaatagacacacataggaaacagaaaatacagataatatttttccacttgagtcaaaagaatattaactttgagaatagctagtgcaaatgagagtataggttggccaacacactttatttgtggaaatgtgtaaatagctagcacaaccagtttggaatggcaatttgaaaatattgacaaattttaaatgtatttaacttctcaccttcaattccaatatgaaaaatctattctttagctatactcataagtgtccaaaatcatatatacatgatttaaatttgtataaataaatactatattaaataatatatgtatattattttaccaaaaaaagatagaaaaaagaaacaatcaaaatccctgttaataagtgattgttgttgtgtttagtcactaagtcatgtctgactcatttgcaacctcatgggctgtagcccgccaggattctctctccagaagatttcccaggaattcccaggcaagagtattggagtgggttgccttttccttctccaggggatcttcctgaccccgggattgaatctgattactaaagaatgttgcaaccaatataatgaaattctattttttaaaaaaatatttgattgaatcacttaaacagtgactagattaacactgcatgataataacatcttttaaaatttttatttatttattttaattggaggcttaattactttacaatattgtagtggtttttgccatacattgacatgaatcagccatgacatcttaatatcataatgaaattagtgctgaccttgtggagtccctagaatctgtcttaaagtgccattttgttccaggatatgaaggagttaatgaaggataaattttgaaaagtgaattttatttataatacctgtttgtaaaataagttataaaattttaaaaatcttaaaatgatctcaattttgacttggcttacttatttacagacttatttacttatttatttactcactggcttactacttacaacctttgcctacaatatatatgatttttaaaaaacctttctatatagcagatattttgtatctaactagaagaatttcctgagatttatgtagcctttactataatcttgattgtttaagagagaaaaaaagcaaatgtttcttgttcctcacttataaaagaaggaagattctttacaatcctgttaccatctttttaaattttttaatgttttattgacactttgattaaaaatgtaatgaaatattatttctcagccatttataatcctacttactcatgcccacaattcctctttcgatttttgccttgctcaaatcagatgctccgtatagaaactgtgaaataaatcttgtagaatatcttttaaattaccttcgtgatttcttagagggttctcagaaaataacaaagttttgttgcttcaccctacaagaagagatgctataaatatttaggttcattcattagttacgtttgatgaattgcatgagaaacattctcaaataagaagctactcaggctgctgctgctgctaagtcgcttcagtcatgtccgactctgcgaccccatagacggcagcccatcaggctcctccatccctgggattctccaggcaagaacactggagtgggctgccatttccttctccaatgcatgcatgcatgctaagttgcttcagtcgtgtctgactctatgcaaccctatggacagcagcccaccagtctcctctgtccacaggattctctaggcaatactggagtgggttgctatttccttctccggttcaggctacctaggttaaattggtataagtaaatgccattaacttttccaaacttctgggctttatgacagtttcccagagattcatctatgcctcactgtccatgtcacatttctgattatcagagtcttgatggtatattgcttgatactaggccacaacagtatattgcaatcagccataatttcagttatttaaagtgctaagttggctacaaccatacttacctctttttaaagactttttttgagagagaagttttagccttacaacaaaattaaaggaagacagtgatttccagatacccctacctccaccacacacacataacctccccctcatcaacatcccccaccagagtggtgtatttgctataactgatgaacctacaaagccatgccacaggcaagcagagtccataggtgaccttagggttcactcttggccttgtacgttctatgggtttggacaaacgtacaatgatgtaaccatcattatgctatcatacaaattttactgccctacaaatcctctgtgttctacttgtgttcattcctgctgctcttaaccctgacaacaactgatcatttcataatctccactgtattgcttttttgagaatgttctacagctggactcatacaatacatagcattttcaggttggcttcttttgcttagtaatatgcatttaggttgcttcatgtcttttcatgccttgatagctcatttctttttagcactgaataatatattattgtctgcatttatttatccattcacctattgaaagacattctgttggcctccaagtttggaagttggaagttgctatacatatctatgttcaggattttatgtacacataggttttcaaccccttcatgtaaataccaagaagcatgtttattcaatcctatggtaagagtatttttagtttatgagaagctgccaaaccgtcttccaaagtggcttgcataattttgcatttccaccagcaacgactgagagttctcacagctccatatcctcaccagcatttggtattatcagacgctcccacttcttataagtgtatagtactctctgtgttataatttgcatttctccaataacatataacatggaacacttttttatgtgtttgtatgccattgtatatcttctttggtgaagtggctgctaagactttgacccattttttacttgggaccattttcttattgtggagtcttaagaattctttgtgcattttatataactgttttttcccatatgtgttttacaaatgttttcttccaatctgtggcttacagtgaaattctatgaagcctttaaaaggaaagagataaatctgtatgtactgatatagaaatatacctgatacattattaaatagaaggaaaagtacagaatcaagacaactctgtgcatataaaacatatgtttttctttctggaaataccaaaggaaaatggtgatgtgaaatttctattattttaatttgtttctttttctacttttaaaaattttctaaacatttaaaatttatttattctacttagatggtagtatagactttaggcaattttcttcaatttgcttattcctcaggttgtatgtgtgatttaatttaaaattaaggaaaaaaaaacatattttaatagaattttaaaggaagtccttcaaagaaatcaaaacatgccagtttccccaaatttgaccctagctttctcaatttttgctcatggaaaactattctccagccagcctggccaaatacctcagtttgctttcctctaccttatatttatctgttttgtttccttagtatgacatacacttccttaccttcctggcatgtctctaatttttcctcatctttaagaatcaatctaagcatagtctgatttcggtgctgaccatctggtcatgtccatgtataaggtcttttcttgtgttgttggaagagggtgtttgctatgaccagtgcattttcttggcaaaactctattagcttttgccctgcttcactccgtattccaaggccaaatttgcctgttactccaggtgtttcttgacttcttacttttgcattccagtcccctataatgaaaagggtatctttttgagtgttagttctaaaaggtcttgtaggtcttcatagaaccgttcaacttcagcttcttcagcgttactggttggggcatagacttggattactgtgatattgaatggtttgccttgaaaacgagatcatactgtcgtttttgagactgcatccaagtactgcattttggactcttttgttgaccatgatggctactccatttcttctgagggactcctgcctgcagtagtaggtataatggtcatctgagttaaattcacccattccagtccattttagttcgctgattcctacaatgtcaacgttcactcttgccatctcctgtttggccacttccaatttgccttgattcatgggcctgacattccaggttcctatgcaatattgctgtttatagcatcagacattgcttctatcaccagtcacatccacaactggtattgtttttgctttggcttcatcccttcattccttctggagttatttttccactgatctccagtagcatattgggcacctactgacctggggagttcctcgttcagtatcctatcattttgccttttcatactgttcatggggttctcaaggcaagaatccttaagtggtttgccaatgccttctccagtggaccacagtctgtcagacctctccaccatgcccatccatcttgggtggcctcacaaggcatggcttagtttcactgagttagacaaggttgtggtcctagtgtgattagatggactagttttctgtgatgatggttttagtgcgtctgccctcctgcaacatctaccatcttacttgggtttctcttacccaagtaagagaaaagctctatacagtcaacaaaaacaataccaggagcttactgtggctcagatcatgaactccttattgccaaattcagacttaaattgaagaaagtagggaaaaccaccaaaccactcaggtatgacctaaatcaaaacccttatgattatacagtggaagtgagaaatagatttaagggactagatttgatagatagagtgcctgatgaactatggaatgaggtttgtgacattgtacaggagacagggatcaagaccatccccatggaaaagaaatgcagaaaagcaaaatggctgtctgaggaggccttgcaaatagctgtgaaaagaagagaagcaaaaagcaaaggagaaaaggaaagatacaagcatctgaatgcagagttccaaagaatagcaagaagagataagaaagccttcttcagcgatcaatgcaaagaaatagagggaaacaacagaatgggaaagactagagatctcttcaagaaaattagagataccaagggaatgtttcatgcaaagatgggcttgataaaggacagaaatgatatggacctaacagaagcaaaacatattaagaagaggtggcaagaatacacagaagaactatacaaaaaagatcttcacaaccaagataatcacgatggtgtgatcactcatctagagccagacatcctggaatgtgaagtcaagtgggccttagaaagcatcattatgaacaaagctagtggaggtgatggaattccagttgcgctatttcaaatcctgaaagatgatgctgtgaaagtgctgcactcaatatgccagcaaatttggaaaagtcaacagtggccacaggactggaaaaggtcagttttcattgcaatcccaaagaaaggcaatgccaaagaatgctcaactaccgcacaattgcactcatctcacaggctagtaaagtaatgctcaaaattctccaagccaggcttcagcaatacgtgaaccgtgaactccctgatgttcaagctggatttagaaaagatagaggaaccagagatcacattgccaacatctgctggatcatggaaaaagcaagagagttccagaaaaacatctatttctgctttattgactatgccaaaacctttgactgtgtggatcacaataaactatggaaaattctgaaagagatgggaataccagacccccgacctgcctcttgagaatcctatatgcaggtcaggaagcaacagttagaactggacatggaacaacagactggttccaaataggaaatggagtacgtcaaggctgtaaattgtacccctgcttatttaacttatatgcagagtatatcatgagacatgctggctggaagaagcacaagttggaatcaagattgccgggagaaatatcaatcacctcagatatgcagatgacaccacccttatggcagaaagtgaagaggaactaaaaagcctcttgatgaaagtgaaagaggagagtgaaaaatttggcttaaagctcaacattcagaaaatgaagatcatggcatctggtcccatcacttcatgggaaatagatggggaaacagtggaaacagtgtcaagactttattttttggggctccaaaatcactgcagatggtgactgcagccatgaaattaaaagatgcttactccttggaagaaaagttatgaccaacctagatagcatattcaaaagcagagacattactttgcccacaaaggtccgtctagtcaaggctatggtttttccagtggtcatgtatggatgtgagagttggactgtgaagaaaggtgagcgccgaagaattgatgctattgaactgtggagttggagaagactcttgagagtcccatggactgcaaggagatccaaccagtccattctgaaagagatcagccctccgatttctttggagggactgatgctgaagctgaaatttcagtactttggccaccacatgtgaaaagttgactcattggaaaagactctgatgctgggagggattggggcaggaggagaaggggatgaccgaggatgagatggctggatggcatcatggactcgatggacatgagtctgagtgaactccgggtgttggtgatggacagtgaggcctggcgtgctgcgattcatgggatcgcaaagagtcagacatgactgagtgactgaactgaactgaagcatagtcttcttcagaaagcatttaattttcaggacaaagttaagttcttccttctctggattcacatacatcttacatttttttcatgggctttccaggcaattcagccataaagaatttgcttgcaatgtgggagatgcaggtgaaaatgttatattgctatgtatttttgtctcttgtctttttggaggattttaaagaaggttgagagccaaagaactgatgctttcaactgtggtacaggagaatattcttgagagtctcttggactgcaaggagatcaaaccagtcaatcttaaaaaaatcattgctgagtattcattgaaaggacttatgctgaagttgaagctccaatattttggccacctgatgcaaagagtcaactcattggaaaagatctgatgatgggaatgattgaggtcagtaggagaagggggcgacagaggatgagacagttggatagcaccactgactcaatgatatgagttcgagtaaactccgggagatagtgaaggacaagaaagcctggcatgctgcagtccatggagttgaaaggagtttgaacaactggactgctaaacaacatcaaagcatctggaggtcaggcctttttattcataccaatagataaaaaggcacagttgctggcatagtatctagaatatagtaaaaacttaaaatgcttgatgaatgaatgcatttttaaggaaaatgatttgtccttaatctaagagtagtcaagtcaaatctagtcaaggctctggtttttccagtagtcatgtatggaagtgacagttggactataaagaaagctgagtgctgaagaattgatgcttttgaattgtgatattggagaagacttttgagagtcccttcgactgcaaggagttccaaccagtccatcctaaaggaaatcagtcctgaatattcattggaaagactgatgttgaagatgaaactccaatactttggccacatgatgtgaagaattgactcattggaaaagaccccgatgctgggaaagattgaaggcaggaggagaaggggataatagaggatgagatggttggatggcatccccgactcgatggacatgaatttgagtaaactccaggagttggtgatggacagggagtcttggcctgctgcagtccatggtgttgctgagtcggacatgaatgagcgattgaactgaactgaacttaagagtagtcaaaaggaaaactcatctttggactttccaagaattctccaatgtggttaagaacatggctctttagtaagactgcattgtttaactctcagttctgctctcttatcagctatatatcttgggacaattacagaacttctccaactttcttttttttaatataaagtaaagataataatagaacattgcagacttgttgtggattaaacgaaataaaacttgtaaagagtttagaatcatgtctgcatgtgagcatgctcagtcggaagtcatgtacaattcttctgcaattccatggactgtagcccaccaggcccttctgtccatggaatttttcagataagaatactggagtgggttgccatttcctcctccaggggatcttcctgatccaggaatcaaacctgcgtctcccaagtctcatgcataggcaggcagattctttttgatggagccacctcggaacagtgcctagcacatagtaaaaactaaatgcatattatccttcagaattactgtattagatccattctcttatttttttagaaaaaatattcattacttttaaaatttttggctgagctggatctttgttgcttcttgtggactttctctagtttcagcaagaagggattatgctctcattgctgtgcatggacttctcattgcaggggagcacaggctctagcatgcaagggcttcagtagttatagctcaagggctcaccagttgtggctcaccagcttaactgccctgtggcatgtgggatcttctctgactggagatgtgacaactacattggcaggtggattcttaaacactggaccactacaggaatctcattctctgctttgctttgcttttctctctttctctctctctctctctctcttttttttttttttttaacttaaagtggttgaaagaattggaattactctatgtcttgagagtcccttgggctgcaaggagatccaaccagtccaacctaagggaagtcagtcctgaatattcattggaaggactgatattgaagctgaaactccaatactttggccacctgatctgaagaactgactcattggaaaagaccctgatgctgggaaagattgaaggcagggaagaaggggacgacagaggatgagatggttggatggcaccactgactcaatggacttgcgtttgagtaagctgcgggaattagtgatggacaaggaggtcttgcgtgctgcagtccatggggttgcaaagagtcggacgtgactgagcaactgaactgaactgaactgatgtctttatttgcccaacaatggtacatattggtggtaagccaatttgttcctggaatcttctcactttctcaacacatgtgccttgaagcatatgtccttcttttggaccctaatcttccattttatgcttcagttcatgtttctagcttgtgcctggtttcaatgaggtaagagttatttttcggattctgaatatccttcttgtcttgtaggcctgctgctcttcagagctccattcatgtttcctcctttttatgtagtttttcaagaatggctgtaatgatcgcatgaattataatatactacagttgtttgcttgtttgtatttcctactagactaagctttgctaaaccagtgaccttatctaattattctgtttagccaatgccaagaacaaggtctaatggtctagaaacatgctaaatcttgaagcaagtttatagctttgaatgatctgtgctttaccagacttacaaaaaatattttttagctaaagtgacttctctatagtttcggcaccccactccagtactcttgcctggaaaatcccacggacggaggagcctggaaggctgcagtccatggggtcgctgggggtcgggcacgactgagcgacttcactttcacttttcactttcatgcattggagaaggaaatggcaacccactccagtgttcttgcctggagaatcccagggacgggggagactggtgggctgccatctatggggtcgcacagagtcggacatgactgaagtgtcttagcatagtttcctttgtagctatgatgaaagtaatttgctaagatttttttcaattatttatttattttatgcaaattaattacagatcttctaattacaaagtagacaaatgttgtgggggaaaaaaaacaacaacagatataattcaagatgtgggtcctgccatagtagctcagagattagtggtagagacaaagcacaatcaataagaaaagcacacaatcaatacgaatgatacaaacgatgtgttgaaaataagaagtagagaaagtgatgtgagttaacagataggagcaggattatgctggccattattttaacaaccagctctctcagagtgaaagccttgatttgtagcatttgccagtttcctgatgtaaatactcctaccaatactggattttagctacgcttgagatcaccaaatgcaaaattgtgaaaatatgtacataattcaaccttgctagtgatttggagctggctccaaaatgcctttggatgggagaaatggttttagacagtcatggtctggtcattcatcatggaagagctacagattgaaaatagtcttgatgattgtatagaaattagattagtcatggaaaatacattccagatttggagactggtaaaagcaatgcatagcagcagtaatgagtgtggaacattcaggcaaatatactcagcacacagtaggtattcaacaaatatgtttgtaaataattgaacagtagtaaataaaccatctgattggaaaatgcatctctgtacgctgagaactaagaggacagctcagatgttgcagcaattcacaggtctctttcttcataaagatgcttttcagagatgattggatgacatcactgattcaatggacataagtttgagcaaattgttagatggggaaggacagggaagcctggcatgctgcagtccatggggtcacaaagagttggacacagctgagcagccataagatagtattaacaaataattctaagaaagaagaaaattttagttttcaaaggtgagagaggcttctaaacgttgtatatcttcataatagctttacttccattaaaaatgcctccaaatgttgaattaaattacagcattttctataaatatagatgaaggagggctagataaagatcaaccattttctctcacctggcttataaatatggaatttggtggttggcaggagtcaagaaatgttttttgtaaaggaccagaaactagatgttttctactttgtgggccatatggttttgtttcaactctgccatttaccatgaaaacagccatagacaatacgtagatgaatgattgtggttgtgttccaattgcatcttatttacaagtaaggtaagggacagatatggcctaaaagccatagtttgcatgtttcttgcctggagcatcaagagatctaggaaatttaggtttctttaaagttcatgggatggcaccaaagatcaaaaaaatgcccaaaattcacaaagataatatgacctaaaaattactcaataaacaggatgagatggtgggaggcatcattgactcaatggacatgagtttgagcaaactaccggagacagtgaaggacaaggaagcctggcatgctgcagcccatcaggtcgcaaagagtcacacaagactgagtgactgaacaacagcagcaaagagagtttaatccgttgtggtaggatattttcccaggactcttccttctgctttgatgtctaggtttggtggttttgatgttatttgctatcataattttggtacctacatatgttctcaaaaactgatctctgaataaaacttgatatgggatattacttaattcttataatattaaagttgccaagaaagcaataaatctgcttaataatcttccactcacttctttgataccatatccatgttcttgggaacatgagggaggtggagatggtgacaacttcttcaaccagtcatccattgatggatccttatgttgtgtccacatcctggttacggtaaataatgccgctatgaaggtaggagtgccctttttgagttaagtattttgttttctttggatacattcccagaattgggactgctggatcatatgccggttgtatttttaactttttgaggatcctccctagtattttccataatggctatatcagtttacaaatttcaccaacactgcacagggattcccctttctccacatccagaccaacgtctatctctcgtctttttgttgatggtcattctaacaagcaagaagtactatttcattttggttttaattttgcatttttctaatgactagtgatgctgagtgtctttttatggacctgttggctttttgtacatcttcttgacatccactacatttaaaaccaataagcacataatttatgaagtgccaaccaacctgtcaacaaacgcatgatgaagaaggaagatggggtcattggcagatcctggtacctgggacatagttccgttcatgtagatgtgcaaggcattgtgcatactgctttgagaggtatctgctatcccagtaagcggactagcaaatcctgttggcaaaaagaaaattggaaaaaaaaaaaaagtagtttgttttaacgattgaaaatctaagtgagtttctcatttggtttacaactgcgcttgaaaaataattgcctgattcaaaacaacaaagtcaatcataaaatgcattctgtattgggactgttcatattctagatacccagtgagcatttaataaatctttgtagagttgaatggtgttaatctggtcacaatggactgattagccagatggaattggctaagccagtctgtgttccatcctgttgcttctgcctactattcctcctttagatcctaaaaagtaataagacctttttgcaataatcagcatagtcactctcacttcattctgtaccacgacttaaaaacagctgtttccagctgttatgtgtcctcttgctttccagttctggtggttactgttaatttttatttctgattccagagaaaaattaaaacttgtgaccactgacataacaattcatctttgacagtctggaggacttcgggtaatgtgtttcattttgcaaaatatttcaaagttaattaggactccattaaatggctctattcattgcaccaggaataataattatgataagagttatttttttctgtatgttaattgacctaaatgctttctgtgacataagtccttcagtctttgcaacagctctactgattagaaatcatccccactggaaagaagagaaaaatgaagttcagaaaagtcctgagttttccaagcttgcacaggtagtagcagagtcagtattttaacccatatcagttagacggcaacatctgagttcttgatattccgtgttctctcccatacattaccagggaataggtgaagtatgatatcatttcagtgtccattcagggaaaacacaaaagaaaagtagaatgcagatttaaaatcaaacaaagtgggaggaacagagttaaactgtaaatcagaaccaagctaaaggaaaatgccaaggacatattgaatttcaaaatttagcattatcaggaaaacagaaactgtgacgttataattttatttttaagggtaggatagaaacagtgcagacaataggaggcagaggggaactagtttcctctcaaacaattaggattattttgttgtcagctccatttttaaagtgcagctcttgacttttgagttcagtgctttgcgttctcctgccgctgtggctgacagtatctctgcctcctcagctgatgtttttatctcctccttttcagttttacactcattctcagagacaatatcaagcctagctacctccggaagcttagcccaagaccacacacttctctctcccctctgacatcgcttgtgtatgacaacttttgtgattgtgtatgtgtgtgtgcgcttagttgctcagtcatgtctgactctttgtgacccatggactgtagcccaccaggctcctctgtccatgggattttccaggaaagaacactggaatgctttgccgtttcttctccagggaatcttcctgagccagggatcaaatccacatttcttgcttctcctgcattggcaggcggattctttaccacgagtgccacctgagaagcccaagactgtatgtacatggttcttaatatgtgcagggatttttctaaaagcttaacatgattattttcatgtaaccttcagaatgattctacaaattagatatcttcataatctctgttatgtagatttggataaagcagtttagagagattaagcaaactgtctaagattaaaaagcaaataacagaagctaaggttgggaccacaaacctgttttattccagaagttaagctcttaaatgcattggtttgttgcttttcctattagtaataagtcatatatcatggggggaatttctgtagagcaatggtctttaagcttttatctttgagtagaacaaaatgaaagctttaaaaccatcttttatgtatgctctcacatattttaagtagtttctaaattgctttaattataattgcaaatagttttagaggaaaaaattcaggggtagatattgcaaatagtataaattttaaaataaaaatttttaatcgccttataaaaaatgtttccagtgtaatgatttgatatttgccatcatccatatcaaaagtacctagataaactcttctattatagtctgaaattttataggattttctttttttcactagatctcatgttcttgttctgttttcccacaggagtgtgccaaaatgttatatattatgcttgaaatattttttaaaaaattcatcagcctatcatacttttttgaaacaaaactaggtataagagttaaaattaccttttaaaaacttcatgtgacaatataatctagattgtcattaaaaattttagtaatacatattttattagaatgatgtaagactaaatattttataaataagttattaaaagtaaagttttattgaaaattcatttattaacaatatttatgaaagactgctatttaaaagggattctttggtggctcagacagtacagaatcttcccacagtgcaggagatcaggctcagtccctgggttgggaagatcctctggaaaagggatggctacccactccagtattcttgcctggagaatcccatggacagaggagcctggtggggtacagtccatggggttgtaaagagtcagacacaactgagtgactaacatccattagttaaaaattattgcagatatctacaataccctgcaatagtcgttgctagaaagaataaggctcagcatattttcaattctaaattaaaaaaaaaaatcatcagtcctgaaaactttattctcataagaaactagttggtaataaaaagatttttataggagtttcacttaattacttaaagtcttttttaagtatatgtcaaaaatgacatagctgattcagcatcaaaataatctaatccatcagtgacaactcaaacaaaaattctttgatgaaagtagctataagtgcttttatttataaagcatttaactttcaaggcactcgctactttttgttagagccatttattccagcaacgctggcaccaatattctgagttctttgctggtttagtacctcgtatgattttaccccttctgggtgataagtatggatataggctagaggtacgcctttctttggaaaagttgaagggagattatgcaagggtaggtggtaaagaagaatctcaggagatttctcactcagactcattttagtaaagtatatttgggaaaaagatctggaaataaattttcttaaaactctctgtgccaggtaccctttaaagtgtcttagtgaacctgtagtggtgtttttagcaatttgaagatactgtttgcagagaaaagacttttagagaagagctaactgagttttaattctatgtttcttactgaaagtattacttgtctcaagttatgttttgtgagccttgttttcttcattggtaaaagagggaataattaatactcctctcatacccttagtcagtcagttcagccactaagtcctatctgactctttgtgaccccatggactgcagcacaccaggcctccctgtccatcaccaactcctggagtttactcaaattcatgtccattgagtcggtgatgccatccaaccatctcatcctctgtcgtccccttcttctcttgcctttagtcttccccagcatcaaggtcttttccagtgagtcagttcttcgcatcaggtggccaaagtattggagtttcagctttagtatcagtccttccaatgaatattcaggactgatttcttttaggatggattggttggatctccttgcagtccaagggactctcaggagtcttctccaacaccacagttcaaaagcatcagttggtctgtgcttagctttctttatattccaactctgacatccatacatgactactggaaaagccatagctttgactagatggacctttgtcggcaaagtaatgtctctacttttgaatatgctgtctgggttggtcatagcttttcttccaaggagcaagcattttttaatttcatggctgcagtcaccatctgcagtgattttggagcccaaacactaaagtctctcactatttccattgtttccccatctatttgtctatttatcaaacaatttctctcactattatagcaagtgtgatacaattaatatagaatctagcacaagacaaaatgcttcctgaatagtacctatcatttctataagtctgctgcatctgataaatcggtgcctatccagagagctgctaaccaagaatacgggccactccaactgcagaaaaactgcttttgctacaaatttccaccttaaggatccataccagcaccagacacttcttgactcgacccatgaactgtagcccatcaggctcctctgtccctggggtttaccaggcaagagtactggagagggttgccatttccttctccaggggatcttcctgacccggggattgaacccaggtctcttacacctcttgcactggccgcagattctttaccaccagcaccacttgggaaacccctcctaaactcgatttttctacgaaagcctgcctgcttgccctcagccaacaatagatgtgtcagggtgatcctgaaaactagattgctattctaagcatgttttcagctaggctagagtttctttactcatttttttttttttttttttgctaacttgccagatgatgcatctaggaatgtctccaatgttcttatgaagggtatttgaatgagaagcacgtggggtttgtcagaatatattgtgttatgtgctcagaaatagttcaaaggtataggttggacaaacacccaacctctttgtgataaacaccaaattgttaatacagacaactgattatattaacaattttaaacggactatgtgtatctaatctcttaaaataggactggaaagtcctcagaaacagagaccaaagatgttgctttgattttccatagtcagaaacagaaccttgcacatctttgtatttaaaagaaaatataaaatatttcttaacatatatatatgtatatatatatatatatatcagatacgtacaatgtatatatgtgtgtacacacagatggaatactattccagccctaaaaatgagagaacgtttgccatttgcagcaacatggatggacttggagagcattacgctaagtgaaataagtcagatagagaaagccaaatgctgtataatatcacttatatgtggaatctaaaaaatacactaaactagtgagtataacaaaaaaggagcagactcacatatatggagaagaatttaaaaactatcagtgaggagagaaggggggcagggccagtatagggatagatgaataagtatgaactattaggtgtaaaataagctacaaggatatattgtacaagacagggtatatagccaatactttataataactataaatgaaagataacctttgaaaattgtgaatcggtatgttgtacacctgtaatttatataatattatatggtaactatacatcaattttttaaaaagtcttaaaaaatactactcaattcttcactgataccatcctgtaaagatcgggaagaggaaaaataacatttctctccataaaatctacaagggacctttaaagagctctatgctcctacttaagtgaccaaataaagagaatgtcatagatgtaaataacataaaatgtgaataaattattttctattttacttcttcacacaattcattttttgcctggtgaatcaccttgaaaaatagaaaacaccaacatcagtagtttctcttgccaagattttattcccttttggaagagcgagtccaagaggaattctagtctatagatcaaacttttcaaacgtctttcatgtacatgatctcatttgaatcccaggagtgaatattatcactgtcccaagtttccagatgggaagacgtaatagaagttaaaaaacacacttaaattcaagctagaaaccgaggcaatcaaggaattgactatggttctgactgatttcaaatcccatgctcttttctgcccactaaactggggtagtgttcataccgacttgctgacacaccttgaaaaccttttattatgcagtatgagatgaatttagtgactttctattttcatccgttgactatcatcagcaagtgcagagtgcattattgcctctctctcgtccaagggttcctcacgatggaaagtctaataagccagcagggaccttgttagcagtcacaaatgccaaaatggctcaaagttctttgtgaagggcagtgacagttgcccaaattactctttgttatgccttcaagtctgcgtgctacattcctatgggaaattaataaacacagtttcaggctgatgataacaataggaaatttcagcttgtcactccatctatctttctatttcgtttcttccccaatagcactcaggagagtttttttgtttgttcactcgttttttaatattgatgccaatctctgagccctggagattcagctttaattggtacagagtgggactcaggaacttggggttttaaaacaccccaggtggttctaatgtgcaaacagggttgaaattcaatgatttaggcaacattgctctctaacctctacacttgaactcatgctttaaaaactttacctctgaatatattattttattcacctaaaatatttttctcctatattgtgacagtctaaaaatgcttgggtctttaaaattccacatcatgaacttctaccttgaaatattttcatattgataactgttccaatgtgtacccatgaaaatgatgtttaaaaaaattgagcaactactacaaagcaggcactaggtaggtgttttcacatgtattatctaattcagtatactcctttctaggaagctgggctataagtgttacattttatcatgcctgttggagtctaaaatgtgaaaaaatacatggttaaatttttagaacagagtgactgaactgaactgaactgacattgaatttatttaattttaagtgcttctttaacctattttaacatttcatagagtttcagggatataactgaaggaaaaaaccaaacagaagatagaaaaatgtatattgatgcatgttaagatcaaagagaagggacagttgacagcaacccccctccccctgcccccagctatattctaattcactctcctggtgcagctttcttctggaactatgaaatacatagcctcacagggttacacacaatgattttatgaggttgtatttcacggttgagtacttttcaaaagtttataatttagatgacttgcagcagaaatataatactgtagatcaaaaaggatccttggatctatgcaagtccctagttacaatgaagcattaactttcatttcaacttcaaggtttcttacacaaagtgctagctctacagtcatagatataattaattagcatttatgtttattagaaaatatttttaatttgactcaggaagtctcttcaactatggggagcaaagcaatgaagcaaacatggttgtgggtgactgtttaccatgtaattgttatatggcagttaaaaggttcagatggtgcagaatccgcctgcaatgcaggagaccctgatttgattcctgggtcagaaagttcctctggagaagggataggctacccactccagtattcttgggcgtcatggcaacgcactccagtattcttgcctggagaatccccatggacagaggagcctggagggctacatacagtccatggggtctcagagagttggacacgactgagagacacagcacacacagcataaaaggtcacaaatgatccacaaattatgtaaatttcttagaaatgccaacactcaagccctaccaaaaactgtgattcagaaagtcactgggattcaccatttgtgttaaaaagtctttcccgtggttctaaggcacactaaagtctgcattagggaactgcggctctaattttcattgtttgcccaaagacaatggtgaaaccagtcaaaattatagtcatctccatgaactcaatgaagaaagtagaattatttcctgtattatcacttgaaattgtttattttaaatatcagactgatttctcctcttggtaacaccaatgttcacgtgtgtatatatacacttgtgtgtgtgtgtatgcaaagaaaatgacatgtaatccttttgtttatatacatattatatttacacagtatacatgtgatttacattatccagtgattgtttcaacatttcttagatcttatctccagtttataaacatacctataaaattttcttacacattaatcataatggttcattcttcatttacaatttgtctgaaggttgttttaaggtaacattttaaatggcattccatattcttagacttgtgtattcaggaaaactcaggagtcatagtagaatcatttagttcactaaatggcacagactgaatcaagcaaacgtcttataggcaaagtgttattcaagctgtcttctcttccttgttcttacttataactgaattgatagtacctcctaccgttggtatacttcattaggtgtgataagtctttggtaatacattaatgttaatgctaactatttttgaagcaaaggtagagtcacaaccatcttagtctctgtttcccacagtctattctgattttagcactgaaagtcctgaaagtcctgaaagtcctaagtagagccagatttataggcatgcaactgagtgttcctcatccaaacctaaccatatctggtttaatgctttgctgctgctatcttgaaatttttaataatttttgaatgaactgcttcatgttttcattttgtgatatattctggaaattatatagctcatttcaattctggaaaaccccatagtcttgggcaaacagggatggttagtcacactgcaaaatttctatatataatattccttcatcagcttgatttgatagggcatttctatcatacagaagtctattaaatcacttaaatgtatcctaaaaattcatttatgtctttgctttttaatcaggtaagatcatttaatgatactttcatatgcaagtcacagattgtcactcatttataattttctgtaatgcatattataacatatttgcataacatgttagagttcataaagcatatttttttcacttgacattcccagtaatgcactagaaaaatattaatctgatctcagagggaaaatgagggtggtagtggagaatatatagacttgtactgtctgtcagtttccataatgtaaatagtcccatgattgtttctttcaaagtaccaactgggtctcactgagtaaagggttgggaaaagatattgtcaactctcaaagcagatatgaattagcacacataaaggagatagagtaaagctcagcatgcttattttacaaataaatttaatgagattgaaagtctagatgacacattacaagtcacatgtcttctgaatggctaattccaaaattgtatcgatcatctcatttcaaatcccatattttccccttatatcattctgtttttcttctctttcatatctataaacttgtatataagagttattgctatgaatgtgtaagagcatacatgtgcacagatgaaaaaaaaattaacatcaaataaacttaggtggtgctagtggtaaagaacccacctgccaatgcaggaaacataagagacgagacatgggttcggaaaatcccctggagaaggaaatggcaacccgctccaggattcttgcctggagaatcccatggacagaagagcctggtgggctacagcccatgaggttgcacaagagtcggatatgactgaagcaactcagcacacaaaagctagccacaggaagtataattagtaaagattctatttatattaagggtaattatctttaagatgctttgattaaaatcacttgaaaatatgtttgaattttttcatagatgtgcttgcattcatcaaacttcaatttaaaatagagtcttccctaggctaacaaattacaaagcctcatcttcatagtttaattataaatggaaatataattcatatctttgttatgacttaattaccacttggcaactgagattactgcttttgctatgctctcaactactgtgtagtagactgttttattacatacttatgaaacaatcctcacagtaactctgtaaagaggatagaactgaagcaactttcaggtggtgaaactaatgcttagaaaggttcactggtttatccaaggtcattcaactggtaagtggtgaagccagaatctgggctagttatctatcagatttctgctctcaatcattctgttatacttccttacttggtgtagatttatgaattgtattgaaatataaatacattgctgccgtctatggggttgcacagagttggacacgactgaagcgacttagcagcagcagcagcataaatacattaagatgacaacagatctttttttctatttataacaatacccttaattcttttaaaggagttcccttaattctgtttatgaaaaaagttggaaaaaaaaaaaaaacacaaagcatcaaggacttccctgggggtccagttgctttggtcttcaccttccagtgcaggtgttgtgtgttcgacccctggtcagggagctaagataccacaagccttgcagccaaaaaaccaaaacataaaacagaagcaatattgtaacacattcaataccgactttacaaatgtcccacgttaaaaaaaaaaaaaaatcttaaaaaacaaacaaacaaaaaaaaaaacggcatcatatccagcccagttttctataaaatactctttcagcatagagaaggcccttgatattatggatattcccactctcttttagatgagtaccttaaaagctttgtatcatagaacttcaatatgtagtcagttgaatcaatcatgttcttgtcacaaaacacagagaagtttgaaattatttggtaatgccaccagtataaaaggttagatgtttatccagtgtttggctctgtcaaatgcaattcccttactgaatgtcaaacatttgtagactctatttttcctccttttcccttgatattcattgtcacttgctgctgttgtcagttcctcttccatcaccccacgccatccatcagcttcctaggcatttgctcttttcctttctgcttttctttttagccatgcaggatcctagttcttattttagagggctgtctaccagcatcaataccatgcaaagccatattagagtgcaaggtgaaaagaaaaatcagtaatactgactctgtctttatttaaatttttgatatttcattttaaaaaagtttctagagatataactccatctcaaagatggcttttatgagtctttctaagtagaaagtactatcattttgctccaagttggatatcagctcagcttagatcttatatataatgtttctgaaatatataatatataatgtttttgaaacattttttgtccactggaggtctcaaatattggtctattccattgtttggtatttactttctaaatggagttagaaactagactaagcagtgactttatcacttaatgaaatttttccattaatagataagatcatgtaaattttacaacgatgtatgaggtaggtattgtgattttccttattttgtaaatgaaggaattcaactcaagacaatgaccaaaggtcaactaattagtaagtaacagtatcaggattttaacccaggtaatctgttaaccactggagaaggaaatggcagcctactccagtgttcttgcctggagaatcccagagacaggggagcctggtgggctgctgtctatgggggcacacagagtcggacacgactgaagcgacttagcagcagtagcagcagcaatctgttaaccaggcttccccggtggttgagtggtaaagaatttgcctgccaatgcaggaaatggcaacccactccagtattcttgcctgggaaatcccatggacagaggagcctggtcctctaagtgttggatacaacttagtgactaaacaacaacaacaaatctgttaaccacaactttatgtttcctacaaaactctatttggaagacttggggatatgacctaccctggtgatggtctaactttactacctattagctgtgtaaccttgtcaagttaaattctctgaatctcagtccttcatctatgagtgaaataatgaatatggtattagtcatttgaaaggagtaattaagataatggatgtgaaaggctgttaggaactgaaaatgtagggctacattgatgtcagcagtggtttttaattacaagggactctaggaatttgcaagactattttttagcagactgaaaaaatttgctttttcccctttttttcctttggatcttacctgacattccagctcatctttgaggatatcagatcctcacagtttctctgacaataaacacttgtttaggtgccctctatttaataacactcataattccccctttttagtcatttattttctttagattacagttagttattcacggctcagttcttacactgtaaattccaagacagaaacatctgcatcatatttgctagttattcctagtgtcatatctttttgccttttcatactgttcatgaggttctcaaggcaagactgctgaagttgtttgccattcccttctccagtggaccatgttttgttagaactctccaccataacccatctgttttcagtggccttacatgggccacagtttcattgagttagacaaggctttgatccctggatcagtttgattagttttctgtgctagtggttttcattctgtttgccctctgatggatgaggtcaaaggagtggtttttccagtaatcatgtatggatgtgagagatggaccaaagaaggctgagagccgaagaactgatgcttttgaactatggtattagagaagactcttgagagtcccctggactgcaaggagatcaaaccagcccatcctaaaggaaatcaaccttgaacattcattggaaggactgctgctgaagctgaagtcccaatactttggccacctgaagagccaactcatcagaaaagatcctgatgctgggaaagatttaaggcaggagaaggggcaacagaggatgagattgttggatggcatcattaactcaatggacatgagtttgagcaagctccaggagatgatgaaagacagggaagccttgcatgctgcagtccatgaagttgcagagtcagacacaactgagcaactaaacaacaagaattcctagtgtatagcaaagtgcctgcacagagtggatactttataaaagtttgttgaataaatatggaatatttagttttctttctaaaaccatgtaactccagttgatagcataattttatttgaccttattttaaatttgctattgatttatttttacaaacaattttcaagtacaatagcataattataaaatcagttaggctgcaatttttggaacatgcctttagtatcccaaggtttatcattgagtaaaatggatcttggccctgaattggctctcaggcttttatttaataggtgatcctatcaatagtctcctgatggaatcattaattacatatagagaagaccctgagcttgtctgaaaaataagtatggtgttgctcaccttgtagatgatagtagatgttaggagagaagagataagcaattctgttctcaaacaaaccacattaatataaataattattcacccataaatagtggaatatattttgggaagttccataggaaaaaaggacatggaatggctgaggaaaacagaatttcatagcctttttattcttgttggaaaatgagcttaagtgggaaaattttatagaaaatggagaaaagtaaataacggcacgtgagagaaaataatttactttttctcagttaagaattgaggcttcaacataaatgaggcatcctagaccaaaactaaaatcccaagcaattactagatcctaaaatgtaaaaaaactgaaaaggctcaaacagaaagacctaacacacatctgttaatatgttcagtaaatccatttcctcaaactcctactcacaaccaaactcatactcagctgtggccttgtcaatgaattgtggacagtagaatgtgggcagtagggaggtagatcacgtccaggtttggcccatatatccctcttctaagaccctccaaatacgcttttcccttatcttccagaagacgcagaagaccatcagggagatggggtttagagaagccattgaaatggtcatgtgaaagactgctcaccaatcattaacatccacactggacttggcatgagcaagaaatcaaccaatgtttattaggtgaggccactgggtttgtttgttacagcttctacgacttgtcagtttggactaccataacaaagtacaagagattgactgttataaacaacataaatttatttctcagagttctggaggctgaaagtctgagattagggtgcgggcatgatccagttttgatgagagcactttcaggttgcaaactgctacattctggtataccctcacatggcagacagcagagaagggaagcaaattgtgttgtcacttacaatggcattgatcctattcatgagggctccacccacatgacctcatctaatcccaattaaatcccaaaggtccagcttctaataccatcacattggggaggagataaagtttcaacacaagaatttggagagaacacaaacattcagtctataatatcctagcatgtttctcttatacattctaatttccttttgtaaaacaaatggtcataagtttaataacttgaaaagtctggagtaaaagaatattttgacacttcatttacctgtagagaattagttttgttttaaacaaaacccagacataatactgtggtaaaggcatatgattttaattttatgcacttcaatgaacactaggaaaaggcactgtgacagaagctgctacctttttttttttttttttaccaatactaattcctttcttttccaaataatgactatatttagagctaagtgtggccatgtctgcgtgaccatggggataaaatagaactgataaaaagctcttccagcgtaggtctttaaagaggactgggcatgtgctcctttccccattttgtgtgcttactactgattcgagtgaaggcattagaatgccttctagaggtggaagttgagaatcaaggaccatagaattgtactaccagttctagatcatctacctctgcattgtttcatcagagcgaaataaacaaccactttttcagagccacattattttttttttttccttacaatgttttaacagaggagaaatagactaactcagcaatgtcctatgaaactcatggcatatggaaggaatctcagaagggctacttaaaatcacagttgctgttggtgtatatacaaatggggcttcttatcctgattaatcaccatgcttcaagtatttattacaactgatcctttttattaatatattcttttctacctttttaaacaccaaagttataatttcaagttcacgagctttcaaagcttttattttcaagtcacctactgtgaagtcactgtcacaagattctgaatttattctagtatggaaaagaaaaatacagatagggttaaaattaatgaccaaaggtaacaattctaaaacttcgaataaatcctaaacagtactttcttcattgtaatatttaacagttaacaaacattgtcttatttgattggaggaagaaatggcaacccactccagtattcttgcctgcaaaattccatggacagaagagcctggcaatcaacagtccatggggtcacaaaagaattggatacaacttactgactaaatagcaataatcttatttgatacatggacattcagagataatacagaaatattatctccattttataaacgaaaaagatgtgctctgtgaacttcattgacttacacaaggtctcaagtcttgagctcaagacagcgtgtgacaggagcagctgtcagtgtgcgactgttatcgcgagactggccgtaagccgtcccctccaccaacggtcagatcgcggtggtccccccggcagcagtctcccagggtggcagtctgtggaccccggcccagttgcctgccagcgctgacaccgggcagggcaggggcccttggtttggcttgtaaaaactgcgaaacagcggcgccctcagtgacagccagcgagcatccaagcgggagtggcggcctgtgggctactgtgaggagtgtcgatggcgaaggggacctcccgcctggcctcacaccagctgccccgcaggtgcgaaaggagcctgtcctgacctctgagggaggctccgtgagccccttctctggctgttaaactctaagagtattataattttagagtataatactaaagttatactctaagtatatatattataattttaaaagtattaaaatttaatactctaaaagtatagtatagtatacttttagagtattaaattttatcttccctgggttgggaagatctcctggagaaggaaatggcgcccaactccagtattcctgcctggagaatctcagggagggaggagcctggtaggtgacagtctgtgcggtcgcaaagagtcggacacgactgagcaacttcacttcacttcacttcacttcacttcatacttttagataaaattttgcggaatagacaatagcatttgttgttttggaggtttacaggaacatcgtgacctgacccacatggtcagctgcaagaacaagaagtatgcaacaattaaccacacccctccgtcagttcagttcagttcagccgctcagtcgtgtccgactctttgcgacccatgaatcgcagcagccaggcctccctgtccatcaccatctcctggagttcactcagactcacgtccactgagtccgtgatgccatccagccatctcatcctctgtcatccccttctccttctgcccccaatccctcccagcatcagagtctttgccagtgagaactcttcgcatgaggtgtccaaagtactggagctttagccttagcatcattccttccaaagaaatcccaggactgatcaccttcagaatggactggttggacctccttgcagtccaagggactctcaagagtcttctccaacaccacagttcaaacgcatcaattcttcggtgctcagccttcttcacagtccaactctcacatccatacatgaccacaggaaaaaccatagccttgactagatggaccttagtcggcaaagtaatgtctctgtttttgaatatgctatctaggttggtcataacttttcttccaaggagtaagcgtcttttaatttcatggctgcagtcaccatctgcagtgattttggagcccccaaaaataaagtctgacactgtttccactgtttccccatctatttcccatgaagtgatgggaccagatgccatgatcttcgttttctgaatgttgagctttaagccaactttttcactctcctctttcactttcatcaagacgctttttagctcctcttcactttctgccataagggtggtgtcatctgcatatctgaggctattgatatttctcccggcaatcttgattccagcttgtgtttcttccaatccagcgtttctcatgatgtactctgcatagaagttaaataagcagggtgacaatatacagccttgacggactccttttcctatttggaaccagtctgttgtcccatgtccagttctaactgttgcttcctcacctgcatacagattcctcaagaggcatcttaggtggtctggtattcccatctctttcagaattttccacagtttcttgtgatccacacagtcaaaggctttggcatagtcaataaagcagaatagatatttttctggaactctcttgctttttccatgatccagcggatgttggcaatttgatctctggttcctctgccttttctaaaaccagcttgatcccctccgtcacctagcctttaaaaggactttgctgaaaggcttctgggagtttgggggttgtttttttattgcagaagaggggtgaaccacccctcttctgcaataaacctctctctcctccaaactctgatgttttggtatcatttggcctcactatgcactgggcacagggacttgaggtaacagtcatttttcaaggatcagagtatctttataataatctaagcatttcccaatgagattatgagctcagaattcagcatttgtattcaaggttttatgatctacgtttggatttcagctcttatgatttatgtgctgtaagcagatggcttccagcatgcttttttttaaaatctatgaaatggggataataaatagaaatcaaggctgataccagacagataaattgtatactaaaataccttatttagtaataacctctcaataaatgttagctgttagttctttttgagttttaatttttgagacagaatagatttataggacaataaaaatatgaaaccctaaggagtaccatttatgttgtattttatgataattgcattccctagcacaatacaataaaatttggatattgctcctagagttgtacaatgtagtaaccttaatgaatttttttaaaacaattgaatagcttttatcttgaggaaagtggtatctcaccacacactcagcataaaagataagctcctgtttcacatgtattccctttgatctggctaaagctgtgatataaatttctgctgaaattgacctaagtaaataaataatcactttcaccctcttaaatttcacttttgaaaggataattattcatagtctctggcatgaaattgattggctctaaaaagatggagactagagttaacccttggcatttgtagctgtgatattttaaaagaccagattttcctaagtaagtttcttgaaatttaaaagtcaaaagtttatttaaaaaatttttttaaagtaacattggtttgtgatgttatatgtttcatgtgttcaacattatattcaacttctgtacacaatacagcaaaagtttagttccatctgtcatcatacaactgactccatttaccctttctgctctctctcaaccccttcccttctggtaaccactattctgttcactgtatctatttattttccttttgtttatttatttgtttttttttttagtaaaataatagaatatctgtctttgtctgacttatttcatgtagcctaataccctcaagattcatccatatcttgtaaatggcaaaattttctatttttttaagggtgagttatataccattgtgtgtgtgtgtgtgtttatctcatctttacttctcatccactgatggatgtttaggttgttttcatatcttataaataatgctgtaatgaatatatgaacacaagtagtgttagttcctcagtcgcatccgactctgcaaccccatagactgtagcctgtcaggctcctctgtccatagaattctccaggcctgaatactggagtgggttgccatttcattctccaggggatcttcccaacccagcaaatgaacccgggtctcctgcatagaaggcagattcaggggatatattttttcaaattgatattttcttattcttcagataagtatgcagaagtggaatagctggttcatgtattaattctattcttaattgttttgaggaatcttcatattgttttccacagtggctgtacaaacttgcacgcccacctgcaattgtagagggtactttttttctccccatcttcttcaacactctttattggccaagttacagtatttgtagcatctcagttccctaacctgcaactgaacccatgtccagtactttttatttcttgcctttttgataaaagccattctaacaggtatgagatgatatctcattgtggttttgatttgcatttccctaataattactgatgttgagcatcttttcatctgcctgttgaccatctttgaaaaaatgtctatccaactcctcggtacatttttaaattaggttctgtgttttttgttttctctttgctgttgttgagttgtatgctgctgctgctaagtcacttcagtgtgtccaactctgtgcgaccccatagatggcagccaagaaggtgcctctgtccctgagattctccaggcaagaacactggagtaggttgccgtttccttctccaatgcatgcatgcatgctaagtcacttcagtcgtgtccgactttgttcgaccctatggacagcggcccaccaggctcctctgtccatgggattctctaggcaagaatactggagtgggttgccatttccttctcctgagttgtatgaattttgtgtaattgggatattaaccccttatcaactatatgatttgcaagtatcttctgtcatttcattttacttttcttaactgtgaggaaggtttttagcttgagatagtctcattttttatttctgcttttgtttcctttatctgaggagacacattcagaaatatatcgctgagactcatgtcagagaacaaagaggaatagggaaaagtatatctaatctactttctcagaagtggaaatgtatacttttattagtgtattgactatgattcttctatattttagggcatctaaaatgtccaatgttttcacaaaagaatttcttctaagattcccacatagagtagagtgattagtgctggaccatgaaacagatgcaggattaaaagtgtatcagagctctaagttctgctctgccaacttagggaagccagaatgggatacacatgtaatattttacatatgttatatttctgctgcattttgaaatatggtggttacctagagaaaaagcacttgtgcttgtgctgaaaactgaagtaaccatatacagtaccttccaaggaatgccatttttacctgaaggcacaattgagaaattaactataattattcagaattaggcagtttggtagacaatttattcaaagtaaatatgttacttactacaactgataatattttttgccaatgagaaaattttagcttacaagcaaaaattagaattttggaatgttttattccataactataattttgtcagattctcagtatttaaagacattcctcatgagattgttggtgatattaataaatttgacatttagtattatacaatgagaaatgtcagcatttgaaagatctacaattggagtgaacctgtattttgcaaatgatccatatatgatattacaaactaattatgaaaatcattcataatgtaagatagatcaacaaattttaatataacaaatacaaaaagcttattaatctgctttcagctttgacagtacaactgaacatttaagaaattatactagttaagttttggtagagaaagataaagaagatccagaattatcaaaaaatatttttaaaacactgttcttattccagttttatatgtgtgaagatggattttcttcaaggtcttcaattaaacatcttgtcataatatgttgagtgtggaagcagacatagaatccagatgtcttttttttttggcaaatatataaatcagtgtcatgccactcactacttttttgaaaatatattgcaattgtgttatttatactagcatggaatgactaatattattttataaatattttcaaatcttatgttttagttttaaaaatggcaagtagctatcaacataacccacattaagaaaaagctttttggagttctccatacattataagatgtatgtagatgtaagtagatattgaaaccaaaatacaggattttagatcaatcgttgtagaagattataaagcagtcgtacaaatacatgaggcatagccaaattgtatttggttcctcaaatctcccaactcataatttttaagtgaacaaatgcataaaatagaattctaatttttctttgcagtgtttttattgctaatgagtggtggcattttccccaagatttgtcccaaggaagtgaaatctccacagaccaaatgcctgactctacatttagaaaagatacattgttaactttctccttaaagatctaggcccttaagttgaaatatttattggaaaaaaaaattatcctgtgggaaatggctatttgccattttttaccttcaaaaggtaaaaaatctaaatgaaaactattattagtaaatacatatcattaaactagtaacctatgcttaattataagggaagttggggtgacaaatgagattgcaaagaagacaggtgtgggggggaaggaaacatgtcttgcatacacagttggaggtacggatgtgtacatcctcacaatagcctcgatatgtaattattaaatacacttttaaatgagggagaagacgctcataatgttagaattgatgctcaagtatattgctacatgccttcaaaattagtatttcaatcccttttaaatggccctgtcccaatatgagatatttttcctctgaacttcccagatggctctagtggtaaagaactcacctatcaatgcaggagacagtaacagactgtattcgatccttgggtcggggagatcccctggagaaagaaatggcaactcgctccagtattcttgcctggagtatcccatgaacagaagtgcctggcagactgcagtccatggggtcacaaagagttggacacaaatgaagtgacagtactttctctaacgtagcactccatattatttcaggctttttaaaaaagtaacattaccttctaataaaaagaatcccaattcaaagcaaactcactcagacaatagtatccaggatacttatttaaatttcttacatataatagaaaggatcctatttgtactgagagtttgaagtaaagagaaaaaaggatattctttgggtcaaattagttgaatcagctcattcaactagaaggagacaggatgtctcctaaactcattgaaataattagttcactgaagatggtgcttcagcttaatttgtgaatattaaatattgcaatagtgtcacaaggattaagtgatataacatgtgggaaatgagaagtctggcacaaagcagattttattattattatgatcaggatcattgcatgatcagaatatcaacaaagttggattttattgttattattatgatcaggctatcataataatcattcttgttgttcagaatatcaacaaggttggcaaggtgataattctggggttaagtaatccaggcaaagaaagactttcctggtctgcatgaactctttctcaaaaccttccacctcattctaagtcagagaacaccaatctataccaacctacttagttttttgatttcgatggcaccccactccagtactcttccctggaaaatcccagggacggaggagcctggtgggctgcagtccatggggtcactaagagtcggacacgactgagcgacttcactttcacttttcactttcatgcactgaagaaggaaatggcaacccactccagtgttcttgcctggagaatcccagggacgggggagcctggtgggctgccgtctatggggtcacacagagtcggacatgactgaagcgacttagcagcagcagcagcagcattgtaaacaagataggtaaggaagagcttgagccttgccatcactagaatggctcatcacacttaaccaatctccttggcattctggtttacacagtagttctcagtttaatttatattttgagtttgtgtgaccacttctggatatactaagaaagtccatttctcaggcagggagcctggaaactagaacatcctttgagatgtcattgtgacctgtcactgacctttctcttctggtatgaacactgttaccttaagactttattcaaaatttcaaaattcccattatctttcatgaaaacccagaactgacttaccatttcctaaactggcttccctggcggctcagtggtaaagaatccacctgtaatgcaggaggccgcttgcaacacaggagactcaggttggatccctgggctcaggaagatcctctggagaaggaaatggcaaccccctccagtcttcttgcctgggaaatcccatggacagaggagtctggtgggctacaggccctggggtcacaagagctggacatgactgaacaactaaactaccactagactgctcctcaaaaaattctggcaaacaaaaaggtaagatactttccaggtagttacaatataatagaaagggtggatagactgcctgaaaaaaaagattccagagaaacataatcgaagggatttttttaagaagagctgctacataaactagatgttttagtattgcacagcttaagaggacaaaacaaggcccaattattagaactcaatggcagaagtttcataattctcaatctgatgcttacctttctgcctcctaaaatagtcaccaactgtttatgatactctgtattctagagtctacaagagtttccatactccaaccaactcatcttcatctccttcatcttaccttggataaagtcctcaccattcatcatcctcccacagcttattgattagtatattctacaccttctattgttgtttttgttcagttgttaagtcatatccaatgctttgctaccccatggaatgcagcaggtcaggcttctctgtccttcactatccctgagttttctcaaactcatgtccattgagttagtgatgccattcaagcatttcatcctctgtcacccctttctcctcttgccctcactctttcccagcatcagagtcttttcgaatgagtcaactcttcacattaggtggccagagtattggagcttcaacttcaacattagtcctttcaatgaatattcaaggttgatttcctttaggattgactgttttgatctcctggctgtccaagggactctcaagagtcttctccaacaccacagttcaaaagcatcaatttttcagtgctcagccttctttatggtccaaacctcacatccacacaagactactggaaaaccatagctttgattatatgggcctttgccagcaaagtgacatctctgctttttaacacactgcctaggtttgtcatagcttttcttccaaggagcaagcatcttttaatttcatcttttaacggtggctgcagtcaacatctgcagtgattttagagcccaagaaaatgaatctgacactgtttccatattttccccatcaatttgccatgaagtgataggactggatgccatgatcttagttttttgaatgctgagttttgagccagctttttcactctttcacattcatctagaggctctttagttcttgtcactttttgcccgtttaatggtatcacctgcatatctgaggttgttgatatttcttccagcaatcttgactccaacttgtgcttcactcagaccagcattttgcatgatattctctgcatataagttaaataagcagggtgacaatatacagccttgatgtactcctttcctaatattgaaccagtcccatattctatgtccagttctaactgttgcttcttgtcctgcatacaggtttctcaggagacaggtaatgtggtctggtattccatctcattaagaagattccatagattttgtgatccagtcaagggctttagcatagtcaatgaagcagaagtagatttttttggaattccctagctttttctatgatccgccttctttttctatatccgcctttgctatttctcactataaacacgggcttccctcatagctcagttgataaagaatccatccgcaatgcaggagacaccagttcaattcctggttcaggacgatccgctggagaagggataagctacccactccagtatctttgggcttctgttatgctcagcttgtaaagaatccacctgcaacatgatcgatctggcttcagtccctggattgggaagatcttctggagaagggaaaggctacccactccagtattctggcctggagaattccatggactatacagtccatggttttgcaaatagctggacgtgactgggtcaatttcactttcactataagcactattctacccatatatattttctccttttgttttatctacacttatgttttcatacttctatttcactgcataagttgtttcctctactagaaatgcttttccttcctttcttttcttggtgagaaattactgatatttcaactttcagttccagttgcaccatcttgggagatagttctggtttagctctgggttcctatctcattttattttgaccatcatattgtgttttccttgtggattcgtgtgatgttttctcactagacggtgagcttctcaaggtcagaaagtgtgtaagagtcatgtttgtatgtctttgaactttcataatttcccatagtaccaggttcatggaggactctttaagctgaatgcaattagatttcatcttaacataaagaaattccttttttccctaatgagacaggttgatctgtatccttaaatggccacatagacataccattagagtggacatgtcagcaaaatgcgagatgttgaaacgaatatgttgagaagagtcttcaaactataagtcccatggttctatgttgcaatgtgcttgaggctgaaacataccattcaattagagttgttccttgttcctgcaccttcttctattttaggtaacagaagctgcttttgctcttttctccttgattctgggaattcaccctgaaaagcaatagcttttatctccagaaatgctccttccctgagtctatctcaggaaattttcttttctatccttgctcctctctgtttttctctatacctcacacatcataatctgtttattcaggattcagtctatactttgcttctaagctaattgtcagaaaaattaatgaatgataaccaagttgtcaaaaactaattccagtttaacataataatagctgccatttattgaagaaatcttatatgttccttacatgtattatattattaaatccttatatgaatgctgtaagttattattcttatctacattttccagatgatgacattaaagccctgagaagttaaatagcttactaaaggtaacagatgtaggaagtggtagaatttaaatcaaatcccagtcaccttgattgcctttaactactttgctaaactgccaactcatactcatcctctaatatacactccagtatgaattttgcattaacattattataaagtgtgcaatgcaacacaccatgggtataagagatttgcacatgagaagattcttctttgaatccatagcccatactccatagggaccacctaatcagaagactaccttttataatgcatgctaatttttctttgctttctgggtatctttcatgcaattcataaatcgcacatcttcagtctttagcatttaaatctaagaggaaagctgcagttcctccatcccaggactgaccgggggaatctgtttcatggggagcacattacgtacctctaacaagacccaaaagaaaaaagaaaaggcagcaataattgtgaagttcaatcaaaacccagagttcacctccacctgcgtgagttgagggagcagagagcagggtttgccggtgctcctgcttctccagtctcgtcttcctggcagctgtgcccacttgggcactctctgaagtccaagacacctctcacccttagctcctattccggttttgagatgaactctgtctctccagtgagcaaactattctctcgatcttgatctctgtctttgtccttccccactgaaaggaaccaatgtttcttggagatatggctgattccagactttgggcagtgtaggcacaagatgaatctagaatattttttttgcaccagaaaaaaaaaggctaaaaatgataggtcatgaaacagagacacagagtcacaaaaataagcttaaaggcatgctcagtggtgaaatctggaatggtcactgtgcagtggggaatctgggccacacctagagcaggtgatcaaattaatatctcctaagtgagatactcaccatgcgcatgttcaccatgtaccttcagctgtcatactctcttagaaagacacaaaaccacttctagaaaattctggctaagaatacactacctggatccattctgttaaaaattctatttaaaatatgttgtgtgcatgctcggtcatgtccagctctttgcagctccatggactacaaccaccagggctcctctgtccgggaagttttccaggcaagaatactggagtggttgccacttcctactccaaggggtcttcccgacccagggactgaacccacatctccagagtctcctgcattggcaggtaggtgttttaccactgagtcatctgggaggcccacccactaaaaggaggaacattttatttaaaattggaagactatattctttaaaagttgtgaatctcctttaagaaaaggttgtgaaaatatttcagattaaaagaaactcaaagagacagaacaactaaatgtcacctgaccctagactaaagcctgttacagagaagaaaaaatgatatcaaggatattattagtgaattaaaaatattacaatataaacagcagattagacaaaaaaaatgatatcaaggatattattagtgaattaaaaatattacaatataaacagcagattagactaaagcattatacctatatagaatttactgaagttgttaactgttctgtgcttatataagagaatgatacagtgaaatatccaagggtaaagtattttttacccttgcaatgtatctatgcaatttatcctcaggtggttcagaataagaaaggaaaaaaaaagataaaatgtaaacagtaagcaaatatgagtagaaagtatatgtgtgaatgagagaaagaaaacttaaaatgtaaacagtaagtgaatctgaatagaaagcatatgtgtggttttttttacagattttattgttgtaatttttctgtttaagcttaacattgtttcttagtaaaagtttaaagataagaataaataaatgtgtcccttgtaaggaaaaactcttgctggtggctgagatcaatgttttgtgacatcttgctcccagtaaataagcttcataaaattggtatagacaaactaagtgttgggttaggtgcaattggaagagttttagataatatttatgttttcatcatcaaacacacattgaatacttattaatattatattctataatgtcctttctatcctcaagaaagaatactagattgtgtgtacataagaatgctttataggaaaaaataatttacaaacataacattagtattaacaaattatttataataagcctgatgtcctctactgattctgcacattagaaacttatttgaaagccactggctctgttgacatgacttaggccacttttcttttttgacttgagatccagagaaatgaggatccctatgttatttttaagataagcctaatttcccaataacaaagttcatgctttctcactgttagaaaacatgtctgaataacctgtaaaggtcttgatccctgcctgctgtataatgtcacaaacctctgtccatagttcttcaggcactctatcagatctaatcccttgaatctatttgtcacttccactgtataattgtaagggatttgatttaggtcatacctgaatggtctagtggttttcctgactttcttcaatttaagtctgaatttggcaataaagagttcatggtctgtgccacagtcagctcccagtcttatttttgctgactgtatagaacgcctccatctttggctgcaaagaatataatcaatctgattttggtattgaccatctggtgatgtccatgtgtagagtcttctcttatgttgttggaagagggtgtttactatgaccagtgtgttctcttagcaaaactctgttagcctttgccctgcttcattctgtactccaaggccaaatttgcctgttactccaggtatttcttgacttcctacttttgcaatccagtcccttatagagaaaaggacatcttttttgggtgttagttctagaaagtcttgtaggtcttcacagaaccattcaacttcagcttcttcagcattactggtcggggcatagatttggattactgtgatattggatggtttgccttggaaatgaacagagatcattctgttgtttttgagattgcatccaagtactgcatttcagactagacatggaacaacagactggttccaaataggaaagggagtacatcaaagctgtatattgtcaccctgcttatttaacttctatgcagagtacattatgagaaactctgggctagatgaagcacaagctgaaatcaagattgctgggagaaatataaaaaacctcagatgtgcagatgacaccacccttatggcagaaagtgaagaagaactaaagctcctcttgatgaaagtgaaagaggagagtgaaaaagttggcttaaagctcaacatttagaaaatgaagatcatggcattcggtcctatcacttcttggcaaatatatggggaaacagtggaaacagtgactgactttattttggggggctccaaaatcactgcagatggtgactgtatccatgaaattaaaagatgcctactccttggaaggaaagttatgaccaacctagacagcatattaaaaagcagagacatactttaccaacaaaggtccgtctagtcaagcctatggtttttctagtagtcatgaaaggatgtgagagttggactataaagaaagctgaattgatgcttttgaactgtggttctgagtagactcttgagagttccttggactgcaagatatccaaccagtccatcctaaaggagatcagtcctgagtgttcattggaaggtttgatgttgaagctgaaactccaatactttggccacctcacacaaagagttgactcattggaaaagaccctgatgctgggaaagattgagggcaggaggacaaggggacgacagatgattagatggttgatggcatcacccactcaatagacatgagtttgtgtaagatccgggagttggtgatggacagggaggcctggcgtgctgcagtccaggaggtcgcagagaatcgaacacaacttagcaactgaactgactgaacctgtactggactataattcccttaagaatcaagccctgctttataatgtatttaagtcaacatctggaatctagctattaacccctacaaaatccaacagtgtgcccagtcctctcatgtggtgaccagcaacttgtctgtgttcctttctcttagcttataggttcagactcttgtacaccatacattgcttcctcatgttatattattctaggaccagcttgatattcagccttcaagaaatagtcaactcactcagggtcatcagagtgcaatagaaaggactcttggattttggcacttggcaaatctaggaacatatttagctctgccacttaccaaatggatggtagccaaagtacttaatatctctgatcttttttcctctctttaaattggaaataacaatgctacttcctcagaggatggttgtaagaactgagacagtgctacacagaatctttggcatggtgccttgcacatggtgattattggaaaacattaactgctaacactatttaaggaaaataaacaaaacttttattttaatagctgcaccatgttctctttagggtgatactctccttatttaaattcttctgggaaaaagcaaggctctaaggtgttcggggttaaaagaatacaggaaaatgaaagagacaatgaaactattctgtgtagctcagcaacagaagttagaggacacagcagaaaccacaatgacgagaatcaagcataaagttaaggaggttaaggaggaaataggaaaagagaaagtttcatctccacgataaggtgccaaagaggtacaatatctagtggtaaattttgagtatctgccttaccacgaattggcagcctatgacttcctggaactcaaattaaatctgtatgaatctgagtgaatgttcctgttttctctttgtttgtaggtttgtttccacagtgaaaattgaggtggcggagatgcattctcaagactaagatggcgctgagcagaaaaggatgaacaggtacttaagggaaggtgcaaccgaggttgagagctttgcaggagaagtaggctttagaagaagctgtgagaggggatctctgataaagcacagaaaacttgagggataacaggatgggaccttaacctgacctctggattttatccttattatagttaagaacatggacttgtctcaaagcagcttgtgttcagaatattgtaaactagataaaaatactaaaagttagaaaaatgtgataggtccacagtcctctatctatgattacaaaatacaaaaattctaacaatgtgttgttttgtttggcacccatatattttagtggtgaaaccagactttattctccagtaggctgcctattgtttctgtttactgccacggtaggtatagtcatacaatttgctgaagatttattcatgttttggaatatgtgtgccacccacattctgctagagtgattggatatatttatattatcatattctcaaatatttctgggcccagcattttggataagagtttgtaaacataaattcagaaaaaaagaaaatttaaatgagtgaaaaaaaatgataaagcgtttaccttccagggtatttctaaagctgaagttggcagctttatccatggaatctgattcatactgggtcaaactcaggcaaaactccacatcagctgaggaagggagcctcggggtcctggctttgtcgtggtttccaggattgcgcagtaagggcccctcaggcgtcccgttgcataaagcctggcgactgttgtactcctccagtctgctgcagacgatctgcacagaacgcctttgtgttaaatgagtgttgtaaaagggggaaggtagggaggttgggattcctcatttggattttggatatttggatgtctaatcatcaggagattcatgtcttaaatcgttgaaggaagcagctttctgacgcttgcagaaaaactaacctatgaaagttacagttcagaccacagttctagtcttgcatctaccacttaagaaaataaattccatagatctcatctaacaaataataataattacttcatataattgttgtcaggtatttgttaggaaaattaatttgacaaacatttgctaaacatccattgtataacttcactgggcatatgcctgtgaagctagccgtggctcagattttaggtctgtaccttcttcttttaattctttctctatctgcttccttggctataataaccagtttcatggcttacatgccactgcatgataagaactttctgattcctatctcaagttcaaaagctctcttctgagctctaaccctgtatatccatctctgacttcatatttcagtgttatctcacaagcatgtcaaatgtagtatttaaaaataaaaaaaaaagttgtcccttcataatagctaataaggggaaaactctgaaataagatatatatgcacgtataactgaatcactttggggtacacctgaaactagcacagcattgtaaatcaactatgttatgattgtttagttgctaagtcgtgtttgaatctttgaccccatggactttagcccaccaggctcctctgtccatgggatttcccaacaaaggatactggagtgggttgtcatttccttctccaggggatcttcctgacccagggattaaacctgtgtctcctgcactggcaagtgtgttctttgccaccgagccactttactataaaaagtaaatttaaaaagaagttaaaaatgaaaaaaacttgaaattaaaacaaggttaaaaaattgtattcctctccctatacttccagtcacatcaactatcctgaaacttaaaccagaagtccataaatcttcattttataaccaaatactgttatcatctgtattttgttcccctttatttttcacattgaaatcatcagccaaacttgtcaattctacctccagaatacaccataaatctctatttgtttacaaattctgtgatccagctgaggaagtcagactggctactcttctctgtgcatcacctgtgcttctccatccatgcctttgtttctgcctaagcacatccattccttaccgtttatttgatattctacttagtcttcaaggttaaaccaatattttgaaaaaaaaaattaaaaagtcaactgtgacttaaaaagtaattcagaattgtctgactctaaaatctgaagtttgagatccttcgccaaattattttgcttacaatttcatttatatgtgaaagtcactcagtcatctctgactctttgtgaccccatgggctgtagcctgccaggctcctctgtccgtggaattctccaggccagagtactggggtgggtagctattcctttctccagggtatcttcccaacccagggattgaacccaggtctccaacattgcaggaggattctttactgtctgagccaccagggaagcccaaaaatactggagtgggcagcctatcccttctccaagggatcttcctgacccaggaatcgaactgaggtctcctgcattacaggtggattctttaccagctgagttacctcacttctatgctggcagaagaataaactatgatcaaaatatttgacaagtcaaaaggagttctttcaataactacaaaataagaatgctaagtgattaaaaatatcacattataatttaattagcagattttttttctcagtggtatgtaaattaattccttaactgaaaatcatcgatgccttgagttccatgagggcaattaaacaggtagcaagataacaaacttatattgaagcattcagtacaggagagctcaccttgccatttgtgactattcacaacagcacttaatccataagtggcctgtgcccactgagcaaataatagggttgtctgtcaaactcaaacttgactcattttaatctcccttgatagtcagtagcacctcctttttttagaaaactaatatctccatgaagataactttctttctttttttcatttttgttcatccccagaatctagaatagagactctataaatatttgatggaataataaaaaaaatatcaatgttcatcacagcactgtttataatagccaggacatggaaacaacttagatgtccatcagcagatgaatggataagaaagctgtggtacatatacacaatggagtattactcagccgttaaaaagaatacatttgaatcagttctgatgagatggatgaaactggagccgattatacagagtgaagtaagccagaaagaaaaacaccaatacagtatactaacacatatatatggaatttagaaagatggcaatgatgaccctgtatgcaggacagcaaaaaagacacagatgtgtatagcagacttttgaaatcagagggagagggagagggtgagatgaattgggagaatggcattgaaacatgtataatatcatgtaagaatcgaattgccagtctatgtctgatgcaggatacagcatgcttggggctggtacacggggatgacccagagagatgttgtggggaggggggtgggaggggggttcatgtttgggaatgcatgtacacccatggtggattcatgtcaatgtatggcaaaaccaatacagaattgtaaagtaaaataaaataataaataaataaataaatatcaatggaagaatcagtgactcttcaactaccaacatgtgttgaacacctttttttcctagttctgttattggtaccaacattggccctaaaagatattttcaaaaatgtatcatttgtgttaaacatatattgagtcctcactctcaacagaagggcatctctgtgtatattctctaaaattcacaaatgaccttgtaggttgatatcattttattcctattttaatgacaaggaaactgagtgtggaagagtgtagtaaaaggctggtaggatctaaagccctatatcatgattaatttatggcaacaggcaaggtacatggaacaatattttaaaagtgagtcttcttgcttagctgtttatatcactgttaagaataatcaaggcaatcctatcagtgtcctactccagtgagttggcaatctataagaatgtaaagtcaagttatgttgttgtgctcagtcgcttcagtcatgtccaactcttcaatgtcatggactacagcccaccaggctcctctgtccattctccaggcaagaatactggagtgggttgccatgccctcccccaggcaatcttcctgaccagggatcacacctgcatcttatgtctcctgcattggcaggcaaataccaatatttaccacaaataccatcaagtaaaatcaccatcaaatagaactgaatgagccttgctccccaggaatgggtgctgctatgttacacaacagacacttggagaagcttttaatttccagtcacaaagatatcacttattaattcaagggttgcatgttagaaaaaaaattaggttccagattcacattggtgtgggcttcaattctggttcagtgacttactagcaatgtgtcaaatatattgtttaggcttgctaagtctcaatttcttcaactgtaatgtgaaataataaatataatgttaatatatatcatatttacatgtgtttattttaaaaaatacttaaatacattatttatatttaaatatgcattaaatatatataacagactagttcgaaattaggaaaggagtacatcaaggctgtatattgtcatcttgcttatttaacttatatcagactatatcatgtgaaaaaccaataacctcagatatacaaatgataccacccttatggcagaaagtgaactaaagagcttcttgataaaggtgaaagacaagagtgaaaaagcttacttaaaactcaacattcagaaacctatgatcatggcatccagtcccatcacttcatggcaaaacagtggaaacagtgacagactttattttcttgggctctaaaatcactgcagatggtgactgcagccatgaagttaaaagacacttgctccttggaagaaaagctctgacaaacctagacagcatattgaaaagcagaaacattactttgctttgggggatactgaaggacagggaagcctgatgtatggagtccatggggtagcaaatagtcagatacaacttagggatggaacaacaatttttgcattaaatgtaatacattggatccctttatagtgttaattaactacccatcgcagcatgtatatagatggaagcattttcattcctgtttgaaaaataaatcatatccagatacttttaaaagatctaaaaaatcctactgcctagaagactcctacagtagactcagttaaattagagaggtttgaatgaaactattttgcttaaatcacaactgccaagtaattaaatgttcagatggctaaatgtattagtaacaatgagtaaatctaccccagttacagaaataatttgaaataaatctcaaattattgttcttatatttgatatagaaggggaggcagagtaggagaaagcattagcactagctatcatcatggagattgcaattagacatggtttccaaactgagcaaattacataatctcctactatcaaggttttttacctgtaaatggggactataacaactttttatgaaggatcaaataattttacttatgtaaagcacttagtatataatgccaagtagagagtgtttaataatgacagctattatattattgcatacaagactactgggcaggccaccaaattgttaaccctgactctattacacaggatgaataatcattattataatagctatcatcaatatatcatatgaggatatattgtgataataattccatacttaaaattcaaagaatatgtcagatactaaactagtcattttacattaacagttttcattgaatccattcagaataatgctttaaaatatattattctaattttcaggggggaaagttctcacataattaagtaacttctcaaggatcttggagctaagtgagttacaaaagtcatgtttttatggctcaaaagactatccccttccacttcattaatttgctttccattcagcttagtattttcattagtacagaaagcacacatatatcttaattgtaccccaaaggtcaaagattacaaataacttgtccaatatcatctgataattggcagaggtagaatctggtgacgaaagtcttctgatgaggaatttgttctttttctgtttcaacaaaggtgacttatataatgtagagaaaaatcaagtgtcccaagtcaaatgaaaaagaaaaagaagaaacggatatattaatggagaaggtgagcttagtgttctcttaactttaaagaaatagcaggaaaaaaaaaaagcccagttattaaaagctttaggagcaaaaattctattatggcattagaggtttatctaaaagaatgtaaaacatatgacattccacagaatctttttcataaagaaaaagagaagctgttatttcacctagctgttgccatggttacctaaaacccatgactctctgctgaactgtaacttttttcttcctcctgtttgcttccttgtgatgtgcttttcacctaatgcgtgaattccctggccatacttcacgcatgcccatcatcttggaaatgttttgttctctttattttgatccatcataacagctattcttgaaacacctcttcttacagctagctcacctgctgcttgcataacattgggtctaagtgtgttgagcatagttcgcgccgcgccccaacctcccaaatcagtgaactgctttcattcaggagcactgtaaacatgcttctagtttaaaagcttttggaattaaacaaaccaaacaaataaataaataaatgaacaaatatacaaaggagatatgaatactgaaaataagctttctataaaaggtaacatttagtaattaagtaatgctttttaatgtattactttatttaataataaaccttgtcagtaaatattattagtctcacttaaaactcagattgggttataacatgcttgatcttctctatgtgtgctttctttttttgcgcacacacacacacacacacacacacacacacacccctagagaaagctaccaaaaatgttttattctaggttataaattgctgcttatttttggcatcattgttttcttggccttggttatccagtagttaaggttatggttatggtttaagattctagaaatctagctatgtctatacagaatttagttttttatgtgttaaccctggagctaatgtttttatggttttcaattttgttcagtttagcatatactgataaagcccattctatgtatgtattatgttcctgggttctgtggatataaagataaactagaaatggtttctacattggaacagctggccgtctattagacaaagacaggtctgaaagcctgaagaattatgggtactatgttataaaatctatgcaaagtgtaatgagagtccacaaggggaagatcagttctacctgaataagggctgtgagtaaacacctaatggaatattttcactataacgtgaatgaaaaggactacttcaaaatatctgctgcagttgtctgtgcaagtgactttgagagttaaagtgactacaagttagaatttacatccatgaattagtggctcgtttgatcctttttcagcctaaatggccctttataaataggaaactgcatggttgacttgaaatagcactggagtcagaagcactggtttttttttgtcctcagctgtgtcaccttaggcaaattattgtacctttgggggcctcactatgttttacaaaatgtaggtacaacactacagactaatggcagtctctcagctaagagttaataaattctatgaatttctgaaaactccattatttgtgggtgaagtaaaagatatttgaaatcaagaaaaataaggaggctttttttttttttttttaccaaaggggctgagtataactacttaggaaaatattaaggaattcaccaagtgtggaagctatttagtctcatcatctcacacagtctagttttttatttgagtgttcaattcaggcaaaaacatttaaattagtgatatgtttattatagaacctaagtttgtaaagtgaaagagataccaacacaatttccatattaattaaatcagtcattcttagggctggctctgcattagaattacagtagaaggttttaaaaatacagatgcttgaacttcacagtggacctcctgaatatgattttctggcagaaggtagatggtggagcacataaaaaattttaagttcttaagtgagtgatttagaagatactgagaactgctgcgttgttgctgtggttcagttgcagagtcatgtcccactctttgcgaccccatgggctgcagcatgctggcttccctgtccttccccatctctcggagttaggtcagttgcattgatttaattgcactaaatcgatataaataactgatcttcatttttaaaggactttaaccaaaaatgtgcaaaggaatggaaatagccagctagaactgagtttgactgtaaccacacatagcaacactgctcacagccggtggacataaatgttcactcatttcaccttccttacttaaattgtttgctgactcttcttcagtggtctttgtcccctgtatttcctaattttgtttttaacaccagttactccacagtggtttaatcatagaatgatgttaaatctaatgttgcaactattttaacccagtgtttacatactagacacacaaaaaattatttagaagtaaagttgaatacaatcataaagaaaaaagagaaaaattccactcaataatcaataaatgaatagaagaagttaacataatttggtacttctcatgtaattaagtggcttcccagatggctcagaggtaaagaacctgccagccagtccaggagatgcgggagacatgggttcaatctctggggcaggatgatctcttggatgaaatgaaaacccatgccagtatttttgcctcaaaaatttcatggacagaggatgctggcaagctacagtccatggggtcacaaagagttgtgcacaacagagcacacacacacacacacacacacacgtaattaaatatcaattagtatttgtctataaagcttcagtgtggatgttgtaaagttttggtcatttagataatccaccggtttttctagctcaagaaaagctgtacagttaaggaaagcattataactaaccgaaaaatcccatgttcaagcttaacagtattttaagcagtaacagagtatgtgagagttagatgagttttgcactatatagattaaggcaggaggtctgaaggcttattgaaatagatttttttgaagcacatttttccagcctttcctgcacaaatacactccttgctcttggtaaatagctgacattagtgacaccagatattacagtggccattttcaatgagtttcaataggtcatttggaagttgtaggaacttagtgtggggtttgggggtgggagggtgggggaggaggggtgtttgggaagcagtttacatttcaaaattgcagagttccaggtgagaaggcaagattcttcccatcttatttaaatattgagcttatttccataaagcacagctagtcaaaagtgctgtgttagaaatggttggaacataggcagacaagtattccttctaccttatagttttcaaataataaataattaaaagcataattctttggctaccttttgcccctaatccaaagtgaaaaaatcagaataggaaaaataaaaattaaatttcaaaatagtgatctcttatcttatacctcaaaagtttacacatgtttagagaaaatgctcattttttctgcatcctgttttaaaaagtgagtcaggatgggtcagatcctttggctaaagatatcatcgcagatatgtccttggaaatattatagagtggttgtacaaccaggctgcctgagaacaaattttgtctctactacttactagctttgatatcctttacaagttatgtaatatctctaaacctcaggttttttaaaaaaaaatctttaacatggggaaggttagtaagattattaaatgaattaatgcacaaaaccactcagaacagggcctcacacttgctaatcaatcaatgaatattagctattttcattatttacctgtttaagcctgagtattcatatttttttttaaaagaagatttagtctaagtaataatcccctaaattcctaatggtaataatcactatagacatttactaaatgatgtcttcccaggaccctcctttgaatattcttatcaataggattcctgggatatggccagagatttgtattttcaatttatacactgaattttattgggaataaaatttcagaaatattgacctaaatcatttttttttacttaatcatctaaatactcattcatccattggttcaacaaatacttcatgagctcttacaatttgcctggcatcgtattatgtgctaggagatagagtgatgaaccaagtactttttattcattagattttaggacccaagtacaggatattggacaaagaaccacacaaatctccatggaactgcaattgtgaagtgtgctataaaggaaaattacaaagtatgttgagagctcttgacaggggacatttttctaggcttggcaggagaagaacagatggggaaaggaggtttctgaagacctgccagaagtgatggctaaggttcttttaagctttgatattgtatgtcctgcacaccttacctgccaagaggagaagaaggatgctgggctgagtagattagggtttgcagggttgcgacctcccatgtactcatctgtgcaaacgtcacagttttctgcatctctccagtcccagtatggaatcgtgaagttctcatccccgctcagcttctggatttcctgttcccacagcagcaggaagagtctatgccaaggtaggaaacccggggcttcatgagcaaaatcaatgtctctccagacttcagagtccccaagcagcgtgtcccttgacacataataatgcatccagacaaagaggtcataaacactgacgtcattaaacaggggtgttgttccatgattcatttggccataggtgcccgtggggatgacgtagtctgggctggtggtatgttttgccaaagtgagataggcaagaaatttgttcttctctgggacactcaaatcaaagatgtttcttctcaccaaaagtcgcctttctgtgcagcggggtccccgaaatccaaacttacaacttccgcaattgaatcccatgaagttgccaaagcactggcaggttctgttataaaagatggtgggccaagactcccggtcgtccacccccatgaaggggaactgaggtccgagtggtgctgtggacagaatgacgtcctggcaggagcccctgcccgagagccggccacaggggctcccgtcgcccgcccagggtgggcagcactccttctccatcaggctcttggaggaggcacaggctcgagggaagtggccagcagaggtccggaaactccatagcaggcagtacagggcagccaggagcatttttcctccggtcctcacacggtctgcctgagctggttaatggagccacactcttccctttccagctccccactcagtgactatcacatgttttggctaagatctatataataccactcccacctccagcattaaaccctctcagcctttatctaagctttcatcttctgaaaaccacatgactaacttttctctggagttggcatatatcccaccagtgggataggcctatgttaaagtgagaaaccctattcaccactaacagtttaagttttatggttagaataatactaataataccatctgatctgcataaacccagttaatttactatataactagtgatatttcaatttgaaaataagaagtcatgtcaggaatagagcctctttattaagacaagtcaggtagtgttagagattttggacataagattgtttgtttctgaaagaccataaataataaataggccaaggcattggtaggatttggcttttcag

SEQ ID NO: 201 - DNA, 17506 bp, Hippotragus leucophaeus
  source 1..17506: mol_type = genomic DNA
ctctctggacacattaaaaacagcagtatctgtttgcaagatgaaacgtagtcaaaagctaccatcaggtacaaacactagcctagccctttatcaccaagaaagaggtaaataatctcatttcatcctttaaaggaaaaaataattgccaaaggaaaaaataaaattatcttcaatgaaaacaaaagctctctaatttctctgatttgtattccaaattcatggctctgaccttttcttaaaactttaagcatcacaaggaaatcagtgggaaggcaatcatgtgctatccaaatacttaaagggcagaaaaactcactgaagtgaaaaaggattagtaaagggtagaaaagaggactggcccctcccagttggggtgcactgatttgggattagctatcaggaagaaaacccacaagcaattaaaagttctgacatcagggaacaagcaaatataaaacactcagctctaagcaaggttcagcagagaatgccttcaggagttcaaggtactggagagaaactctacagggagtgggtggattcccaccaaaactccatgagaatatggggacttgaagtcctggaaactaacttgctagaaatctgcccccaattcttctttcagctccatggataaatgtaattaatggtgctgacctgttaatgagtatttttgataaatgacatccataagaagtactttttatataaatagaaattaaaatgaagaaaattaaatgactaggacaggggatttaattacatagatactctacctgtcaaatttttaagggtaaattactatttttatcatttttgtaatgtcatcttacagacatgaaaagcattttgaagatgggttgggaagggcctcatgccatttataatggtacaaaaaaacttgcataatttcattttgctattttcttttcagcttgatttttatctacgtgcctcggtctctacacaaagggctgcaaaccagaagctgtcctgcattcttgcttcaagcagaatgaaatctcctacactcctctctctgggttacatgttcctggtcctgctttttttccagcaggcctgggctcagttcccgagagagtgtgctaccattgaggctttgaggaatggcgtgtgctgcccagacctgtccccactgtctgggcctgggtctgaccgctgcggtttctcatcagggaggggcagatgtgagctggtgatagccgactcccggccccacagccaccactacccacatgatggcagagatgaccgagagggctggcccacacgcttcttcaacaggacatgccactgcaatggcaatttctcaggacacaactgtggaacctgccgcgctggctggggaggggctgcctgtgaccagagggttctcacaggtaagtggagactaaatggatgcacagtcctgcatggaactcaacacatttaatattgtagaccttctaatcagttgaggtttaagaactcctagaaattgtaaaactcaagccttacttttcatagctgaggaaactgaggcttagagaagctaagaaatgtatttaaggagttgaagttgaaactcaggtcttctaactaataacatttcctttcaaaagatttgttgagcagcccctttataataggaacaatgctagatgtttatgactagacctttcagtaactttgcaaggcagttatgttaactgtgaatacatattagagctcagaaaggtcaactccacataactggtatgtgggaagcctggagttcacactgagatctgtccagctctaatccatgagcttcctgcacagccctagctgaccccaaagatgttccccactctgatgatcaagttcagccattctacagggtgagcctggccggcagccgaaacaacaataaatgacagaaatttaaatagtaacagccagcaatactggattgttctctctgtgccaaacatgagatcaagagtttcacaggacacttactgagctttctgttttacatttacattattgtgttagtttcaggctgactgcaaagtgattcaattatgcatatctatttctttcagatttttctcttataggttattaaaaaagaacgagtatggttccccatgctatacagtatatatttgttggttatctatttcatatatagtagtgtgtacatggtagtcccaaactcctaatttatccctcccacctacccctttggtagtcataaatttgttctctatgtctgtggtgagtctttattatgaaccaggctctgggccaagtgctttttatgtgtgtcctctttaatcattacaactctataaagcaggtatttctacacatactttacagatgaaaaactgatgcttagagaaatatgtgccaagtaacagaattagactctggtcctaaccactatgctaaaccacatactatatttttgcaaaatttatggtattaaaaggcagaaaattacaagaaatatgcaaatagtgagcagaaatctacaacaggatcatagaatcataaagtccatggtaagattaaggaaagctcttactctatatagagtaagttggagaaagagggaggagatcagagggagaaagcagacatgaagaagggattttagcaagggatattttttaaagtataatatgatgtgagcacagatgcaaattatcattcatgggttagtgggacatggggttacaagatgattgagtattctctatccatgctcacatggcagatgttttcacatttgaattttgtgtccctaaagtcaggagaaaccttctggacttaagcacagaagaaaagaaccgctttgtccgggctctggatatggcaaagcacaccactcaccctcagtttgtcatcgccaccaggaggtcagaagaaatattggggccagatggcaacacaccacagtttgagaacatttccatttataactactttgtttggacacactactactcagtcaaaaagactttcctgggagcaggacaggaaagctttggtgaagtggatttctctcacgagggaccagcatttctcacatggcacaggtaccacctgctgcagctggagagagacatgcaggtatgcatgagacatggccacattcatatcctttacagagaggggaccttgtttgtacgtcattaatttactgtgtcctgaatgatcaaaataggtgatgacaaggcaatttcacgttattaacctgcctttggtgttctgttaagtctctccctatgctaatcacttcctcatttattaatctttatcctttgtgaagtgaaaagaaagtcacatcaatggtcaggaagccaaatgaggtatttgtaggtatgaattaaagcattggacatagtctacaactctgtcattgaaaaatgaccctcatatagtttgaaacaaaggactctcatttgatctgtctcccttctgaaatgtaaaccaatagcccctcctggtttggatgaggaaagtgtatatgacttttcagtcttccaagttccaaatgtatagctcattttataagttgatgattttgtatcatatatacaggatttaaagtacaaaaataatacttttcatttaaattggcatattctaattgaactcctgtgtttccatgttctccaccactttgaggctcatagcagaaacctactaacaatatccaataggtcagacatcattttaatctaaagacattggcttttttagcatgaagtgaaactaaacagttatttccagtttatttttaatcagataaactaaaatcacattaaagtagctgttaagatactttcttattgtctcttttactatttgttctattttaagaaaagtattgtcattttgaaatgaatttaaatttttttcattattgaagtacagttgatttacaacattgtattaatttctgctgtatagcaatatgattcagttatatttgtttggccaaaagtttcatttgggttttttagtaagatcttatggacaaacccacacaaatgttttgaccaacctaatacatatctatgctcttttttatactttttccattatggtttattatagggtattgaatatagttctctgtgctatacagtaggacactgtttaaccattttacatataatagtttacaactgtcaatcacaaaccaatttataaccctttaatagtcttagagctcaactaggaaattgacaagttgaatctgtcttctaggtgaaataagagcaatgattccctccccacaaattaaaatctaaaaatatctgagggcaggaaaaaatatctgggggcagactcatgtattgatttgcagtatgcttattcccagcattatccgagaaaataaatggttagaagggagagatttaaagcactaaaatacagaaaaaaatattcatatgtacgtactccatccgtatgcagtctgagagtgattaaatgaattcagctgctactctgaacttcatattttatagctctgatttcacataagacatttagtagattatgagtagataaatctgtcatttgtaatcaactccagatcttcttgccttcaagtcattttcccacgagtgcatcaaaatgaaagggcaggtgttaagtatctaaaagcttcaattgtgcctgtgtaaacttcaacctctatgacttacattttcaaaacccaacttcacaagggatccaacaaattataatctaaatgtaatgcacagctgaaatgccacatgaatatgctccagctcccaaatgccagttgctgaaccacaaactgactcttaatgatccctcagaagctgtcactaatctttgtgaaccaggacaatggctgctcaacaaggcctctaaagccctggagatcaataagaagggatgcactggaaagcttttgaccctctaaaataccccaaggacaaggatatgcttcctagaaagggtttaagagaaaaaagcagaaaagtactaaatgtttgcaaggtgagattaaacaatggcaatccctacatttatcccacactctaaatatagttccccaaaggcctaaaggaatgagaaataataagtacaataaatatatctttaaaggaacccaataaaataagcatatgatcttgagcccagcatttttttatttgttgagatcagctctaaatggaaactaggtccctgggctaaagaacagcatgctcagaaaaatattcagcttctgttaagcatttcctctctatattggtttctggcaaaggcctgaatcttcatagtttagattctgaagcagaggtctctaagtaaaacaccaggcgaagcctctatagtgtgtggccaaaatagaatctaatgcttgaagttgattcagttaaattaaaaagcagaaatgaaataaaaagcactgcttcacataatatatctcaaggctggatccagctccagaaaggagtttgtgatgcttcaattagagataggaaagtggaaggaagtgaaaatgtcagagagtagaagttattgctgataatttttagtataaccaacttgcctgaaaaagaaaagacacctccccaaagcatttgcagaaacttctgtataatgaattgagtttcattccctctagtgcctaagtgacttcttgtagtaaatcaaaagctttgttaaataaggtatctaagttcactagccctgcagacacctctgacacactaactggttcccaagtggctgagaaaactaatagaagcagacttccagggagtaaaccaagcaaagggagaattttaaacaaaagcagggcatgctaacagagtctctgtgatctaggaaatgttgcaggatccttctttctccctcccttactggaattttgccactgggaagaacacctgcgacatttgtaccgatgacttgatgggatcaagaagcaactttgattccactcttataagcccgaactctgtcttttctcaatggcgagtagtctgcgaatccttggaagattatgataccctgggaaccctttgcaacagtaagttccaaatgacaactaggatttggaattccctattagataaagagattaaatgtactgcccaaaggcccttcattctcttaaggacttcagactaaagttcacttttattatagagaatggatatacagatattcactaagtacctaggatagaacagacaagctggggtgctccagggaaaaaagaaagtgcctatacatttttccattgctttttctgaacaacttggttggtgcattgcttgcattcttattttggaaatgtctatttgtattagttaatcctcttagtaagcccagcactgctttgtggtcatgtgtcttgtgctggaatttcacagaaaatgtgtccctaggaaatgtgaaatctgcagaaagaattggaagtaccttggggagtaaaaaatatacatttaataataataattgttatataaagattagtattatattattatattatttttactattatgtcactttgatttccaaccttctgactagattaacaaagagaatgcttaaccagctgtcctaacatctttctccagtggtctgaatgccctctgccataggtcacgtttctgacttttgtggaacagttcctgtgaagctgtctgttctcttccttggatcttatttttaccatctcccttgatactaacacaaggtcttaattatcagagtctttctatctcactttatttttcttcttcaggcatgtctaaatattttgaacttttgttcttccatataaaaactagaagtattgaatttttttcattattgtactcataacatttattctgcacatatttttaagcaccaaatattaaattacactgtaaacttagaatattttaaatagaacaacaaaattaagtaggctttttaccattagattatttagctgtatacaggaataagagaagttaccatatataaaattttattctatataaatataaaattagaatttttgtttggtgaaatgagatgaaattgaggattggtgtatatttgggtaccaaaacattcatctctccttgtgactttttttttaatttacttgcacatggacaacttctgtcattgcaccaattaccttactatagattagagtcctgtgggattcccatgcaggaatgaatgaaaagttcagtttctgaagtagaaagtagatttgagaagaattgtaaagaaaaagaggatctctttcatatgataaatcaaaaatagtttagtggccggatggtttagtggctagaagaatattcagttcagttgctcagtcgtgtccgactctttgcgaccccatgaatcacagcacaccaggcctccctgtccatcacaaactcctggaattcactcaaactcatgtccatcgagtcggtgatgccatccagccatctcatcctctgttgtccccttctcctcctgcccccaatccctcccagcatcaaagtcttttccagtgagtcaactctttgcatgaggtggccaaagtactggagtttcagctttagcatcagtcctttcaaagaacacccaggaccgatctcctttagaatgttaggtgtcaataaataactccttggtggtggtttagtcactaagttgtgtccaactcttgtgaccccatggacagagcagcctgacaggctacagtccatgggattctccagggaagaatactggagtgggttgccatttccttctccaaaataactctttaatgtaccaagtttggtacattcctggtaaatggagagagactgtctagaaagcatatgagaacatatgcatgggatgtccaaggaagttttgctctaaagatgtacttgtacgtgtgtcctgtaaaagatgaccagtgaaaccacagggatggataattttattggagaagaaaagtagagggaggaaagaattatcatgaggattaaatattttatcaatgcatttggcatcatatcagacacattaatgggtattcaataaaatgttatttttccttttttctttcatgggcctgataaataaaatagttctggtctaacttcctttatttcctgccatccactacccgcttccattgccacattctaggctacctgttcacctaacactctctcatacaaatcaaccttatcttttcataagtcaacatacaccaaacaactatttagcttcaattatttgccatccctggtggctcagaggttaaagcgtctacctggaatgagggagactggggttcaatccctgggtcgggaagatcccctggagaaggaaatggcaacccactccagtactcttgcctggagaatcccatggagggtggagcctggtaggctacagtgcatggggtcgcaaagagtcagacacgactgagcaacttcactttcactttcatatgccatctacttgatcaagactggaggacatactggtgatcaagaacagagtttgtgctctgatggggcttatattatgcacagaaaaaagcctgtcatcctttattattatctctgcttaaaaatgtttgacttgtttattttttctcattttacttctggcaatttttctcagatcttcagggctctttgcaaatctgtttacccaatgaagtcttcctgaagctgcccaattgggaagaattagtattctctctttttttttccctctctttttccttccctccctccctccctcctttccctatttctttctctccctgcctgtctccccaaaggcatctttatattcctagggatatatattttccctagtattgcagccctttgtttacctgtttatcttactgaccttcaatacttttatttttcaccttatttgctgaaaaatatgtgttgattgaaatatagatcacttcccaaagagagttaaggttgttttaacattatttctttgaaagcttgaaacaacattcaagaacaaaattccatgtaatgtgaaatacagatttcagtatagaattttggtttatgagattatattcacaaaatttaatcttccacagaacttctgttttaacgtgttctcttgaaaaaaagagatctaacatatactgatatgttaataacattatactgatttaacgaatacaaggacctctatctgtttttacaaccatttttttcttcagatgattttatcacatattttcccttttcacagaagttggacatgataacctaggttttatcactttaatactgcagaatatgcatttgaaatttttttctcttctacaaaggaaaacctgtctttctgtgttcaagaccccatgtatacaaatttaataaggaaagctaagatctctaaatgttctatacatgttcacataccccatctttttcccaggcactgagggtgggccaattaagagaaacccagctggaaatgtggccagaccaatggtgcaacgtcttcctgaaccacaggatatcgctcagtgcttggaagttggttcatttgacacacctcctttttattctaattctacaaacagtttccgaaacacagtggaaggcaagtaaacaaaactggtgctatgaattgatctagttgttacaggaaaaatccaagtgttcaaatcaaatctctttaaaaaaaaacctttgaatgccatatggaatctgtgataggtatgtgatatgaatagggctgcctataattatatgttcacagtcctctgttcaatagaactttcttaaagaaaagcgtaacccctgaaactctttttatcacaagagaatcctttggaaaggatcctccattctcttaaaatacctaaaaggtatttaaactcaaatttctattaggtggctggccaatatggatataactatatcaaattctagtataggcaaataatattcaagacttggagatattttttttttttcttaaaaaaaaaatcctgcacatccaatccgttcagttcagctcatttcagtcgctcagtcatgtccaactctttgtgaccccatgaatcacagcatgccaggcctccctgtctatcaccaactcccagagttcactcagactcatgtccattgagtcagtgatgtcatccagccatctcatcctctgtcgtccccttcttctcctgcccccaatccctcccagcatcagagtcttttccaatgagtcaactcttcgcatgaggtgcccaaagtactggagtttcagctttagcatcattccttccaaagaaatcccaggactgatctcctttaggatggactggttggatctccttgcagtccaagggactctcaagagtcttcttcaacaccacagttcaaaagcatcaattcttaagtgctcagcctttttcacaatccaactctcattgacatcagataaaaagtctggtttggacatatgtatcatcttgaaagttttgttaagatccacaaaaaatcaaactagcacctagagatatttaatttgattttctttaaataattcaagtattttaaagttgagagaccgagttcaaagaagtgaaaagatatctagctagttagtaacagaacacagattcaaatcaaaaatttctatgtcctctaaaaattatatcatttataattattttataaaaaaaacttttatatctctaaattattcatgatacatatttaaagtcttaaaagaacagaatcatgtttaattttattataaacttgttcttgtcaaatttaaccttaaatacagtattgtacatgtcagaccaccctccccccaactgaaaaaggtaatagatctctctttcccttgatctaagatacttgatatatagatctgataattattttcaattatctcccttttatcatcaaaattagatgccattctttcttatttttatgttaattttaataactacatatgaaagcactgatttggagattcctcaataatcagcatattttgactaagctggtatttataaactaatgctgttaaatagctattctgtaaagaatttaagaatataagagtgtattttattgatgcccaatcaaaagacaaattatactgattcccagacagaatgtacaaaaaggttagtgcctgaccatgtacaatgtaggcaatctttaaatgttttatgagtcaaaaaataatagaataaacatataaaaaagaataatgaataaatgaatagatataattacactactgagttaatgcatttcaaattctaatattgcttttataatatacaggcataccctgctctcccatctctgatcttcgagctaaccacacacttataactgcatcccacatcagagactccctaccttcatttgtgatctatccatgtcttctccctaatacacttacatgaacaatatgtgatgagagtatatatgggaagtatatatcttatatataacatatgggaaatatatatattatatgtaataagtatgcaatatgtggattatatataaatggggatatgtatgatacacggctttccagggggtacaatggtaaagaatctgcctgccaacacaagagatgtgggaggcgcaggtttaattctgacaggaagattccctcaagaagaaaacagcaacccactccagtatgattgcctggacaatcccatggacagaggagcctggagggctaccataatgggggtctcaaagagttggatgcaattgagcatacatgcacatatatgaaacatacgtgaaatatatgtagtgcataatatggaaatgtttttggagaagatataaatatatgtgtgtgtgtgtatatatatgtatatatatatatagagagagagagaactagagagcattctcaaaagttctataaatgttttgacatcagtcttttcagatatttaaaactagtacagagatgataaaaaaagctctgagaaattctaacttctccacagaaataattgtctaaaaatagacatgcagacagtctgaaggagtaaggcaggagactaaagtaacatctggcaatttaagttcagggcaatcagagcagtgttctcccaactgtatcagcagtttttgtagaagctagagacttccattgtctttattttcatgtagaacaatgttgctgctgctgctaagtcgcttcagtcatgtccgactctgtgtgaccccatagacggcagcccactaggctctcccatccctgggattctccaggcaagaacactgttaagaacaatgttagccttgtcacaatagagtgctttatatattttgactggtatcctttgcaggtcattatttttaacctagaggctacacttagaatgtcatgccaccagcttcaaactaacctagctcttactacagcaaacaaatgtcaccaaccacaggaacagagaagctgtgctattacactaaggtaaaaattggcctgacaagctcaggaaaaattgtttcccaatataattaacactttagacttaaaaagtcatatatttgtaatggattttactattctcatctttatttttgtatctaggttacagtgatcccacaggaaggtatgaccctgctgtgcgaagccttcacaatttggctcatctattcctgaatggaacagggggacaaactcatttatctcccaatgatcctatttttgtcctcctacatacattcactgacgcagtatttgatgaatggctgaggcgatacaatgctggtgagactctttcatatgctttttgcaaactcagcaaacaagactgttcagatggtatagttatcactttaggctaagaacttgacacatttaaactatgctttacaataggataaaatagctctaatatttagctatttccaaatattttaaatcattcaaaaggcagataagaagtctctcagtatagtaataaaaagatgagacttattaacattcactaggactaaaaactaatcccttcacctctttaccatgtaaagatgactaacgaccatgtttccccaatttttctttctcatatcttccagtgaacatcctcattgcttttcatatgaatgtgaaaaccttaaagagctcttctttgataccccaaagacagaaaaattatactcataaaccacagttctgatttttattactttacagcctctcacaaatggaaattttattcaacttgaaaagttaatgctagtttttatatcacaccatagaacatctcttttaagttcattttaatgcattctttaaaatgttatttagaggctactttctcttcgctctgctgagagggttatattactattcaaactatgaatgtgcttttactggttaaaacatcataaattttcacatttaaaattgttctaaattttggctcatgtacttttatttcatcaaggacataaacataatattggagattatctatggattcatctattcattcagccaccttttacttctgtgcttgcgtgtggtgtgtgtggggggtgtgtatgtgtgtgcgtgtgtgtgcgtgtatgtgtatgcttgtgagagagagaaaatacagtagtggattctaatctaacctgatttggactatgaattgatgagttggtcaagagtttgtttcaactgaaaagcatttaagaaataaatagcctaaatataaatatttatctacttataaatcttctatgaagtcactgattggagttccacctgatttttcatgtatttttatatgtatacatgccaccataatgaattatctataatttgcactgtctgtttctttaaagtgaaacaagaaattcacaacccttgtgatgctgagtacagcattatcctaaattttcatgtttccctaacccgttatagtcatagttgccactcctaattctacagcagtgttatagccagtcattcttaataaatctttccaaaacattccatttgtttattataaaaacacccttctctttttacctttataactatcagtttatgaatgttttattatactacttttatttcaataacaaataacctgaattaataggtttatggatgaacaaaacacacttttattagacatttacgtctggtaactagacagcaatgtataagctgacaacaagcatatgtaaatagatacagtgtatgggggagagtttctttgtagacaagtaatattaggaaaggggatagggaggactgtgtaaatagataaagaaagatggtcctaagaaaggaacaaagcagccactgttgctggagcagagtaaggagggggatgaaaaatggagggagatgacaaggtcagaggaaaaactggagcagatccttaaaggcatgggatttaattctgtaagagatggggaggcattgaaggatctgacatagggaagtaatattgtaatgcaattgttactttcattagttttttttcctccatttattttaatggacataactttttgatgcagctgaaactgagctgagttgaggctgattcagtaaaaaaaaaaataggaagcttaaaaaattatctaagttattatctttaatatctaactttaataagtaattagtaggagtgttttgaggtcaggaatcctgtctttggttcaatgctatagctcatgtgcctaggtcagtgcctggcatgaggaggaacacaataggctttaatggatacatacttaattaccattaattcagagtacatttaaaatcattaaattttaaagtaattaaatttaaatttacaaaaatataaacactacctgccatttctatgatcaatgtttcttcagagtagatgttaaaaagttctcctatgcttcacaggattgcagtgactgtcccggtaatatacttcttgcaatcagaaaatctaatacttaactagccttctcacatattttagctcttctaaacttatccccactaatgtcttgcccaaacccacgtccaattctgattttgtgacattccacttggcatttaattgtaccaacataaatataaacaacaacaacaaagaaagattttttgccacaaacagcatcactcattttatctctgataacaacaactcactaataacataagtgcctatgatttgtatttaagtagaaagatgaaaggtggcaagaaacaaatagtattataggaccttgattcgataagttaaacgctttttgataacagagtaagaatccagggaataagctcacatttattgctctaattaaacagaaaaaataaaaagtactaaacaaaaatatgcatagtcaaggacaaacctccatcagatacactgcctcctaaatttaaacaatagatgttgctacagaaaattacaggttcaatctttctttagctttgaaaagtaagtttaatgaattttactgaaaatagtttctgtaatttaaaagtaaaacaactaatgattatcatagataagaaaatactaaaacttccttacttttaaactttctttttctattggacgacatgttactattgtactcaaaacgtttgagctctgtttcatgcaattcccagttctgctgttataattttttatgtcattattcagtataaaatatgaaagaacttttattgttacccttgaacaatttaagtcaccttcagaacataataatatattaatacaaacttattatgtctattaacaaggtgtctttgacatattttagatatatccacatttccactggaaaatgcccctattggacataatagacaatacaatatggtaccattttggcctccaattaccaacatagaaatgtttgttactgctccagacaacctgggctatacttacgaagttcaatggccaggtgagtactgaaaatgtatttttactgtggaaatttccaaaatcaaacttgctacctttaaagtaacctcagttttctgagataaagtaacccacagctttccactatgattaaatagctttgtttgaatttttatttggggataaagagaatgaatttaaaatttgtcgggaccctattctgacctggttgagctggttacctagcacactatttcgtttaatacttacagctctctgaggaaggtattaaaatgctcattttacaaataaggaagatgagatgatagtaattatcaaagatcaccttcctagaagcacagagaatgaattctgagcttagccctgtaaaatatgccctgtgtaatatactcttatttttctactacatgaatgtgcttctagttgtttatcttaaaagagatgaagtgagacactctgagctgttttttgagaggttatgaaattcaaaatctcctcatttaattttaaatccttttcttaatcaaggcaatggggtacagtgggagagcacagaatttggatcctgaaagatctgggctccaaaaccagctccaccatctattaaccaaatgaccttgggcaagtgatttaaacactgagccatcatctcctgaccttcagaagagatataataactatcccactaggatgcagtcgttatgagaaactggggagtgctttgaaagttcccaggtgctataaaggcaatgtggccaataaaaattaaatacaaggattttgtcaagtgcctggaacaatgcctacatttagggtatccaattttggcaacgattttactatttattttttgttctcattttattttcaaacaggtcggagttttagtattcctgagattgtcatcatagcagtagtggctgcattattactggttgcagtcatttttgcaggcgcctcttgtctgattcgtgccagaagcaacatggatgaagcaaatcagcctctccttactgaccagtatcaacactacattgaagaaaatgaaaaaatccataatcctaatcagtccatggtctaatgacaagtgtaaattctcatatgcatttgaatcataaaaaccacacacttagaacataataggtggagttactaactgtattttcttttactctgttacttccttccttgtgcatgtccatattggaattataatctccagatattattttccagaactggggaaactcacaatcttttcaatggtttctatttttcagttctacttaaaaaaaaaaagaggagggtgtagggaagggaggcggagtggggcttccctggtggctcagctggtaaagaatctgcctgcaatgcaggagacatgggttcagtccctgggttgggaagatcccctggagaagggaaagactatccactccagtattctggcctggagaattccatggactacagtccagggggtctcaaagaatcagacactagtgagcaacttttactttaaaatggtaggttgtaccaattccatggtatttaaacaaatatgaagatttggggcatgtt

SEQ ID NO: 202 - DNA, 77999 bp, Hippotragus leucophaeus
  source 1..77999: mol_type = genomic DNA
gaccgtctgcagaagcccaccaggtgccaagcctattatgtgcaggcagtggagtacattgtacacgtgccgctctaagcaggcttcaaacacggctcccgctgtgggggcctgcaggccagagtaggggcggggagtgcagccttgcgggggcgtggccgacccgccgggggtgtggccggcgaggggcgggcccagcggcggaaggcggaagctgcctgaggtcacctgactcgggaaacatggccgccgcccctggcgcccggcaggcactgtttctgtgagctgctggctggcccggggcagggggacggaaacgaggtccacgccggggctccgaggcggcgcgcggccccgcgagactcgggctgaggcggcgtggcccatgagccgacgccggaggcagcgcggagccgcagacgcccctggccccggcgcggccccggctgccgcgggctgaggagcctcggggctccgggaggcgcacccgcgctgctaccatgaacccggagaaggatttcgcgccgctcacgcccaacatcgtgcgcgccctcaacgacaagctctacgaaaagcggaaggtggctgccctggagatcgagaagtaagagccgcgggcccgggcgcggggagtggggccggggctccgtcctggctgttgcggggtccgctcctctgggagccggggctccgtcctggctgttgcgggtcccgctcctccgggtagctgctgatgcttttgcagccagtgttgctgccccaagctttaggccctcagtgccgtgcttaacagcaggaaatgggcagtatctcaaaggggctgcggtgagagtgaagcgatattgtgtatgtacggtgcttagcccagtgcctggtgcatgatgcgtcctcagtgtggtctctaccaaaacgagcaaatccgagagtgatctccgatgggaaggaggtgggaagcgtgagagtttgctatggatgttgatctgcctcatttcttacccactttttgagaagtgaaaagacaataagttgaccaaatgaagaagtcaggtcccaaatctcaaggctcaagagggctgattgttttatctctgtcatatcacccttctccaaaagtggaagcaggaataatttgtgtttctgcagtcttaattacatatgcagtagcactctcttgtttgtgggggatatgtccccagactcccagtggatgcctgaaaccccttggatggcaccaaattctatatatgctatattttctcctatacatacagatgtatgataaagtttaatttatgatttataattaggcacagtaagggaatatcctgtcagcatcactactgttgcactttagggctgttattaagtaaaataagggttacttgaacataagcactaccatatcagagagtcagtctgataactcagacagttactaagttggtgcgtatcatatacagcatgaatatacaggaggaaggggtgattcatgtcctggtgggacatcacgagatttcatctcaacactcagaacagcgtatagtttaaagcttatagattgtttatttttgaattttccgtttaatattttctgaactgctgttaaccattggtatctgaaactgtggataatggcattccactatatgtgtaaccatgacctgacattttgcttggttatttttattacaaagcaaggtgtttaactgggaacattgagatttttctactgttattttacacgtgtattttttttccagccaaatctttgtgacaaagtcaggtgggtaggtaatttcagaagagtgggaagaggcaggctgtgaaacagaaagaatgccagtttaagcatcaggaaatagaggttttagttctgccctgtccagtaaggtagccactggccatgagtgactatttacattgaaattattaaagataaaataaaaattttaaatatagttcctcagtcattctgcctgtatctcacatagccacgtgtggctgtcggctgccataatggacagcacagattttcgaacaattccatcactgcagaaagctttgtaagggcctagtatagtctgttgtgtgatgctcattctgtaaccgctggcaaattccttaactaagggtttcttaacctcagtgcttttgatatttttggacaggtaactcttggttgtggtggactgtctctgatctttacccaatagacatcagtagctttccatcactagtacaaccaaaaatgtctccagacagttgccagatgtttcctggggatgcagaatcaccccagttgagaaccactgccttaactgctttggtttcagtttcctcctccactaaagggtttggattttgccaagatgaccctcccgttcagctctaagattcagcatgtccagaaccacgcttctctcatcaagcaccccttttcttgagtgccgtctctccccaccgctgcttgttgttgccctagctttcgccattgccagcaaactgtactgatgagtattgctctagtgagtaggagactcagaactgatgtacagacttggctccatgtctgtggttttattggctgaaggtacagtgacactggttttgtccatcacccgctctgcttctcagaaatgtttgctattttcatagcttgagtcattggttgagtccttgaatagaggtgttcatctcagccttatcgttgcttccagcacatcctgtcactctgtaggctgtgctggaaggattttgtctttaatggggtttgtttagtgtttgacattgcctttggcttgtggagctgggaacgtgaaacatgtgagaaagaattcatgacattcgatgatgcggtggtgagcgcagaatgcagcgtccagaggaggagtggtccttcctgagatggtcagcagaagcaggggtggattggagctggcgtttgaggcctggctaggcttgcctgtggggtggcctggacaggaagtgtccacggagtagactagcagacccagtaggaagctggggctggctgcagggaggttgcgcgtgtagccagtctacagactggagaggcagccggccctgtgttgaccccctgtgtgtcaggtagagagtgtgggcctgatttgtgggacaggtcttcctgctgtggccccagggtgaccccaagggcccggcccagtgctctacgggtggatggatttgctgaccacctgttctcagggtttgccttccagaagaaaccactgtttgtcttgttctcctggctatggacagtattctcccgacaagtgcaggggtgcagacagcagagacttggggttccagagccttgggacttgaaggggctattgtgtctgtagtgacctgggatgccctgagctacatcctggtgggattcagggtgaggggccttccagctggtgtgaagcaaacagtggggtcggggggtgttgtccatctgcttccgcttccggaggccccattgcccttgccagcctgccccgacatcggtgcccgttcctcgtgctttcccagcacccggtcttgcagcctttccagtcttcagcactccctcagtgcaggtcagaccacactgcccaccgctgcggaccgtccctaccatttgtggctgctcacagaacaaaggacacctcctctgccaagcccgtgagtgggcgcagcctctccccaacctctgtccttccaagctgccaaaccgagtgcccctgtccttcctctgagccttcactcatgagcttccctctgtctgagcttcctcctcccgcacgaacacctactcatccctcagaacccctctcagaagctgcccctcgtgaaaccacatcagatcccctctgcaccagagatgcttcacgctctttctctcctgccccctcctcaccttgcacggtcctcaccagatttcttttctcttttgcatgaaagtcctcatggcctctcgtttcccacccaccggattctagcagaagctcctcaggcagggaatgcaccctgtttgctggctctccagtgggccgggggaccccttccagtggctcagcgaccatttgtgacctgaaacaaggagatgggccaggaggtggttccaggaggggctgtgctgccggccgggctgggtcttctgtggctgccctgccagagcctcatggaggacgttactttgcgtcctggggctgcgcttgtgtgggctgagcagaagctcagcctggttccccgggagcctcgcaggcagaggccgcaggcagcccgtctgggcgggagtgggaggacagctgttcgcagtggctttggtgacccctacctccgggactcctcaggaacgagaagagaacgagctagatctctgtggaatgtaggagacaggtgtggaaaatcaagctagaaaaagtcattctcaggtttgcagagtgtatcaccaacgctatgagtggtgtgaaatctcaaatccagtctcttggatttttttttttttaatgattttttaaaaaaatgtttgctgctgcattggccgggaatcgaacccgggcctcccgcgtggcaggcgagaattctaccactgaaccaccaatgctccagctgtcagcagctgtgtgagcacctccctttaaccccaggaccagcctccttgtccacacactgatttccagaatccgaggccatgctctgaggctgccacatcagtaccgctgcagaagcagaagcttaggctccagagcaggagagggtgtgtgtctttgatttgccttcatccatcaggacagaaaccacctcagatccttccttctcagtagcaagaagccgactgagactccaggggcttcttctctgaagtgtggttcccactcccctgtccacatgcatgtggagctgtttcacagctcacaggcttcatcacagcttcctgctggagactggccagggctgggggtgcacaggagtcccctgacggctgcagggcacgcgggccttggccccgcagccaggaagtggcgcatgtgtgggaatccagctgctggacacgctcaccgggcagggaggtgcgctcggcttcacagcagccttggcgtggttgaggagctggctcctgtagcaggatctctgagggagtttgcccagaagaggccaaaaaagcagccctgcattggccgggaatcgaacccgggcctcccgcgtggcaggcgagaattctaccactgaaccaccaatgctttgctgctctttggctcacctgcagggcctttctcaagggactgttgtctgtggacactcagagagctctgacatcactgagacgcgtctggctggggtcctgtttgggaatccagcgggtttattgcactgcttagaaagtgtgggcacctgtggaactgccttcctcccgaggcccttggtttgtccacacccctcaggcgccgggggtgggaggggggttggtggaatcacacgctataacaggcaaagcaggaggccccccacaggccattcatgcagccttttcccggcaccccatctctgctagtcccgctcacctgatgagggaacagtctcctccccccatccatctcatggcatcttaaaacacaagtgtctctacccttcttgtcctctcccctattacaggggatcctaatgcttttctgtttaatttaaaactatccctccgtgctccttcccactgcctccgccatgttcaagctccctctttcggctaaagagctggggtgctctccttctgtcaaaccagccccctcccatgcggcgcagcctctccaggtccaaacagaggcctgcaggcgccaccgcatcactgtaaacctttcaccagctcctctgtcctttgatctgccttcagccgctcctcacacaccctaggctcctcaccctcctctaagtacaccgtgtgttttcagggcccccgccgttagccaggctcttccctgtgcctaaggcgcccagccttcctttcttcacctggaaaatgccagctcctgactctaaggtctgactcagttggcagcgccctggccgcccagggagacttccctgcagcacctggcttctgtggtggcgcctgtgtgctgtggccacacctacttgttgtgtgtggatcctgcctgttggacgggggcccagttcagccccgtccctggaaataatgacagagaagcgcctgagtgcctgaatggagggctgagcaaagggttgaatgaaggcggaggatcactgcaggttttggtccccagcacaacattcgctgccttctcagaattggggttgctcactgttctttgttccatcttcaataaggggaaacggagaccagaaaaggggaagggaaagccagcctcccccagtcagcagcggagctagggcaggacccatgactccggttgctttttctgggcaggtcctctgcacccctcatcccggcgccaggccccggggccagcagcaggagcaggagcagcctgatcccactggcctcagaccctctcttctctctctccaggctggtccgggagttcgtggcccagaacaacacggtgcagatcaagcatgtgatccagaccttatctcaggagtttgccctgtctcagcacccccacagccggaaaggggggctcatcggcctggccgcctgctccatcgcactgggcaaggtatgcctttctcctggagggatgcacacaccagtcatggccttgactgcccctgcccccaacacggggttgcagacccgtgttttccgttgccatccattctctgcacaccccaggccagcaaggctggcgctgcggcctgctccctggttcctgggcgtggctcctaacccaagaggccgacttgcctttgagcccagccctcagtcgaaggtctcagcatctccgagggagccgggggctaggatcatgggatccaactgtttctgagtagcgcttgtgctcccgccccgtcacaggactcggggctctacctgaaggagctgatcgagccagtgctcacctgcttcaacgacgccgacagcaggctgcgctactacgcctgtgaggccctctacaacatcgtcaaggtggcccgaggcgccgtgctgccccacttcaatgtgctcttcgacgggctgagcaaggtgagccctctgcgctctggctgctctgagctcctcccccgcctcctgggcctgaccctcggggccttgagtgccggctgcctctccccagaggcagggaagcagataagcacgtgcggccagggatgctccttatatgttgaatctgatgatacgttgttaaaatgggcttgtatttgcttccccccgcatctcttttactttaatattactgcactttacaaaagcatcagtccaccacaagttggggggaagacagtcatttgagagcactgacctccctcgtaggaggcgagggtggcgattccatgctgttagttgcacagttggtgcgactcttctgcgaccccagggactacagcctgccaggctcctctgtccatagtgcagactgcgtttcccctgtgaggagagcatagcccgtgaactctgggaaagctccgcttagaatggctctggggtccctcttagctcatcagcgcctctcagcatcaccgagtttccctccatcaagtcatttctagagaatcagtctcgaaactgctccggcccctcctccaggagtggggagaggagccggcattgttaggctggaatgccctggggaacaccagcgggaagcagccgcgctgccagtggcagcaggccctgcaggctcctgagcagagcagggcccccgagcgcatctctgcgccttccccagttccgcgctgcctccctgcctcccctaccttccttctgtctgtgaacaggctccccccaaggccttgctataggattccagtggattctttgccttaataaattgactgtgatcctttttccacctctgtgtctcccgtagttggctgctgacccagaccccaatgtgaaaagcggatctgagctcctagaccgcctcttaaaggtattagtacttggtccccacttttagcatttctttcttatttctgtctgtggaactttgaagcactatcattgggatgttcttcctaattaaaataatttacatgcagtaattgagataatatacagttctgagtatatagagtcacatcagcagcagggtcaaaatacagagccgtcatcgcccctagtgttcccacgagctggcccaccctgcgccccgtgtcaggcagcgtgtgctcagctcaccggacattcggtccagaccgcagagatgtaggaagggttttgccttttcattgcttctgttccccttgattccctccctcagcccatctctgcttgtcccttggcctgcctgacgcaggctctgtcctcctctctggccacctgacccctggagtcaggcactcggccaggtcaggctccccagcccccagcagctcatacgcctttgacccccaggacattgtgacggagagcaacaagtttgacctggtgggcttcatccccttgttgcgggagaggatttactccaacaaccagtacgcccggcagttcatcatctcctgggtaagacctggccctgacgctgtttctggctgcccgtgagcctgccctctggcccaccggacatgtcccaaggctgtggaggtgcctcgctgttgctcgtctgggagccccgatggcacgtgatcccaaaacacgtttcctcagctctgcccccagagcccatcacgttcgcctctgaagcagatggggctccttcctcgtctccggaaacacccagatttctctttgaagccagcctctcctgttagttgcctgcctttcccacgggttcccttctcctcagggcgtctgagctgcctgggggtgagagcgccgttttcctgcacgctgaacaaaagccactgcagccagcacgccctcccccatgggacaccgcagggcgcctcctcgtcagcggtcagaggaggcaggtgctcaggccgtgaccttccctgacggtctccttcctggactagatcctggtgctggagtccgtgcctgacattaacctgctggactacctgccagaaatcctggacgggctcttccagatcctgggcgacaatggcaaagagatccggaaaatgtgagtgaggagaggagcacggagctgcatacgcgtcccccacacacacccacaggcgccaggaggacgtgagattcactctcctcttggcgcgtgagcttcccgctttgggacgccaagagcgcctcctcctcccgcctctgaagttatccctttgacccggacacccgtgccaagcggagcagaaatagcattggggaggctccccggcccaggtggcagggctatttcccttctccttcgctcactgcaggtgtgaggtggtccttggggagttcctgaaggaaacgaagaagaacccctccagtgttaagtttgccgagatggccaacatcctggtgatccactgccagaccacgggtaagcacgtggtggccccgcggaccccctcctcctcagaagccccctctccccatcctggacagagtcctcgaggcagtgagaggccctgtgacagcggggcccggagccgtggggccttgtgggagagattcaggttctgtcagcatggaggccttttcactgggtctggccctagagaggggaagctctggaggccttgctggcaggcttggcatcagcaccgtgaattgaaatgcttggaggctgggctcgcataactgtttgtttctattgagtatcaaaccaccacaaaatgtaactccttcccatcgcagtcccttgttactgacctcaggcttcaggtcagctgtgccaggccagggctggggggagtcccgtgcctccagtcctctggagggtgggctgaggccgatggtctgtcgtgtccctcgtgtctggctgtccagctgtcacccatggccagcagtgacagtcgttccaagcgtctcgtcacccagtgggctagccctggtgcgttcatgtggatttggtggattccgggagacagaggcatcagcgaggctgaggctagacccgtcctttctcccaccttctgttggccagtgtcacaaggccagccccggaccgggagtgggggaataaactcccactcctgatgagaggagccgcggtgccccgctgcggggagtggaaccaggagggcagagagccgtggctgctctcacgggcagccgcaggactattggccgtgtacccctggcgcccacgaaggagagggcgagagcgcgggagtcccggggggccgggagccatgccaggcctcagccccgctgcagggctccagcgcctgtgggcgtgtcggggggcaccgccgcactcaccccagaaccccgtccccatagatgacctgatccagctgacggccatgtgctggctgcgggagttcatccagctggccggccgcgtgatgctgccctattcctcggggatcctgaccgccgtccttccctgcctggcctatgacgaccgcaaaaggagtatccttcagcccggagagcggagacgagggcagccctgaggggcgtgaggtcaccctgggtgggcagggggcccaggacccaccacgcctgcagacagccctggagcaggaggcagagtggagcgtggcctgggagggcccaggcggcccgggacggggctggcgccgcgtgctggaacgtcagctgcatcctcagagatctaagcggctcacccaggcccgggctgctgagtctctgctcccctgtgggctgaggggtcagggaggtgacaggacaaccccttggggcagcagagcgggctgtcagtccagcctggctgcagccgctccttacatcggcgcactcagacatcaaggaggtggccaatgtctgcaaccagagcctgatgaagctggtcacccccgaggacgacgagcccagtgatcccaggccagtggtgcagaagcaggcaggccccaaccccgaggactacgcagcaaagcaggagggggcagccagtggtgagtgggctctgcctcccgcccgcacctcccagcgagggcccctggggcccagaggtcagagaacttgacatggggtctccctcagccagccagggctgttcccaagtctcagctcctaactctgggaacagcctggcaggtggaaactgctgccttcctcctgcaggtgggcacagagcagaggagtcccaccaccagcatccagcagctcccaggggcaggggtagtgtttgaacccagcagctggcctccacaactgtagctctgagccctttctgccccagagagcattcattctttccttagtcttgttctgagcttaactgcagtcgaggtagagaggcgtggagcctggcaggagggccgttgagtctgcaggctcagctgagtctcgggtggacatccagtgactcaggaaccgcctgccttcctctgccactccttctcagggaggggggttcagaccaacccagatgtggttcattcagtccttggaaattctgctcctttcctttaacgttaatgtcttgtttatccttcacatggagaaaactgcttttatgcctatcgaagtctagagttggaatctctaaatgtagaactctgagacttttttccatgtccctgaccctgtcctcaccaagaggtccccgatcagctctgggatgatgttctcctttgcaaaatcagccgaaggctaaactgatgcagaacctacttaaatctttaaggctaacggatggaggtctggagcttggcccccaggagccaaaagagttcccagagcattttgtccctttggtttctcttgaacctcagagcagaatggcaggcacgcgtgtcctgtgggcgtcctcagggggctggccttctagaatggagcagcactgagtgctggaccgtcccaggtgtcaggttacagcagtgcccgtcaccgcgagccagcgcagcagaacagctggggaggaggagcgctccgctggagcattggtggttcagtggtagaattctcgcctgccacgcgggaggcccgggttcgattcccggccaatgcagctcgcttaacctttttgacagctttcctaagccttcctcaaacagctccctgctcaggagaatcttggtcctaaatcaggacacattcaggcagcttggttccagattttactgcctcgtaaacagcactgcagcagacgcagagctcactttatagtagttcccagaaatggcaccggcgagttctggggctccacagccactccagacccgctcagctggtcaccaacccccactctcccagcgtgccagcagaaggtgccagcagtccgagagagtcagcatttctttcctcagtccccggcttcaaccagcaccgacgctgacgctcactgcccatctcttccaacccgcaaatgcagcagcttcctgcctggtctctctcacttggtgtccccatccccccccagcctgcgccgtgcaccccacggcacatcccgggcgagccccccagtgaggcctggcagccaggccctctgcacgtgagtgcacgcacactcacagacccatgcaccccgctgtcacgtgcacgtgcttctccttcgcccctccccgcagggctccggtcagggcggcccttgttcagttggctgccccgagccccctctgcttgccctggctccctcccctgacccttctgcctgaggagtccagggcgcagggtcctttctctgagtctgagctcccaggcacttggtgcatcctccctgtcccccatgacgcttcctgattgtctcgggcatcacagtctgcactctgcggtgagacctgcctgcctgtgcatcctgccctgctgacttcatgtctgttgcccttggacaagccacttggccttcctgtgcttcagatttcttactcattgactggagcaacagtgacagtgcggaacctatggtgtggctgtgagtttcagagatttttggcatgtagagctcttagcacatggcgtgggtcacactcccagtaacaggtgcttccgtgtcgagttgttttaaggtctgtttataatgagacccaccacttagcaagagtgtcaggggcaggactttggctcccttgccttttagcattagctttgcccaggtggtaatgggtctctgatgggtcctaaatgagggactgtagtggtttagggatgaaagttcaagcggtgagtgaggaacacagctataaatacaatttccagtggaggaccggtgacctccgtgggtgaacatgaaatggagtctacccatttgcaaagctttgatgggattgggtgttatcagcactgcctatccaagtgactcggatccaggacctgcctgcagagagctcaggtcggatccttagaggagtgatcacaggacattgggcgtggccacagcggactgggggcgcccagccaggcttcgtggagggtgtctgagctgactctcttctctctcgttcccttctgctctcctttaccaacctcattttccactctggtcacgagaaatgcacattccctggagagattttggaacaaccagacgctcctactgggagaaggtgaagagtaaacaccttaaatacattcattgtttggtagatatcaatacatttggcagcatgtaccagaacatttaagaatttatcctcaggaaacagagacatgggtcaagttttccgttttaacccctgaacacacattggctcctttattgttttcacaagactctggggaggccctggcctcagcacattacacgggtgaggcagtgaagtgaaggcaggtgacctacccagaagtcacacagtgaggaagcaggggagtcaaactgagacccgggcccaggggctcctgagtctggagattgaaacaaaagggcaactgaagatgctcagcttgactgggaaccccagaagcacaaagtaaaacagtctcatttttactcatcgatttggcaaatactgtaaatatcactagtatcccaaggcttccaggagggtgggctgaacaactgctggcatgtatgtggacccttcctaaaggccagcctggggaggtctgaccctcctactcagcagccccctctaacggggttctagggaagtgcccacacttgtgcaaaaggaagcagctgtgaggtctcagagtgaaaatagggaacaatgcaaattcatctgcagccagtttttaacattgtatcatttcatctgtaaaggcgttcccagcaggtgggagggagggagtcctccagcagcagggagccccagcacgccattcctggcaggcccacccagactgcccaaggtgtctgcctcaccttcccccaggcctgttcaggtatttggactctttgctgaagcagctgcaccatttcccatttctaccagcagtgtataaggttccagttcctccgccttctcaccatcacttgctatcaatatgtcttttatctaatgggtgtgaaatggcatctcattacagttttgatttacgtctccctggcggcttgtgatgttgagtgttcaagaagtcactcttaacatctgttgccctttaggcagcagccccttctgagatttcccagatgcagtcagcactgatacccctgcttgtgaggtcactgtgcctgagaacctacaaccatgcataccatccagaagcttccgggaaccactaggcattgggtcttcaggtccccaaagccacattcctctccaagagccagaatcaaggtgtgggatactagagggtctgtgtgtccttgtgaacagggcccttgttcttctaaaggccccagtgacctttattgtgatgcctcattcctcattctctccccaggagggcctgatggttcttgcgactctagcttcagtaatggcctcagtgtcttcactccagccaggtaagtggtttgttatggccagagttgtttgtggagagctagcaacctacatcttttctgggcacgagagaccacagcaaaccctgaggcagactctgctgagggccagcacttgcaggacacaaactgtctaatgagggagtccagaggacactaaagagcccaccccacctggttctgggggacatattgcctctttggaaggactggaggctgtgagagatcagtaaatacaaggtataagagtgtagctctaggcaactcaaggtaaagaatctgcctgccagtgcaggagacccagcttcaagccctgggtcaggaagatcccctggggaaggaaatagcaacccactccagtatccttgcctgggaaatcccatggacagaggagcctggcgggatacagtctgtgggatcacagagtcagacaggacttaagagactaaacaacaataaagagtgtaggtaacgcatggtgaccactgggggaccttgcagatgcttttgcccagccccctttgcttgtccaggataatgtgaggccgatgcagctctctggggaaggccattcaaggagctcagagcacacgcggtgattgagccggagtgtgcacaggctggggcgcgctggctgcagtggcgctgccttccacgggggggcggtgcaggccaggcagggaggtggccgccccaggcagccactgcactctgcaggcggatgacggtctggggaaggactggtcaccaccatgtcccagcctgagccccaggactggccctcggccccactttgttgggcacagctggctacggggctggagtggatggaggtcctcctgtagggggttcttccctctgaatccaaccctgagcacgggccctggggacacaggtcactcacaagagaaaatgtatactcatccccaggagactctcttctccgcagactctgaggctcttctctccgttcacatcgttttctcactgactcttccttctcaggaccttgggggtgttttcagagtattgactgtaaatgtggactcttcctaggatttctcccacattgttggagcaagccaatgaacaccattcgtttatttgtttttagtttgttgtcacatatccagagcttctgttcaaccctgcagtttccaagaaaaagacgtggtccccgagcttgaggttttccagtgtgggggcagagacgtaagcaggaagttatgggaaagggtggtgacggttgtgtggggctccgaggtcgttagggccagtgctggtgccccgccgaggcccgctggagcaccggctgccaacctcgagcactcagggaggccttcctgggcccggccatgccccgcactctgggtcgcatcagcgggttctgtggatgtttacatttaaaccccacaatctcagtagcagtgctgtctccacgtcaggggtgaggagggaccggaggtcggggctgctctagagactgggtttaggagggtctgaggtgggcgcaaggagatcagccctggcatttctttggaaggaatgatgctaaagctgaagctccagtactttggccacctcatgcgaagagttgactcattgaaaaagactctgatgctgggagggattgggggcaggaggagaaggggacgacagaggatgagatgactggatggcatcacggactcgatggacatgagtctgagtgaattccgggagttggtgatggacagggaggcctggtgtgctgcgattcatggggtcacaaagttggacacgactgagtgactgaactgaactgaactgaggtgggcacagaccagtcagggtcactggcacatcccatttagatagggtggaggctcaaactgaagaggcggcaggataaggagaaagttgataggctggagatgttttgaaggtagaattgacagaattgtccaacagatggaatggagtcgggggcggggggggatgaggggaggggacttctagattcggggttgagccagctcagggcatcctggtttcgtttcccaagctgagcaggaggaggatcgggtgtgagtgggcccgttgagagcagagatcggggcagctctgggcatcccaccagagcaggtcaggaggctggtgtggatatgggatgctggaactcaggggagaggtctcgatggagatgcaggcaggctcgcctgccctgcggaggatccgctctgggaatcggagggccctggcagggagggccatgtggtctcaaagcccctccggtagtgtgagagaagacagatgcgggcagggggcaaagctggcggcaggaaggcctggcgcagcctcgtcactaatcgaggccaccaggagggggcggtccaggaggaccagagatcggctgtgactgatggccccgtgcagggggcacagctccccctcctcactggggagacagcggttcctctgcccaggggaggccctgattcctgcactgtggccgggaacgcctggctggaaccaagccttgctttatacccgtcgttcagcaacaaatgctaaaccagcctttgaaattaaaaagccaacggagaacacgctatctggcgctttgtttccctcagacggaggtttcctagtggcagctgccagtctgagtcactggctatgccagagacaggggcggccccagagctgggaacctgagcccagcccctcccactggaggtggcagccgaggacggaggctggggtgcctgctctgggcggttggtgctgcccgaagctggcctctcacagggtccccgggaagcgtaactcgggctgcggggttccgacgcacgctcaccccgggcactgcctgcacaggcgggccgctcccaccgcatccaggcccaccaagggcagtggcccagtggggacccctccagtgacaggagcgtacccgcctggcagacatggtcagtgaggtgacagtctggtgaaagctctgggctctgtccctgtacacgagactagatgtggtgttagaggaccagtgtcatccggggcattcagtataggtctcctggtatagctggctgccgcaggcaagcagaaagatctagaaatcagtgcttcccaacgtttagtacctgctgattgaaagatgtgataaagatcttttattaaaaaaaaaaaggacagctctgaattcagaaacagttccttttttagacttactttcgttctaatttgattagagctgtaacataggagtgccataaagggttagatgttacagaaataaagtgctgcttcccacggagacgcactgggctttgtcaggattagtaatatcagaacctttattcctgaagtcagtattttaacagtcacagtagcgccacacatttggacgtcatagtacatgtacacgtatgatcttcattatgagatgctttatgagaaataagtggtgagaatagggttttgcagacaccatgtaataattcagaagcccccagggcctgcaatgcgggagacccgggttcaatccctgggtcgggaagatcccctggagaaggaaatggcaacccactccagtactctcatgcctggaaaattccatggatggagaagcctgacgggctgcagtccatggggttgcaaagagttggacacaactgagcaacttcactttcaggagtaactagactctctggaactggtacagaaatatgttctaagctttgagtgtgctccgttccgttctctgggtagggtgagccagggtagagggtgcacacctctggctccaaaccagcagctcagaagctgagcaccgggcgcagtgtgccgcacgcggaagagccccggcttcgcacggagcgcacaccaagcccagagagcgcagccagcccccccgggggggaagctgagagcgccccgcggaggcgggatcatccgctctccctgtccccagcaccctgggctgttcggccttccgtgcccttcacctccagccagccaagggacggggagcccgggagagcgtccccggctgagggaggggcgtgccaggcctcctggccttgggcaggtcctgtagtgttccatctgtgcaccagagggactgcctcacatgaccgagggcctgttggctggttgaagccaacgcccacctcaccgtccgtgtggggtgccccttgtctggggagggccgctgtgggcacccagggtgccgcccgctctcacgccggctccgtaacacccttccttccttgtctggccccagggcagcgccagtcacaggcttgccctcagtgtctgtgctcggtaagacacacttagctggcccgcagcacctcgggattgttgtaagttaaggagcccagctgcccaagggactgtctaccctggctacctggggccactgggatttggcccaccgacccccccgagatgagcagcagcttcctcggcgtcccgctccctgggaaacagtgctgccggagtgcttcagtgcagcgcgttaggaggcagagccgtgcggtgggcagggccaccctggactcagacggcgcgttcaaactgctggctccacactccgcagccacgtggtgtgcccgggttacttagtgcctccatgctctgattgcctcgtctccagactgggagtcacacggctgtgggcacagggccctgggggacataagcagggctctgcgggcacactcctcagcacggagtccaacacagggtgctcacccagaacctgagctctcgctgttcccagcgccaccactgcccttcctgctcagtgttagagcctgacccccaaggttcgtacaccccacggggctcggcactgcctcccgccccccagcagctcagggcacagctgtgccacgtcccaaggaccctccaggcctccccccgagggctgtttcagccaggaagcggcagcaacctgccgggtttggggcccttgtggcagcttctgctatggagagggattccctggggccctctgctcacagggtcaggaaggggcttctgatcattccccactgctttccgagctcatttcattaagacctcgggctccaggaaggtgtctggagtgtctccagctgtgggttcctgcccacccaaggagagcttacagagcacaccaggaggaggctagtgcgatggggcaaagcaggaccgggagatcagacagggagggggacgtccggaaattgttaagagaagacgacgaaatgcatgggcagccctggatggccactgctgagccgtgctgtgcacgctaggcccccctgcccctcgtgactactgcacgcgccacggccagtctcagccgaggatgctgagggcaggagacacgagggctaaaagactgaggatgctgcgaagagtgtgacagagtctgtcactaacctgtgtgttgacttttgtattgatcgtgcgttgaaatgacatttggggcgtattgcgtgagtgcacgctcagtcgcgtccgactcttcgcgaccccgtagactgtagcccccacaggctcctctgtccatggggtttcccaggcaggagtactggagtgggttgccatttcctcctccagaggatcttcccgaccccgggatcgaacctgcgtctgctgcacctccttgaaatggcaggcggactctttaccactgtgccacccaggaagccctgggggtatattgggttgtttaaaatacattgttatatttaactttacctgtttctttatactttttaacataaaaccaaaaaacgtgaaattccatatatgacttgcattatatttctaatagacagtgagaaagagagagaggtgaagagcagtgggttcctgggtggctgagactgtctgggaacctacctgtgccaccctggacttgtctgtctgtgcgtgagtttccccatctgtccaggctgctgaagaacccagatgcttggctgtcctcggaagaccccagcacttgcagccacatggctctcggggagcctcagtggcagcccctccccaaggcttggtctgctgggcggcatccctcacgcacccagcccccaggccaccagaggctagaagtgcctgctcatgcccccaaaatgagctccatggggaatcatcaaaccacattaaatagcacttccattgagcacttaacagagctcagaaccctgccctttaggagttcacatcaaatgagcttcagagaggctgcaggcgaattggaaagcaaaggcattgagttcctgacgcaaatgaataattgagcaatctggaaataccacagaagaccgttttgtacaggcaggcgatggcgtcctgcatcagaggggaagggagcccctccgacaccctaaggccccctgtcctccccagccccatcctggagagccccagcctctgtctgggggccccacttgggtctgttctggtggcgcccagccttcctggggctgcttggcgggacttttctctgcctggagaccagcaaggcttcgcaccaggggagcagggagcctgcaccccgtcctagagcgcagcccttctgagcagggtccaatctacaggccgagcctgtcaaccaccttggtgcctcagatgagaacattaacaacttcagaggtgactctgaaggcccctcgcccaggctggctgctatgccgagggccctgcgtgtgaccaggtgaagcgccatgggtcctcattggagaagtgggcttcaggtgcctggggcagggcctgtgttacttagaggtgtccctggggcctttccctggactctttggacagggaggttttgtttcattgacaggctctggacgtaatgcgctgagggcgctgaactgcctttcagccatgaggtctgctggtcccaagcttgacatcagaggtgtccacccttctgcaccttctctggcgcagcccagtagtagaaagggggccgtgggtggctgcccagcgtactggccctcctgccgcagcgtgggtgtccacgctcccgcctggcagagcagcacccgggcaccctgtgtgggggatgcggggccagggcgtagctggggaggggcctgtgggcctcagcccagctccctcctggtcacccccgcagcgcggagagggccccagtcaccctccacctggacgggatcgtgcaggtgctgaactgccacctcagcgacacggccatcggcatgatgaccaggatcgccgtcctcaagtggctctaccacctgtacatcaagaccccccgcaaggtgagccctcgggctggggtggcgctccggggtgggctgcagggcctgcccgcgcctggcagggtcctggtcgttcccgttctggggaagccctgagcagcaggagcgtggcatggtcctggggtgggaggcccctgccgctgagcactcacacggcccctctccacagatgtcacggcacacagacagcctgttccccgtgctcctgcagacgctgtcggacgagtctgacgaggtaggtccccgccctcctccgggccctggccgccagcctcccctgctgagggcacggtgtagctccgaggggcttattttgctgttttctcttaagccagcaccccgaaagtccccccgttgctcctgtgtggtgaggagcggccatcagggagaaagccatgtctcctgtcctctggggagtaaaggctcttgctctgcgggcctttctgatgagcgccgggtctgagcggcgaggaagccagtccagcagggagcccccggtccccatgaggccgaaaggaggggcggcaggaagcccctgcgtctcggtttcctttctccatccagtggggtagtgacagcacagaggggtgtgagaaatgtctccaaaaacgccgagtgctgtgcctggcagcgggtgagccctcggagcatcagttgtgattcctttcagctggactcctttctggcctccagtttgaacttggaccctgagtctttgcttttgttgggggtcaccacaagctaaagagagaggctggccccctctcaggcagtgccccgagtgtggagaccccagagtagggtgggcaagggctgtaccctcagcctccctgcaccatgccagtggcgtcctgcccagggaccttcttggttggatgtcccacctcccggctgaggggcagggcttgcagccaggcatcgccttctgcctggggggcatccctgccctccacccacgcccgctctgggcttcgtgctggatgctggcggccccggccctgacctgcccgtctcctgccctcacctgccctcctctgggccccatgaggcagcaggcactcgcatctgcagacctcccagtgccgagcaggagggggcaggtgctggggaagaaggaagcgggacacagacacacacacacacacacacacagacacacacagacacacacacacacacacacacacactctctctctctctctctctctctctctctctctctctctctctctctccccacccccccctttctttctctcaggtcctctgtttttcctgaaaactcaccctcccgcctgtccaccacgtacccgtacacacacacacacacaccacctccccgctcccctgcccacccccccgcccactgcagtgcaaggcccacacacgcacacacccacacacaaaccctgcctcccgccccgccgctgcagtgcacggcccaggtggacatggcccagttctgcgtgaatatgactgactcactgcacactcacggccctcatttcagtacagaaagggagaaaagaactttgctgattggttccttccccaggactttggtggaagcagctgagtttccagtcctttaaatcgagttgtttaatcccatccagccttcttcacccgcggttggttcttgtgtgcttgtgcgtttaaatggagccggaggaggtgcagtccattaaacagctctgttcaggctgcggctgtggaaacgcgatttgctgaggtgccaaatggtgccgggttttggggtgcatcttgtgggcctccggtggagaggaggctgcagctgctcttggggacagttgccaggggtggggcgggcaggcagctttgctgttagcagcagttcagcgtccccaccatcccattgctctcccggggagggatttgggaacccagtatcactgctgagtcgtgatcctgccacatcctggttcttctccagaatcctgttcctaagtagcccctgctgaatccggtgaccttgagtgcgtcctaggtacttggcagtggaaatgcagccacgaacaagacaaaatccctcttctcctggcgtgagcttccattccagggcgtccagaaagtgccctctgtgaggtttccccagttattttcaggcacggccctgatctcagattgaagctccgggggtgcaagaccctgaaagcccgttgagtcagatcggcccacagccagagtggcgtgaggggaggcccctcgctaatagaacgtaaccatggcctgccccacgcagggccacacactcagcctaggtgcctcaacacccgggttagcccgttaataaccaccagcttgtctgaagtcatcccagggtcagggaatgtgcttagacaccttccctgtagtgcccagagatccctcgacagttcttctatgggagaatactgttgttatttccatttggcaattcaggaaataaggctggggaggtgaagtagtggcaccgactgatggggccaaaaccaagtctgtccccagagcgctcagttgctgagcctccatgcctgtgttttaccatgtgtggcccccaagcttgtgcttagtcatcatatcaccatccccagcatctggcctttttctcttgttccgcacgttctcgagaagactgtccagtccggtatggagagggctgtggggctttgggaaaagccctccctcagcaccctgacccattgcccacctttctgttgatttacgggagctcggtttatccagcacatcccagctatggtctgtgttgctcatgttttcctcccccagtgtaatggtgacagacctgcatacccgtcccccggggagaggcactggccccgggtgacagagtgcaccaggtgttcatgatgcaggagctgggcgcaaggagagcccgagcctcagagccccagctccaccgccacgttccccagcccctgggcacgtggcctcacgggtgtctcgcgggcccttgtttctctgcccgcctcccccgccccttccagggacagctcagcagtccacgcccctctgggatccttggttgtctttgcttctcctaattcaggataagtggctgctccctcagtaccgcctgttcctcacagccttgatctgaaattcccttttgtcagaaagaattttgcaggtgtcaaattaatattcttggcactgaagtagagattctcccatcagctagagatccaatgacttgtttttaagtgaaaatgcgaccctgatcccacagtctggaacacaaggcatatccgcagagcttcctgcaggacccacgggaggcagggccgctctttccctgcccgaaggtgccagtgttggccacctcccgagcccgcagctgcccgggcgggctctgcccgtgatcccccagacgacggatgggtcctctccatgtttcctgtggcgtggccagcccggaggggcctcggtgtttcccatccccaccccagcctcaagcacagctgcctccatttcagatcctctgcaggtcacggcaggcacgtgtcatcatacacatgcccagagtgaaccccagcgtcagctgtgggcttcagaggtgatgtgtctcagtgcaggcacactgattgtaacaggcacattgccgtggtgaggaagaccggtgagggagaggctgtgtgtgtgccgggccaggaggtgcgtgcgaaacctctgttaccttctgttcaggattactacaaacctacaactgctctaaagatcgaaaatctattttaaacaaaaatatgtataggattaaaaaaaaagtctaagtttcagaagaggtctggaagggtggtcaggtggccctcctccccagggacctgggccaggagcctgactgctccggcctgcatggagagcagggtatctccacatgccctgccaaccgctgtttcaggaggtggagaaaggctccccatctgagcctggcccttcctaacaacctgtccatcaccctcagattatttgggggcagatcatgcccccaggagggaaggcctgctgcaggaaatgggctgtccctccgtgtccgccccagaaacaagggctcccccttgttgccttcatctgagagcagcttagagaggcgggggtgccctgtctgacacccccttcgctggcttctttcggaaaccgtgggggtgctgtgtgctgaaccccgtgtctgggagaaggagaggcggaaaccagtttatggggtcgtggcgctggtcagagtgcatcgcaccctttgtcttcaggaatctgcctggtggtccaggagtagtttcattatcctccgtttgacatgagaggaagctcaggcatgagggggataacttgccaggagccagccttggaagctgggtctgtcagttcccagatcatctaaaccccacgcgaggtctgccctcactcacctcagtgagagtgccgctgggaggagtactgctctatccaggctggatgcacttggctctgacctgcccccccgggctgccccaggtctgctgagccccccaggccccaacccaaagcagtgagccatgccagggatggctgagggtggtgtggcagctgcccggtggagagaggatagcctctgccccgtgctgcccccactgcatggtaaggctgaggcacctccccacctctgctctcctccccggaacgtgctcaggctcagttcacttctgtagctcagtggtgtccgactccttgcgaccccatggactgcagcacgctccgcttccctgtccatcaactctgggagcttactcaaactcatgtccattgagtcagtgatgccatccaaccatctcatcctctgtcatcccattctcctcctgccttcaatctttcccagcatcagggtcttttcaaatgagtcagctcttcacatcaggtggccaaagtattggagcttcagcttcaacatcagtccttccagtgaacacccaggactgacctcctttaggatggactggttggatctccttgcagtccaagggactctcaagagtcttctccaacaccacagttcaaaagcatcaattctttggcgctcagctttctttatagttcaactctcacactcatacatgactgctggaaaaaccatagccttggctagatggacctttgtcagcaaagtaatgtctctgctttttaatatgttatctaggttagtcatagctcttgttctaaggagtaagcgtcttttaatttcatggctgcagctaccatctgcagtgattttggagatggaaacattgtttccccatctatttgccatgaagtgatgagaccagatgtcatgatcttagttttctgaatgttgagttttaagccaactttttcactctcctctttcacttctttcaagaggctctttagttcctctttgctttttgctataagggtggtgtcacctgcatatctgaggttgttgatacttctccctgcaatcttgattccagcttgtgcttcattcagcccggcatttcgtgtgacgtactgtgcatgtaggttaaataagcagggtgacagtgtgcagccttgacggactctttcctatttggaaccagttccatgtcatctccattttcctccctaaaacgcagtcgggctggatcctgttaagtcccttccagccctgactgtgtggtcctgactccaccgcccggaatactaatgcagcctgctcaaaagtggacagtcttccgtaagaatggggcttgttttcccttctcatatccttgcctcagtttttattttgctccaattttcattccatccactctccaaaacaaacaaaaacaaccccgccaccccacgcttcagttctgagtgtttctgtacgatcggatcacatggtcaggtcaggcaccagcccagagcaccgaagggcgagacagcagcagccaggagctcagttccgcctgcggagggcccaccccacgtggaggggcgagccgggccgccgctcgatggccaggtgaggacatgcgggccctcccactacaggcctcagggctggtcctctcctctcccaggtggaccctgtggcttcctgcagggcttgggagagaaaatgaggggcagggacagatgagcagggagaggagctgttgccagcaaggagataccaggcctgcagccacacgccccggggacgggggctcccagcccccgcggcccagcagaggcccttggcagcggactgctgccatgcatgagtggggccctgtggtgtcaggcccatcattgcgctagggggcacctccttggtgtgaggaggggccctcagtacccaccgttggctgccatcacctgctctaggaagacagtttgtgctgggagggtttccagtctgtccctgtttgaattccctccactgatggaaaggtgaggacccagagctgcaccataacgggagctcagggcagaaggctccccagaggggaggtttagttcccaaagcaggaaaagtagggcccagagaggagtcacaaaggggaaggggcaggaaccaccttcctctggacagggctggggctcccgggaggagccggccaccttccccagcgcgtctctccctgagctccagtgatcaggcgtctcacctagaaaggctgcgtccaccaaccctacagagtaccccaagggagccacgcacaccagcgccgccgtcagatccctcggagctcttcaatacccagctgcctgggccgcagcctggacctccatgagctgctctctccaggggggccttgtggcctgggttccccacaggccgccagtgactgatgctcacctctgactgagagcctcggtgtgggcccgccccgttctgttgggagcctgggggccccgtctgccagttcagtgccctctctccctgccgtcgcccaggtggccgggccaggccctttttcacacacacaccccaccccacctcacttggggcatcagcagcagccaagatctcttctaggacgtgtgtccatttttccttctccggagatggccaaagcagagttggttgcatttgcctggcgtcttcctgttggcagtttgcaaggcccgccgccagggcagggagctgctagagatgctatggacaggagcacgctgggtgctcgctcggctcccagcctgcaccaggcctcaccgtctccacagcagccctcccaagcagaaaccggctcagagaagtgaggtaactaggtcgggatctcggcctgatgccccgtgagtcagtgaaggtcagtacaccacccgctcctctgcccctccaggccggccaggtccctgtctgtgtcactgcagcacccagtaccccagacgcgtttcatgactacgtgcataagcaggaggcgggcagatggcagcagagcacactgtggcccgttctgccctcttcctcgctcgcgggggcctgggcctgcccacttggacagagctgagtggggctcacacggggctggggttaagcagagacccagcagcagccgggaggccgtgctgctgtcctggtcgtcgcgggccaggccctgaagacagcggcccctcgggccgttgcctggtgactgagctgccccaggctgccctgcgcagaggcccctccccatccctgcccgctcacagggagagttcatctcctgcagggcacctgccagtcagagctgcaagtgagcgagggcttcaacaggaagccccggggtgggaggcgaggggggggcctgtctccaagccagctcactacgggaagttgggggcctgtctccacgccgtctcaccctgagaagttgggaggcctgtctccacactgtctcaccctgggaagttgggaggcctgtctccacgctgtctcaccctgggaagttggggcccctgtctccacactgtctcaccctgggaagttggggagccttatctccacgctgtctcaccctgggaagttggaggccctgtctccacgctgtctcaccctgggaagttggggggccttatctccacgctggctgacccaggctggccttttccccctctcccctcagggtggcggctggacggttccaggtgccagaacccgcacttgctgtcaccgaggaacttaataagcatcaggggctgccctttggcagtatggcacggaactggcgccttggaaggacttctgagtccactcaaacagaagaaaaaggaaagaaaactgttcctgattcctaagggcttgcgttcaaagtcaggcaacaaaccaagacaattcttgtttcttttattcaagttgttttttgctttaccgaggcgtacaagggcttaatcagggtggtttcctcagtaggaaaataggtctaaggctgagcagtgcccttgctcccacccccagatctgggagtctttttggcagagctgctccgatggtgtagaaggcaaggctgtgggccgcctacccagggtgctgggcccagcctgcctctgcccccttagtgggaagctgttctgggaacactgccccctcaggccaggccggggctggtcactgctttcttcagcccaggtctgctgtgtcaagggccagtgggtgccagctgccgccccccagagcggcacgggggctcgggcccacaggagctatgccggggcccgcggacatcctccccctactcccggctccctgggtgcccctcctgggctggcggcccagcctcctggactggactctctggatgagtccgccaggcgtcggggctccagagacctgatcccctgggctgcagcccttgtgaaggaaggggacaggctcctgtgcggaaggaggcaggaggccacaaggcttgccttgcaggcccggcctagctccccttcgtttgctctcagctccgttccccaaaataaggggtaatccaaccttcccaggatctcagctatggccctgcagctgccctgttctgggcggaggcatcagctaggcctgggcggtgcccgcagacctcagcctcgggcctccagcctgtgtccccttccccaccagccccgacggaaacttgcgtggctttctgctggccaggactgcggagggcccagcccagggagttccttccctgcttgtgggactggaaggctgagcctgttgacatctggggcctggtcagctgatcaggggcctagccagactctggactgagtttcttagagacatgtgggtagataaatggaaggttttcccagccatctcttggcagaagctctccaaaaccatccatcttctgtttcccgcccagctctgcagctgccgggtgcctcgcctgggactccctgtccaggggtctgggtggaaggagaggacaggcctgggggcttagccttgcaaagctctgggtttcccctggtcgtgaggtggtaaaggggcaggcaggagcatttccaggagacagaagggcacctcctgcagcaaggggttctccagggctggtctgtggacatgttgcagggacagagtgcctggatacaccagtcagtgaggggtggaaacagctgctgtccaggtgactgtccttggcccgctggagggcaggggctgacagcctgttgtggcccatctagacagtgactcccctcccatgctgaaacgtgccctttgctactgtctggtcgcctcctagaaggcaggccctcctcactttgctccccaagccgtggagggtgtgacacccggtgcccctcaccccggccgccttcctcccggagctgctttgtcagatgccttcttccccagttgcggctgaccttttctctccatcagtggccagctcgctcagggaccagctgatgcgcctcccccccacaccccccagcccgttgccttggtaaccgcaggccctcctgctcctgcagaatattgctttcttgtaacctttttccctccctctccttccccccttctttctctcacacaaaaagaaagcacaagtgttttatattcattctgcgaaaagctgtgtagcgcatactaattggcgtggcttcctcctgctttctgtgagcctttcccatcctctgggccaggaccgcgggccagcaccggcatgggcccagccagcctgtgcgctgccagggggactggctctgcatgtcctgaggccgcgtggggcatttctcccctgggtccaggccccgagtgtgaccaaggccgctgagaccaccgtgtccttgccgagggccgtgaggtcttcagggacgaggcgcgctaacagccttgctggcacagaggccagagccaggtccagtggagggtggctgctgtggtccccgctgctgtcccaggctccccattgacgccgtcccccggggtcgccccccaactccgcatgcagaggcagagtcctggcctaggcctgcatcaggatggtggttacccatagccacgttcagcttggactctggttttgctggtccactcggggagagtcagtggctgcacttgatgggctggactgagaacctcgaagtggctccccaccaactccccatctcctcttcacgccattccttgccctccgttttggcaacccctctcaggtcctttgctctagaggctgaaggagagtgttgctgttctccagctcccacttaagggggcttccactagtgtgtgtatacacaaatacacatggttttgctccaagctgacctgtctgttggctttagcccccaggggaccagagacaaatcttttgatatataggcttgagaggggtggccaggattaaaggaacctgtagacaacatttccggctctaattgtacagaagtgtctggtctgcgtttgcgggtcgatgttaaactataaaacgagaggatgcagaatatgaagcacagctttgctggccgtgtggtcctgtggggggaggaggcgtgcggggatgggcgacgcagatgctcctgatgcagaggtgaggccagaggctgggcgtgtgcgccgctggccctgtcctgtccccaggcagggccgccggcaggctcgaccccgagatcctcgcgcagaagtcatgcaggaggcagctcctgagatcggcacagcgccctggtgagggcgagtccccagggcacacaggaggagcctgagccccctggcccactgcaaagctgcgctcagaccgcccctgtggccgggcgacagtccttgatgacctgccctgcccggtgtccgcccccacccacaccccactccggggctgggctgcagctcgggttccaggaatgtgcctctgggtctggtcccgcgtcagtgaaaagcttctgctggttaagagaatgctctgagtgcctccctctacccccagttccctggcacacctgggctcagcacttccgaggcccggcagcccccctcaggccatgctgccggccccgggggcataggcaggcactgctgtcgcagagcttgtgggccgcctgtctccccagggtcactctcacggggacaaggcccagggccctgtggccttgcctctcctcccaccagtgcgggcctggccctcagcgggcaccactcagcagaagctggggaggcgggtatggtgggttcactggtccagggtcaggcgactgatgtccgggtcgagagtgaagccaggactgtgagcaccgaggctccactcgtggacgagagctggctccttgaggaggcacctgtaggcaagaccaaggacaggcaagggctcccctccagctcggagccgggacacctgcctcctctggcctccccctctttcacggggccactcggtgcggacatctcacgggccaggcctctcaggcgtgttgggtctccccaggcatattttccgattgggagggaaataacccactggacctggtgtgagtcactgtggtcctggtggggtcagcatctggctgagtgctggttgacatcgaggcctggccagcctggggcccccactgcataggttgggccctgggcctgagaccctcatctcctggggaccagagagcagtaatcactgaaagagctgaccccaccttctctcccccactccctgctgtctgctgtctgcctctgtgcttctgagtccgtatcctttgcagtagtctgtgagcgctcagagccataatccgggtggccctcagcggcctggtgcccctggaggcagctctccatccgcagtcacggcacaggagggggctgcttgtccatcatcctcttcttctctccctaggttatcctaaaggatctggaggtgctggcagaaattgcttcttcccctgcaggccagacagatgacccaggccccctcgatggccctgacctccgggtcagccactcggagctccaggcgcccacccccggcagagccggccagctgaacacacccggtgagtcttcccttcccggatggttgtggcctcggggaccctgggcacggcactgctcggtcttacctgggaccggctgcttgtgagccaccctcctgatcgcgagagctcccagggatgagggccagtgatgtgccaccctgtaggcggcaggcagcctgaccctcccgcctaccgctgcagcagcccccagcctcgcaggagaccctcacagccctttccctcatctccctgccactctcggccctttgagccactggctgaatgtgaaaccatccgagtcagcaatggtcttttcccctggggcgccgtcacctggtcaggaatcagggagcccagagcttgggtctcttgggtgaaagacctcatcgagaagctaaaagtaacacgccaggcgtcccaggccagagagtggataactcagacaggtttccaggcagtcctcagacttgaaggtggctgctacgcccctggagcccccacctcagggtccctccagccgcaggtggctcttctcctggggccagcgtgactcccgggtcctcccttgcagggagatgccactgccttccagcaacacaatcctggaaaatgcccagggaggcagcttggaaggagcataccgggagaatgttgggcgtttgcctggggtgtctctatcccctgagcagctcttgacatccagatatgaggtcttagacctcctctgatggaaaagccaagagtcagatacatctggggccttttcagtggtggcttccccccacagccccactgcaccgtccccaaaggcatcccagtccttggccctgagggcacctgctcggtagaagtaggggccagggctgccagccaatcccagaaggcccgtgcgtcaaaaactgaatgaaaatcactcagtcgtgtccgactctttgtggccccatggactatacagtccatggagttctccaggctagaacactggagtgggtagcctttcccttctccagaggatcttcccaacccagggatcgaacccaggtctcccgcattgcagacggattctttaccagcggagccaccagggaaggcatctccctagtgacacctgaagtcaagccccggccacggggtgtcccacagggcccaggctgtgacctctgtgcacgccccgcctgcagctgctcttgtttccagctgcttctgactgaaggcaggaaggagtcggggccctcgcggcagcccagcgtcctcccctggttccgcaggatgcagcggtgtccgagcccgcgcattgcttcctctggacgttgggctgcagccaggaggctcccgcatcctgaccgtgcgcccccgtggatgcaagtgctcccctctgttctccatcctaggtccccagaccagcacctgggcgccaacctgccgcctccagacgggtagcagggctgccagaggctggctggggggctcactgagaggcagcggggccagcagctgagaggaggtttcctgagggtgggggcggcccccagagctccctgcccagaagccgagaccgcacgtcctcggagagaggctgtggtgacacagcgctgggcaggaggcgcgtaccctctccactggggctgtctgatctgcccctcctctgtaagggagggagaagggcacgaagaagtagatgactgaagcgcttcctggctggcggaggcgtgggccggaaagcagctgtgcacagcccgccctggaggggcagggtgggagccccaggctgcagggcccagcctggggagctccgggagcacgccctccactgctcggagcaggagctggagcagcttgggtggcaaagagctctgcgccccagcttctggccctgtcaagacgcctgggcctccagggaggccgaagtgatgaagacttgccccagctcccaaggctgtcagactggctcacatcagccagggcctcgccctgaattcatagaaaacaactaagtgtgccagacgggaagaaattccatcctggaaagagcaccacggaagtgtccgcagccagtgagactccctgctgcaggggtttcacggcgccatgtgccctgcgtgccctatcagcgggtggcatccacccagcgcgcggtccacagctggtctgttaggcgggccgtggttctcagaggtcaggctcatggcagtaaccagaagtagggctgtgccctgttgccgtccgcctcggccaccttggggagggcaggaggtgggcgctggtgtaggacacaggtcagagggcacctggagacgcattcacactccgtcctttctcctatggcgtctctgcacacgtggggttcttctgtctgcttctggctggtcacgcacagaggcttcgaggtaaaccgtcttccagtttggatctgccttcccctggctcaccagggcacagctctgagaacttgcaggtgcagggctgtgtctctttaagaaggatcacccgccctgctacccctaccaagggaatttggaaaactgaggaggcagggagcctagcaaagatgagaccagtggcacggtgcctgcatgtcgggcctgtaaactcagaccgtgcagactgagtgcgtcggcgggccgccaccggcctggacagctgctgtgctggcctcggtgtcagtgcccggggccgcaggctgcgttgcccactggggacggtactgtagcctggcctggcagggacagccctgcctgcagtgcagagcggtgtgagtagaggcggtggtctcccttctgcccaaccctcttcactcctggccccagctagagcctcgggctggggagggggccgcagctggcacattcaggaggaccatgagctgccctagtgggtggccctgagggaagccggtggagggctccgtctccctaacatgagcttccatgaaatgacatggaagtgcccagttgggtccccctgtgacttggcagtgtttgtgcctcctctgcccggctccacacggctggggccctgccagattccgaggagaaggcctgcagggaggagggctccgggtcgaggccctactgcagaaggggaggaagctgggccccacacagccatgtggtgatgtgcgtgcgaccaagtcccccgggacggatgtttgcccccaaacccagcctttccgactttcctttccgcccgttctcgggatgaaactgctcaagtcattgcgcaaggctgtctgctcccacctccaaacatgtaggcaaagatgagtgttctgattcagtttcattgcttatggcccagcctggtatgaccaaacgcagagataaactctaaaggcattagataaactctaacccggaaggccgtccctggcagctccccgaggacagcggtgactctgaagtgctgagctctcgtttgggaccggactgtgttttcggcactttccccatatcagttcactggaccctccctgtgggtcagcccatttcttgaggagagtgctggcccaggagcctacctccttcaccttcccgtggcccccctcccctcaccagccaggggtgctcccaggccctgccgctcccctcctctcttgctctgaagcaggcagctggacagcctcctggagttgggggactgcccagggcagagggcttgctggcctttgcacagagaccaaagcaactgcgagctagatcggtccgcaccgcagagagggctgggccctctgacgtgggggctgcccgccccctgagacccctgtcccagccccttccctctgagcgcaccagcctccccctcccagcccctccctcagggcacggtcactgcggggggctgggcctgggctcctggcgtctgtgaggctcccgccaggaccggcccagaggtgtcgcccccgcgggcccccacccccaggcagcggccggacctgccctgggcatctgtgggcccttccccgcctccccgaggcggggcggtgacgctctagcatctggttttgctgaactgtagcgcgtggtgtattgaggccagagctatttttatcctgacatgtgaggctcgcacacgtcacagccacagagctcagtccaaaacgtcccggggaggctgtttgtcggtgctctgcagagcctcctgtcgccacatcaggcttcacttaggaacatctgcagcgccggctcgccggctgcccgccccgggccaggccctgcatacccggtgctcctggcggcatctgcctgccctaggccagcggtgctcacgtgagcctcctgcccgagcccgcatctctgcagaagaggccaggccagcggtcctcggcaggagaggggaggagtcctgctctcctcggccccgaagggcgcctcctcttgacaccaggctgctcccagcccgccccttgcctccgaccagcaccccccatccttcctggtgcaggctgcccagcctgtcctcctagcagaccctcaagcatgtgttggggagcgggccctgaccgccccatcctgggggccacagccccttgccctggcctgtccacccggcagaccctcaagcacgtgttgcgggggtgggccctgaccgccccgtcctgggggccgtagcccctcgccccgggctcttctcagctggcgagaaaagaggccaatccagttgcgtgtgcagacaggcgagaggcgggcgccccacggggaggagcaggctgcggtcaggcagagatgattcagctgagagaggcctggcactccccatgggagcactcctggagacttccttctctctctaccccttttcccctcccaggcctgcagccctgcccagaaccctctctccagttccacttcaagccggttggtcagtcagagcagtggctggtgggccagggagaaaggaggccaggagggagcgaggcggcccccaccccatccttggtggtcgggagaggtggtcgcccttgcccagctggcccagcccatgttgccctccccggggctccccaaggctccccgcctgttcctgcagggccttgtctcctgaggcagtagccttgactggagtctgctctggcaggtggagccggaagggccacaggcctcgggcagctccacggcctctcccggcagcctcggaaggcacccagtgcccacttaggttgctcccagcctcctgctcttcgaagtaagggcggaagcttccatggtaaccactgcgctgtgagaacaggaccctctcgacacggcgtctcccccatgtgactctgccccacccctccctcctaagggcctcctcagctccagggtccgccatgtgggcctggacctccagagttgaccgtgggccccaaaggcggccatggctcaggagatgggacccatttgccttacgcagtgctcctggttagggcaggtttgctggtggtaacagcccctcttgttcgagtgcagactatgtaggaggccccaggctggtacattacatcttgtctcatttaatgtgggctctcaattgccctccccgcccgactccagtactcttgcctggaaaatcccatggatggaggtgcctggtgggctgcagtccgtggggtcgctaagagttggacacgactgagcgacttcactttcacttttcactttcatgcattggagaaggaaatggcaacccactccagtgttcttgcctggagaatcccagggacgggggagcctggtaggctgccgtctatggggtcgcacagagtcagacacaactgaagtgacttagcagcagctcattacccccatcttacagatgagaaaactgaggcttagaggggttaagagatttgtccaaagttgcacagctagtcgggggttgagtgaagatctgatctcaggtgtggtagactcccaagcccatctctaaacaccatgtttgggacttccctcgtggtctggtggttaagaatctaccatccagtataggggacaggggttggggattgaagatcccacatgccacacggtgcagccaagaaatgcccactgcctctgtaagaaccgagccacctaggacctctccccagcgcctgctcaagtcacccagtccccaggacctggaggccgtggccctgggtggggaggatttctttatggtcagtcgtcgttttgacccctttgtcctctggaatattacggaccctaagcctgctaatggatgggacaaggacacacctccagaaggtgggaggggacagggacataaggagccacggtcacccagcacccagaaggctgcagggtgctggaccccgggccacaagtacctccatgggtcgggggagcctatgccctccagccaggcctccatgggggcagcagaattcatgtcctcaagggtggtgacagggacacagggctcctcacagctgtatccacagccatctccagagtcagccccagctgggcctggagtaactcgatccataagaatgtgacactcgattctgcaaacagccccttgggggtggagagcagactatttgccattccagagacactcaggacggccctgggccaggctcttctggaaagggacccagaacaacacactgtagacgagaagtgccgtgaggcctgtccttgaactggcttctcatgaagggctcgccccgggcacgattcacaggagctgtccaagaggttccggagagaggacagtagtttgaaggtgtggctcctggtgaggcatcctcacaaaccagttcacagccaggggaaaaaaaaaatcaggaaacaccttttccagttcccagccacttccctgtaaggaccttgcgacgatataaggaagtctgagttcagcaaaacgatagacctcctgggaggaggtttcactgctgcctcctggccacggcacctgctgaagtcggcctgccagggctcctctgtaaggcttgcttacgctctggacgacggttccacgcactcgtgctttgggttgacgcttctgggagctgatagcccctcgcacagccaagcctgattcccagagaccccactccctgcttgtttcactgaatggcaccctttgaaagggtgaacttgatagtagatgaattgcatcgcaattaaattgttaccaaaaagaagccagatgccctattcgtgcatcagacaggtggacgtgaggagccctgccgtcgccaccactgccctccagcgtgctcaggccagcacgtgctagaaagcaaagacggggcaccccagccccaccccagtcccctctgcaccggatgccttacacagggctggggtctaggcaggggcggggtggggcagggggtgctgtttctggccttgcgtgtattttcagctgggacacataagggagtggaggaggaaatggcaacccactccagtactcttgcctggagaatcccttggacagaggagcccggcgggctacagtccacggggtcacacagagtgggacatgactgaggacccaagcacgaaagggggaggcctggagtgtgcttctggttgtgaagccgcctcgaggtcttcagggtgcgactctgatggagcgtctgtgcctgaagatgaggagtgcctgattcagaacatcgggtgcaggtggagacgcctggtcatggttagccagcgtgtgccgctttgacttctccttgagcagcagtgggaaaggagtgtggcctctgcctctgcggggggtgggggtctgtcggctttatcgacccctgcggctgtgcctgccttccctctttcttctctctgacttgccacttgttcttatcccgccaaagcccaggtgtattttatttattggggtgatgagttaaaaatgtgtttttttttttttttttttttcagaaacacctggcacctagcgcctagtctcatgtagggagtcttcactaagtgatggagtgtccgctggaggggtggccaggggaatgggtgcgtttgtagtgagcagggttgtatcagcttgtgcacacgtgtttggcccttgctttttgctgccagcgtggcccttgattgatggtgttccctcatctggttgcacagggactctccccacctctttggtgtcgataaccgtttcctttctgtgggcatgcagaataaaccccattctgtcccttcctctgtaggtaccaaaagcttggagtgttctccttccaccccgaccatgaactcctacttttacaagttcatgatcaaccttcttaagaggttcagcagtgagcggaagctcctggaggtcagaggcgccttcatcatcaggtcagttccgggagcgtcccttctcccacggcctcaagtttcatcctcacgtcgtgcaaggggtcgaggcagccatgggctctctgctcctccagtgagtgatggttgcagaaagagggaaaagccaggagaggaggctgagaagaggggcccgccgagaggcagaaagaagccaaggagagagggggacacaggaagccttgaggggcaggaggcgggaaggagcctgctgagtgctgctgggagtgggcagggggtgaaaggcgaggaaatgggggagccccgggggagagtgggcaccctgggggtggtcaaaggattgattctcaggaggggacggaagggcagagaacaggacggcacagtccctgcccatcgggaaggaccacacagggcttcctggtggtggcgggtgtcaccgccccctgctttcctgagcttgaggagggcagggcttgtctgcttcagcatgctggcgtctggggctggttaactctcggtggtgggggtgttctgcgccttctggggtattgagcagcgtccccagccctgacccactaggggctaggagcaccctcgccgcccctgtcgggacagtcagaagtgtcccgagacagcgccaaaggcccctggggggcagagtgatcccaggtgacagtcatggttacagagggtagaagtggatcctgaacctcgctggccaaaagcggaaggtttctgtgtttgtttcttcacatcgagttggggactgaagggacccccaccaggaaaatgacagactctccccacacgagtgacagctagcttcatgtggcgttccaaattgcagaggtgttggctcttttgatgagtcctccttgcctggaagactttgaaaaccagtggggagacgggcctttgaaaaaggagtttgtagctagtttcctctccggagagccccgctgcagtgggttttcccagcctccatcagcctggcatgccccgtcggggcccggggagagagtgctggggggtcaccgacctccccagacagcatggaccggaagtgggggccgcctgggtgcgtgggtgcatgtgcaggggtgttccctctcccatcggtgctgagggttcacgagctggtggtccagctgtccctgtggtcctgttcagagccttcagggtggtgaggcttcgctgactctggagggtctcccaggcatcctgggctggtgggaatcttcatttctgcaggacggaaatgagaggaggccacatgcctgcctggctcggttggagctgggctgcagacccctgtactcctctgattttgtagatggcctctgtcccatctgtgagagagggtcaagctgggtccctgaggggcctgcccaccctgcacgccaggacctcccagcaccgagctccccagagggtgctcgcccctcggccttctggggccgagtccatccagcacagcagttacttgctgctctggggctcacatccctcgaggaccacactggggcctccatgggcacggcgcctgcccccagggcatggctcactcccagtccactaggccagcgtgctctctcagccccgggtggagagccccgtggcaggacggaaggccctgtcactgggccgctcacgtatgttgtccctcctgccatcctgcccgcccccccgaagtagcagcagcccttgtcacgtccagtcacagcttcctcggggccacgctagccctgagaggctgaccagtgtgccccgccgcctgacgtggaggagggcctgaagccgtgtgccctcctcctcctcgtggtcagatggggtcgaggtccttcagcagagcttcgctggggcccgcgcctgggagggtcagcctgcccacctgcctcccgactcatttcctcacttcctgctggtggctttaaagaagcgcatgctggtgatgcatgcagaccgctgaggcgaagccacaggtctgataagagacagtggatgtttcttaaccccctctctgtggtgttcagccaactataagttgctctgctcaacccccaacgttgagcaaagaaaggaaagagactctttctgcagataagtggctagccattgtccctgcagtgggcatttagctcagggtccagggacgcgactggaagggcagaggcgtccggagtgcttgagggcagacatttggctgggggtcttggccttgaggaagcggcaggaccctctgcagaccggggagcgcttccccacccgcctggccttcccaggctgcccctctgtgggggtcgggaatggagcccctgtgggggtcagacatctgctccgtgtccacgtggccttgttatcgggtgggcgtaactgtgtagaggtatgttgggtttggggaggccagggattccagggaaacctgatctcagccaggcttgctgtgccctgccctgggcccaggcccatcttcaggctgcagggactcaggacgggtggatgctgagcacaggtggtgtgagcggccagccctgcccacaccagcccccgccccagggctccatggcggtcaggcagatgctgcaggcacttgggagccggttgaagagggggcttcccaagtcagacgaccttgggttcgaatcccagttcctccggtttttagctgtgtggaccggctccaagcccagtttgttctgactgtaagacgcagtcatcgcgcgtgccccgtcgctctgcagagcgaggtgcagagacgctgtgcgtttggtgcccatgcacagcttgggggcactgctgttggcctcaggacgcggcctaggcctcctcccctgccccatgatctgtggggaagggagactcggcccggcagagggtgagagaaccaaccttctgtgccgagcgctggctctcaggccaccagcagcagcctggcccggccccgagtgggtgtgtgtatacatttcctctggcccgtcccaccccccagccagtgcagacggaacaagcacagggcttgttttcccacgaaccgtcccactatattctggagaagaggagaggagggagaaaacgcagcctctttgataaactgctacatgaactgcagcgcaacccaacagctgtgagcctgacaaggcctgcttctgtgcgggagccgcgcggctgagcacgctcacccccagccagcgcggccctccggcggcctggggcctaatcagctgtgcctccctgccccccttcctccctgctgccttgcaaagagggctagccagagaatgctttcttttcagccagtgactgtgctgtgaactcagggctgcagccccagccagccccgtccacggtggctgaggtcctgagccccctccctggagaaagggaagcccccaagatgaggcattgggaaggggcccaagtttgggaggggggagctgtcacgaggctttcttccatgagaccctgaccccgagaagccccaccgggtacggcttctggttcattctggccctccttcgacatagacacacgcctggcagctcatctagtgtggccgaggccctgctaatcctgtgccccctcaggggcaccaccgccccgggctccgccaacgagccccgcgctgggggcgggtggagtgggaaactggctgctggagtgggtggtggggccggagcccgggctaggaagccactggaaactggactgagttttaattgtggggcaggagggggcacggtggcgcaagagtagctctgttttcccgccgtaattgggaaattcctctgtgctgtcctcgtgcgctcctccccggggacaggcgacccctgtggttggggcagcccacaccgtgggcccgctcaccgtctgcatcccccgggcctttggagttcactcagcatcggtggcaccccgttaccctgtccctttctgcgtgccaccttacctgccggggttatcggttggtccccagagcccattgtgctggtgtgaatgaaagatgaatcaagggacctggctagaccgtgttcacagagcagtgcataaaagcagcttttcccacggcccccagcctgcgaggaagctgctgggaggctcagctcagctctcccacgtgcccctttaacggatcacgtcatttgttcccagtaaaaacaaactgctgtgacagacacacggcccccctgagtctgtctgcagaaacaggtcccgaggaacctcctcgggctgcaggaggagtggggtcttcgtcagttgtccgtgttgatgggtcctccgccgaggggaaggggacgggacactgagcagggctgggggctttctgcaggcgaccgctccatccccctttggagcagctcctctccctatcagtgttcagccagcctgcccagctgcccgtgggaaccttctggagcctcccgccatcactcctctccaggggccagggtgcgtctgtgagatgagacacaggactgcacagggagtgtgtggcagaagctgctttgcccagccagctcctgactttcatctcctaagcggaatgacgctgagggcctgtgaatgcagggtggcccgagccgacatgccagagattgcctgcaagaaagccctgcccacaaaggtgaaaagacgtccctggaaggggcaaagatgcagagagcccagcccggtccatttccactgctctctcatccttggcaaaatgccagcatccaacacctcgcagaaccatctgcgacccagggcctcccctaggcagtccacatgctgtcctccctgtagaacccactctcgtgcaagaactggagttcctgcaagaagtgacgtcttttcttctggagtgtggaaaccacatgcagtgggccttgctgggtcaggctgggattaattaggtacagccaggggtgtgggggaggagaggacgtgctgggcagagagagccctgtgcggcgtgctctgggagtctggggagttctagagggaagtggccccacgttccaagggtcctcctggatccttgaagggggtgctgatggaagcaggggatggaggctttgagcagggctgctgggaggttagagggcatggatggacttggcagagggaagccacgtgacccatggagccagcggtttgccccacatccaggagcacctgtggaggggaaggactcaggagccaccccgtgcccaccacgtgggatgccttaaaaggcctccaccgtcatcatatgggctgctgggccgtcccagcctccagttaaaagcgctttgtagtccacacacctgagaagcggcagctccctgcactgtagccagaggctgggaactagacagtgaatttctctctgaagcttgagaggttgtggaacctgtagttgtctctgggtctgtttataccttatttcaggacgccaggaaactagcaaagctttgaccttgggaagccagacagctcggttaattaggaagtagctgccggggatcacagtggagcagcttaacagaatatcagcaggtttggaattggcccccagaggtcactttcatcctccgcctccctggagtagggctgcctctgagccaggagagacaagtgggtgtcctcggcctaagtgtgctttgaagctcctggagcagcagttgcagaagtcaggctctcagaaagctctgcctttgttacttttcaccttggctttcctagagaaggctgctctgggaggcccctgtgtggtcctcccctctccccacaagcatattcttttagcaagtaggcacagagatcacacacacactcatactcatcttcagtaaaatacgcagaagggtttccatcacgtgctgtttgggaaaggcgtcagaccagctgccccttccacgtggaaggagagctcccatctctgagcagatgcgtcggaagggccctggcctgggggagtcttggcgccaaatgcaggctcagacggcgggcacccgcccacgtgacagcacagcgtgtggggagggggctctgtgagcccggctgcctgctcgtggggtctggggtgggcagtgggagtctcctcacaagctggcagctcggctcccaagagagcgtgggcgctgggcctttgccctcaccctcaagtctccctgcgtcccaggagcccctgcacccgcccctcacccatgtctcagggcacctgcgggggagctgcatacccgccgtggagcccagagcccagagccttagctgtcttctgggtgctggaggccgtgggggaaaaccgcccagtgtccagcctggacttgcttttcctcagcctggctggaaggagcctctccaggcatcgctgacccatagggaagcctgctgtggccaccccctcgctgccctcttttggctctcagcctctgtctgtccccactcaggaggggagcaaggatgagtctgcgagtccctccctgtgtccctcaggccccaggcctccagactgctgcctgcccgcccgccacgctggcctgtttccggtctgtatttagatgacatcatctcacaagaactgcctggctctcagacagggactgactgtctttcttggtctaaatctccgttttgattcttgctcagaaggacaagtctcaacccctctctcctcccagctcgtttgtttttcctctggtttatcacagttgctcacatcacccatattggcctctctctctgtctttgaagctgagctgagacagatttcaagtgcagtcctgaggcatctcgtttttctccagccctctgttgagcatctgtctccagccttgcctgtgactctttcccttccgatgctgctttcctgggcgtgaagtttgtgcgtctcctgctccgtctccaccagccacacgcccgttggcgctgcggtcgcggtcccatgccccagctcctgctctcgcctgtgactgcctgcctgaacatggggccatctgagcctcctcgttttgctcccccgaaagctaccactccagccggataatggagctccgtctgcacccgcagccttgccatcggtagactcggagcctcctgtgtccctggtcctgcctcattttctctgccgttctgccgtctctctggcagacccctctcttcttcaccgcgtgacgctgacacgttcggctcctgtgctgcacgtctgtctcctcctggtcaggcccccgtggcagcctctcctccctccgtgcctcaatttccacgatgcctttgtttttaatgtaaatttttcattaagtaacaccataccatataaaggggcgtgaatctaagtgtcctacagcttggttagttttcgccaggtccctgtatccaggttaacaagtgatgaaatcaagaagcagagcatttctagcacccagaggtccctctcacgtctcctccctactcttcccccaagtaggcactggcctgatttctaactgtacattcgtgtacctggttttttgttttggtttttggagggttttttgttgttgttaacctgattttttgagctatatataaacggaatcatgcaatctgtgctcttttacaagctctcttttggcccatcgtgtgtttgtgagaggcactgtgtcccgcatggcagcagttcacgtgtctgtctcgtcccccctgtgtgaggagcaggggctcacttgcccgccctgctggccatcttctttggcactgctgtggatgacgctgccatgagcgtcccttcccttgtcttctggtggacacacgtgcacatttctcttagataatgcctggggtttgctggagcagggccatacacatgtttagctttgacaggtaactgtcctagttgcaccggtttctgcttgtatccaggatgtgtgagagcttttgttgctcacatcctcaccaacacttatatcacagtctttttgcttttagccattttgataggcttgtggtggtatcacttgatggggtttcatttgtttggcttttggccatactgcttggcctgcagcatcttagttcccccaccaggggttgaatccagtggtcccttcactggaagcacagagtcctaacccctcgaccaccagggaattgccctcaccttgtgcttttaatttgcatttccctgaagaccaatgaagctaaagaacttctcgtgacttttttgccttctggatatcctcttttgcaatgagcctatttaaatcatttccccgatgggtttttggtgactttcttcttgatttgtggaaattttttacatgttctgaattcgagtctttctccagcgtgtgtactgtaattatctcctgctgtgtggcttgccttatcgccccgttaaaagtgtctctggtgaacagaagttctttatttctaatgtagttcaggtgacacgttttgcttctcagcattttttacagtttgtggtgcttttctcaggggattaggagctcgtgagaaccaaccatggagctgcccgtgtctggtaagcattcccagcacgctggactccaagtacaatccgcctaaagcccagaggcattagagctccacgctggacagggtcttggaggccaccttctttccatcccccccatcagctgaaccccagggcttccgggttagagccgcttagatctaactacagttgtcaacagtcttggggtcacagtcaccagtacgacaaggggccttacctggcccttagagtcagaccgaggcgtgggctgcaaggcccgggaactcagcgtctcccagtggtgccgtctctcctctcagcctgcctgcggtcagcctctctgctttggtcttgcccgttggcagggaggtggcccctgtgtctcgctccatgtgctggctgtgccccgcagggtcatgggccgctgggtggggcagagcagagcggaacgctctccagaggaaagggcccgcagctgctctgctgagcattgttctcatgtgaaagtggagatggtagccaccgtggtctcctgccagttcttgggaggttaagtgtccccacaagacggtgctccagggagtgtcttgtacctggtgattgtgcgggaggtcctggtggtgacagcgagggtccttgcgatgaagccccctccctctctgcgtgtctgtcagggagccggggctggggcctggccctcccgctcccccgttcccagcccctggctcctccagcgccgtccgcggctgctcccttggactcggctcctggaaggcaggcgctctgtggctgactgtcgctgtctcttgttttctagggaagtgtaggcgagaaagctgctgagcaaactaagacttgccccccagtggcctcccttcctctgtccccgcccccacgccctgcctgtctggacggttgcagtcaggacatggactggcgagcctgaagcaggagtcccccgggcctcctccccgtcagccccgtgccgggcaggggtctcaggacccgggcctgtgccccactcccacggggaagaggggctgctgctcgtgggaaattggctctggaaccagaaccccaggctgtggacaggagacccagccagcatccactctggtcagcctcagtgctgcctgaaaaggtgtatgaagcaggcgacaccgagggccctccagggctgcggtggaaggaggggcccccctcccctctgcctgcagcctaattgcccagccctggggggtggggagccgcctgtgtccctgtgacctgcccggagaccgccacgggggggcaggtgggcgggagcagcacctgaggagtcgggcctccagctggtctgatcccttttctgtggtttccgcttgcagcgctgcaccttgccagaggctaggacttgtctgttgtgtgccctgtgtcactgcgtgaggagccgggcttggagtcaaaccagccccgcccccagcaaggccgctcgtgctgtctccccacctgtgccccagcgtgttggccccgggccatgactgaggggacgaggggcacctcagtctaggtttggggctcagtttggcccccaggaggggccttgagggccaaccgaggcctctcacacaggcagggactcgggctctgccctgcgccacacccgggctaggccactacagacccggcccccgtggtctgcaggggggaccctcgggtcgtggtgggcaggagcattgtgggatgggcagggaggagcacaggctcacccaggcagcggcggggtcacaggtgcacgccttcttccggggctggtcctggggcagccctgggcacacgctcctgccttcacccaggtggcagtccagtgacacagcagacgagtgactaagaaatacgagccctggtgctgtggttcctgctctggaggaagcggcaggcttgatgggggtccacaggtctgggcctgaggggacgtggggtgcccggcagcttcagcagagccaagaagctgtgacctggatcttatgttttctcggagcataaaagtgccctagttttccctctcctcaggctcagctgaagctacgccaagaactagcttttaaaggctgcctgaaatgtggtttggagccaagaatctatagagccagtgcatttgtgaccttgttgaaaacgcttactgaggaaaatcaaggggtaggatttggaagctggctttttgttgttgttgtttttccttttgaaaattaaaaaaaaaaaaagccaccactttggccttcttcaccccatgcttcccccctgcactgcccccagtgcccgagtccgccagccccaggcgctcagcccttccgctctccacgcctcccccaccccagtccctctccatcccccgtgcttcaggaatgaaaatatcaagtgggtaaaattaaggagccgggtagagccctggaaattaggccacagctgtcagtccaggcaagagttctcgtctctgaatggactgccgggagcaagcgctcgcaacaccccccgccccgcccggtgagcgtgggtcagagtcctcagctccccgccccgctctggaggggctgctgctgctgtgccagcctccactcgtcaccaagcaggcctcagagacagggtcccagtgccctcccgggggccccaaacttgagcagcggcgatgctctgtgggagcacatggctgggggggcgtgcccagcacggagggaggggtccggggaagtttctggaaagagatgcagagtccctgagccatggaagataaggcagtcgatggcggggaggtggtaggagaaggtgctgctgtgtaggaggagtgtgctcagaagcccggggccaggccgcagggccccgggcaggctcagaaggccctctgcacctgctgcgggcgtgcgcaagtgctgaaaaacaccccggccacactggggtgggtggcgccaagccgggggactgcctgagctcccagagccccatgccccgcgcttccgtgaatggcagggaagtggggcctgttaggtaaaagaccaggacaccaaaaaagtgtctaacaggctttttaatggcgaagcgctcccggccgtggttcccagacccgaaggaggcaggtcgaggaagtccgccccggaccatgttagaggtgccttatatacgttcattgcgagggatggtcaggttaatggacggggctttggataggttgccaggccgaggcgtcgcaggctgataggtccttctacgtggctggggtggggcggctttaagctggcgaagtgtgctgtcattggtccccgggatctgggaggtccttagggacttccccccgaccccggccggcaggagggagaggagggggggcccatcatggccccctgggtccggccttacattttgacccttctgataggataaggggcgccattatcgcttctggctacttcctgctgaactggggcgttgctggggctgagggtcgtggccggatcccagtgacctttagggggcctcagggtctctggacgggagcttggagtatgcggctaccgtcaacatctgtccagtagccgtctgggttagctccctgaccctctggaggatgatctgaaaaacacaaggtcttattgacaggatgaggaacaaggctgcgaggggtccgagaagcggcagaagccactttgcccaagacgactttcaccatcccgagaaatcgaaaccgtctgactcggcctgtccaagtctcatgctctctctcagctctcggaccttgttctgaactatccccgaggcattaacgaaaacaaaacaaaacagtcttcccttaggaactgacaggttccccctttttcagccgttagcagctctagggcccttcgattttggagagcctctgctgccagagaggtttatctgggtttgtaatgccattagggaatctgccaccttgtccaggtctcagctgaggtctgcggacagcttatagtagaagtgcgtggctgatcccagtcctcccgcccctagtcctaaggctgtgaataaataagcttcctctgagggaaggggagctacagctaatgccctccggcagcggtgggttggctggatctggtcgtccatcgcctgtggtgtcagaaaggtcagatagggcgtaagaagactggggtgcaaggctgagtccagttggggggaaaacattgtaataaggtggtttgattacagagaaagaatatccagggttttccgcatattggagggtttggggatagggggtctcgtctcgagccatcacaggccactgtggtcaatgaggtgtcgttggccagaacacagaggcattggctggtaggtacagtatctcagtggcccagggctcatggtgatggggatgctaactgtccatctccagctgcgccgttggcctcctcagataccagaggctggttaaggagtggttcaggaaccttgcttgacacgggacatagccattacatcattctggaaggttcagtggtcccggggccggcagtgtgagcaaataacctggactcagtctcagaccttcttgatacccagacgtccctgccctgacgcgtgcggctctgtcaggcagctagtcccaagggtctttgagctcagccaacttgcctcatctccccagagaggagtcagcctctcccttgctcctacgtgagctgatccccttcctgacagactggcctgcctccttcgagcccactcctaaggagcctcccgccccctctgccagtagcccctggcctgagcagttggcaggttcctagggttacctcacttccttcctacccttcaagcctgagccgccaccccagtccagttccgtctgcttctcctggcacccccaagtcgcacggtaattgctttctcagatcctcagctgtgcaccccgtctgtgagtatttcccggtcccctgaccctctgcaggaagacgctgcggggagcaggagggagaaggactgcgaccccattcccctgccctgcggccctctgccctgtctcttgccagcagtgcctgcagtagcagcggcgctgccacgctctgccccagccccatcacgcggcccaagggcacactccccccagggtgcggtgccggacctgctgagaccgggcagctgcccggtgacaccgtccccagcccagctcccaagacgggggtctgtgattccagagctctgggaaggtcacagcttctgtttcattgttgtggtgtttggagaaacattcaggcatccctttacatgcttagtcttcctgagccagcggggggactcctaggaaaggaaagacagccatcaaagacgcgcctgcaggccaagcctggtggccgcagagtggggagcccagctcggggaggagaggccagagagggaggcaggatggatgggcctggacaggtgtgagcgccctgggccccggcccctgccggctgtctccccagccccgacctggctctggcctccccctcggaaggggcatgtagaaaggcggcccccagaccctccattcttgaaatcggaagaaggtgcttacacaaggcacacgtgatttaagtagccacacaggagggaggctcccacgcaatgctgcagtctcagatctcccctggcctggctgcgtcgcacccaccagccccagccccaggtagcttttcggcgttggtgggaggccgggccttcgtctccgttgataagactttgctcttctgctaagaccctatttcaggagaagccaccccgtagtaggcactcctgcctcagagtggaaccaggcgtcttctcatgcaaggagtattatgctaatcactccttgcaaacaggcagactctgtaggaggtttgcctggttttatatgaaacctacgcctttgaagcaaagagccaccgtagctaaaaataccgtttcctggctgttgatcctctcatctgtgctgtgcttgtttccattgttaaatctcgctgctccgcctccgagatctccacgagggggtccacagtgatccccaaatgtgtaggtttctaagtgatttctgtattgttttaaaagacattttaacccatgtaagataaaaatggaaatgacgcagaagaatatggtgtgaaatgtgagagaccctccccaccccttcctccccagaagtagcctctgctttcggtttcatgtacgtcctcccaaaacttgtctttgcatttacaaacgtgtgattctgtttggctgtggcgaaggttgtggttttctggcagaggtttccagactcagagtcgttctgccgcttgccctgtgttccctgacacgtcagccgtcgtttgacaagcaaatccatccagatcccaaacttgtcgggacactgccctctcttcaggctgcagcgggctggctcagggtcacctcttcctgatcaaggctgccatttcggggttgaactccatcgcccgtttctctctgcagcttccagaccgtgatctgtgggcagtggtgtagtgagggggtgctgggggctccccagcagaccccttagctgacacactctgaggggaaggcagggggctgtctcttctgtgaccgagacctgggactcctcaggcacctgcaggacaccgtcacatctggagccctttctcattctcgtgtgcttaatcccataaagatctcctaggctggaaagggacattcggatgaaaagcctgtttcatgcatcttaaatttccctgaaaatgactgatcacaaaaggaatttttgcagcctcctgacagcgggtggaggggggtacaaataagagaaaccccctttgcatttggccacagagaactgaagcggtcccttccatgctctttttgtcccgtcctttcggctgtgaccctgccatcctcccagccctttcactctgatctcttcacattgtccaagagactcaagcgccaaggctgctctgatatttgctctttgttaccagcagtgggtattagcgtttcacttcccggtctgtcctgacgtttatctcagtgccctttaagtgggcacttgtgaagagctacagaaaatgatctcagatcataaaattccgtaaaactcccagatgaaagattggaaggctggaaaggcaataatggttccagctccttggaggttctctcctttggaagccagttgtggccaagaaggcgggagaggtgcatgtggagaaggggagcgctgtgcttcccccagggccgccaggcagggacccaggggagcgctgtgcttccccccaccccaatccctggggccaccaggcggggacccaggggagagctgtgcttccccccaccccaatccctggggccaccaggcggggacccaggggagagctgtgcttcccccagggccgccaggctgggaccgaggggagcgctgtgcttcccccagggcctccaggcagggacccaggggagtgctgtgcttcccctccacccatccctggggctgccaggctgagactgagggcagggtggccgcgctgtccaggccagagggcttagttcccttgcaccctttcagtggagcaagtcagggctgtgcacagaggacctgggaccccaaggcggggacaaggcggaaactcaggggaagccaggacacaggccctggatgggtggggagcggtcggagaaggagagcagccaaagctcctagccaggcccaggctctgcagccctttgccggggctgtgaaaccactccccacggagagcagcattgccaggctggcagcagttcagggcggcagttctcagtcctgaccgggaagcctgttaggggtacacatcacctactcctggagtcccagatggtctttgggtgactccagtgtacagccgggttcaggggtgtctcagtaaggggctgtttctgacgtggagcgcctcctggttctggagggtcactgtgtgaccctctggctgggccaggacacggagacaggaggtatgcatggcacccacgggctgggcactgaggctgccaccagagaagatgggaacccctcaaggcacatccttagaggagtcgccacgggaatgtgagatgcaggtggctcactgtggttgcctgggacccacaccatgagggcagcccgtttgggtgaagaatttaaggagggggacgttctggcctgggtggggtgaccatgtgggcacagggctgctgggcccaagtctggtggcggcattgagagaggggcagcgtggggggacactcaggcctctgtgtcccggcccagggtgactaagggggaaaggaggcactcgccgtctgtaggtacttgtggtcacctcaccaagcaacaggaagtgatccttggcctggagtgaaggactagtttgggaagaatgggatggagtagagggaagtgtgaacagagcagcttgctaacaggaaggctggtggggccgggggcaccccaaagccattcctggggacaatggagcaacccgtcgggcctccgactcccggcgcttctgttacctgctgcctcactgctcaggtcacccccaccacttgaggggagatgtgtcagcaactcagcggcgccttcccttacctgcgcctccacctgaagggagcctggcgattaagggcacgtgtcatgaggtctgtgtgccttaggcattccggtcacagggagctggagccctcaggtggagagaggggctagcccaaggggtgaggtctgtcctgcagctgacacccagctgactgtccggcggaaggaaaactctgggtcagggattcgactgcaccgtgttcccggcagtgcggcttggaccagtcctggacttcggtttcttggagcgcttggtctctgagggcctccgtgagcctggctggacacaggcagggcgtggatgccaggcaggtccgggccaggaagcagtatgccaggctggatgggcgccgaccttgaggcgcctgcagcctcttccaggtggggccctcctcagcgggaggctgcatgtgtccagggggagccccctgggaagggcaggagcttgcagggcttcagaggggaggaccattctgtgcaattctcttgacggtccacccgtgggaaccccaggcctgcagggctcagtgttgtttccccggcaactcagcctggactcagagcacaggagtcatcggactgagaccccgcccctcctcctgggcctcaggtagcagctggtctggggcctgctggtggggtcacccccatgagttccttcctcacccctactgggctccccagctctacctcctgctccaccccttggagatgggccaccaccccagcagagcagactcggtgtgggcgcaggtcactgcgggccagggatggccgtgtggatgctcagtgcccagcactcacagaggcacctcgagggtggggtgcggtgggatgagctggtttgctggtaaactgccccagggccacagggaggttctggagaaatccaggctccagtccatcagaaggcctagtgataccagtagccaaggtgccctctaccttcccccaaaaccatcccgtcttccagaaaaagttcatcagagcccctaggtgaaccaggcaaatgacgaggcagcagcaaagcacttgggcaccagggagggccaaccagatgggacctcagcaaggctctggccctcaccctcgttctccacagatgaggacggctaaagccacttctggcccatttgaaagggactttaggtacctggcaggcctaatatggaggaagcgctcacaggcgtctgtcctgtggggccagcgctgaggaagctgtaactcagcttgaagggaatccctgtgtcaggaggggcaggggccaggaccctctcaagggctggctgcagttgattgtcatggagaccacaggatttcccacaccagcccttctttttacttttcccgggagggctcaaaagatgaaatattctgaagccatgggcttcacctcccagggtttgaggcttggagcctggagagacagtgcccggaggcttccccgtccttccgtggcatccccagagcctctggcagggggtcgcacccctgccacctgacatgcctccagccatgttcagggcaagctccctgtgggaccaaggtgcagcctcctttctaggacacaaactcagacgttgtctgtaagtcagccctacgtggttcacggcccgcctgactccctgggtgcccgagcacgcagttctcagtgccagctgaatgccacaccaaagtgaccagggctaccctgccctcctgtcagttaacttctggcccacaagtatccatctccccattgcccccagcggccccgcccaatggggcttcttccctcaggaagctgaggtcaagaaaggagacgtccccagaaagcagcaggggcccctggcaccctgggggtgcaggcagatggtgggacaggctgggcgggcaggggaggggtccgggcacaggcctgtcggggggccagaggctcttagagcacaggggccgagtttgagcaggctgctgcggcacatgggaaacacaggccagtggggcgtgtggctctggctgctctcctggggacgggcaggaaggagggaatgggggtcacctctcccgggcttccctcgtagctcagttggtaaagaatctacgtgcaatgcaggagacctgggttcgattcctgggttgggaagatcccctggagaaggaaatggcagcccactccagtattcttgcctggagaatcccatggacaggggagcctggcgggctgcagtccatgggtttgcaagagtcggacacgactgagcgacacacagacttctcccggctctgcccctctctccatggtccctggagcaaaccccgagcctccagagaggccctgggcgcttccaggagaccacttggttttctcggcccctcccgccctaaggaggcctcggaaggtccctggatgagccccgttcaggcatctgccccccagagcctgccacaccctctgtaacagggtcaaacaagctgcgtggaccaaagccccttccttcccatccctcggcctctccccatccacctctgtcttcgcccccactgcaccgactcccagcaagacccagaaaaacaagtcctcataccctctcctcccaccacacacccccctaaaaaacttcgcagtgtatcagacacattggctgcattagacatgatgaatttttaaggcatgagttggcagggttaccatggctgcttctgccctgaggggcacactgttgaggattgattgaaataaataaaacagatttacagctttcatactcgggaagcagagagctggaaggggagagaagccgggggctgtgggggaggaggcagggagctctctgaacttcagaagggagcccatggcctcctcccccatctgaatgtctcagcgacctgagagccactttctctttagattcctaaaggctcccagctgtcgggacaaggggcagggaccaggcaggagggccctttcctggggaaatgactctgggtcccgtgtgccctgtgctctacgttaggctgtgcttcagttacagctgtggggctcctggcaaaagcctgttttgttggccttggggccgaggagccgtggacgtgacctagggccaaaaggagaggaagtgaggacccagccctccatgcagggtgctagcagctggggatggagatcagaggagggcccaggctagagggagaaggcgggcactctggggagacagattgcctgaagcccgccggccagccctgaccagtgctccaaggcgggctccacgtgcagcctcgcagggagcctgactcaggacgcctgcccgctcacctcccgcagcccaacgcgccccctaccccgcccccctgccacaggccacaccaccccttgaagagccgagctcacgggggcggtcccccagcccagtccctcacggggtgccaggcgggctggatggccggctggagacggagccgtgacggacctggcaggcagcgctggtggaggacgcagaggatggctccatgagctttcagggcagcctcagagacggtggacagacctgcccgcatcggaaaccactggttgggcccagccagacaggaggcgccgaacaaagtcactggtgtcgcctgtcccccgagtggcactaatacagcacgattcctcaaggtctggaggggcctgggaaggactggtcccctgactcctcgggaggtagggccctagggagcggcggtgcacccgctgggcccaggacctggcagctgaggctcattttgagttctctgttcgtcgtggggcagtgaggagggaggcgactgagggttgaagcaggaacagactgtattagtagtgactgggggccgggaggcatcccctgcgattatgcccgtctcggcagcagcatccccttctgctcaagtggggtcaatccagagtctcccctccaggccagctgttcggtgccctgtgctggtggccaccccatcagtgggggtagctagtgactcaggacagtcaagagtgggaaagccctccagcctccatttccccttaaacttctcttgaatccacctgatgccagttccatgtcccccgaccagtaaccagactgactcgccagtgggatgagttgagcccaccagctggtcccaaagctggcactgtcagcccaggtgggggacactcctgggccctacaggctacttgctcacccagcaccctctcttcatggatcagacatactgtctgcttcagcttttctacaaaaagccaggtctgagcaaggagtagggaggggagggccaggcagccgcccccagcgcccctcgagaaaggatgagttcacttcgcttcccagccagctctgggtgacgggctcggtgtcagaaccagcaggaccgggtgccgggggcgtcggcatgccctgacttggcgccaggcgccagggagaccggaagggaacccagggacccaggaagccttggccgacaacgtgggtgggggagtgtgacttcgccggtcctgttttgggagggtgcaggggagtggggtcatgggaagaagtctcctgtcttctcccaaagccggatggctgacttcagatttcccagagcgtagcgcggcaggcagcaggatgcctcccccgggaagaggacccgtgcttgggcccctgttccccaaaagccactctgggtccctgctgctccacgcgggcctggcccccaactgcctccaccatccatgccccactcctctgtgccagcccatgcctgccccccggccccctctatcccaaaaggactgggccccctccctcagcaccctcactaccaagacagcctgccccaggcaccctgccccgtgcagccccccaggcctgcaggatgcgccccggtagagcagggcctcttcttaggctctctgcacacggcccagcagggaggggtcttggcccccacaccgggactcggccttgcccagcttggtcccggttcctggaaaagaagcagcacacggggccttcccgcaccaggacagagcaaggacccacagagcctcggggcacgacctgccctctgcagcccctgccaggccagttgaggtcttcctcctgcccactctggctcgtggtcacctgaagcaggggctgtacgtgggcaccaggctggaccgagggcagcacctcccactgcgctggggccattcaggggcagagtctggcgggtgcttgaccggtggttgtggttgggggacagtgaggaggctcacaccagcccggcaagcgtggtgtggcccctgtgggcaggctctggtcctgagccttcccagcccagcgcccggcttggccttttgaggccgcccctctctgtgagttagggaaagtggcagtccctcttgtgtcccggggtttcagagccgacggaaggtagactgctcccctgagagctcctatgagtgacacagggtcccccacaggaactcggacctggaagcacgggacagcgggccatgccgcagcgggcggctggaggagagggggcagagtatgcgctgtgagccgccccggggcaagtgcctgcggacccctgctctcctcaggcctaaggggcctccaggttgtggcctctcagaccccacccaggctccctcccaccccacctctctgccttgtccccgagtattttacaagctattgtctcatcgcgaatagcacgttaatgtgggtattaaaacatgtgggcaagtgtttaatgcgcgcaagctgtgttccattattgatgctctgcttgaggcccggcaggcagcacaggcgggctggggctctggagaagcgatgacgcagcagccccgtgaggccgccgtctgccgggcctgctcaccacgggctcctaggaggcagagtggggaagggagctcagtccctgggtctgaagccgcccctcctcccctgcgggtgtggccgggcccctctgcgtgcgtggggtgcaggctccgtgaggtctcagcagatcccacggggggagcctgggactgggccagggaggctgggccgcctgtgcaggtcacgccacaaactcaggtggagtgagaagtgccccctcattttcggccacgctgggtcttcattgctgcacgcaggccttctctggttgcagagaacagggctgctctctagttgcagtgtgcaggcttctcttattgtggagcagacgcttggtgcacacttcagaagttgccacccaggggctcattacttgtgtcttgagggagctagagagtgctggctctggtagttgtggcgcaccggcttagctgttcttcggtatgtggaatcttcccggactggggattgaacctatgtcccctgcatcggcaggcagattcttactcactgcggcaccaggggagtccgtaatttagcactctttaagaagcagccctgttggggcacggagggtgaaaaaagaagcagggagtctgattagaaggtggcttggaattgagcaggcaagagagggctgactggtggccccaggcagaatggctgagccgggccaggaggcaggcgtgcgctgaaggcttgtgagagggcccccgagggtcacggaggcctccgtggtttgggctacagcagctgcatgggcagtgatgtcccctgaaggctgggggcctgagtcgagggggaagccaagaggtgtgctgtggccccaccaagcctgaagggcctgttggtcaagcaggcagggcagccaccaggtgagcggtgcccgtccagaggccaccagggctcgagaggcgcatgtgggagccgctcatctagagacggctttgaagacatccgcagggccggacacggccactgagggtgccagccagaaagggagccgaaggcgactgaaagccgcaaggagggcgtggtggtgacgcggacgtactcaatgctctgctgtcctgaccttctgaggcctccttgcactcgcggcttctgagggacgccgggaggccgtggtgcccacctctgctcctcaccaccccccttgccggtccctctacaccgtggtccccaggaagcgctgcctgacagcagcctcagctgtcggcccccgtcatggagacggcgacagctgcgggcaacggtcacttgtgaccgtttgtcagaaagcattccttcctcccggtctgccctcctgcccacttctctcccacggccctagagaggggcccgtctcgggctgggagggccccgaggggataaaagtgctgtctgtgctctgcccaagggccacccgtggtaccaatgcgggacccaaccaggggtcctgtctgtcacgcaccacgcgccacacaggctgtcaggagtctgggcggctgccctccgagtcgcccccacggtgcaggtagacgtcacccccaactagaaggtggagaaattgtcccacagacacactgggtcacacagctggtcaggaatcaggagcactaggctcgaggctgtggcccatcctccacccgccccatcccaccctccggcccgtccccgcaacagctttgtttccatttctttggtggtttctggccccggcctgctggttccagctgggcctaggctggagacagcctgcctgctctttgcacttcgtggtttggcctctctgttaccaaatgctctgggatttttctggagccaggggtggacaagactcttctccagtctggccccagggcgtggctggtattcggaaggaagcaggaagccagaccctgatcatgctgagcttagtgtctgctgagtggccagaagcagaggtgttagaggctcattggctgcaagtggggcacgttttgttcagcacctttgaggcctcagacccctgttcaggcaaaaagcgcccgagaccaggagtcaggcaaacagacgttgaccccggatgagagacaggaaagggggcgccatgctggcaccggcccccaacaggcagggctcaggggccgcacccacccttcttaccagcatttgccgactcctgggtttgctcgtctcgcttccagaggccttgagattcctagactcccgacagaaaggcctgcttgtccccacaaggccaggcttctgtgggcagctggcaaaccagggaggtcgataggctccccccagccctgtccttgagacctggtgtcactgttgacatcaccttggtccagagacccgggggaaactgctttcttcctctgttctctgggttcccagttttcccttttataaaatggagactccttctcagaaagccccagccttattccccaagctgtctttcttgggatttcacattcttgcctggggtggagggataaacacagcctgtgggactctggagtgcccaggagctgtggaccgagctccactgagactggcccccttgggcaccccagaggcccaggacctgggagccctgccacaggtccagaaggctctgcctcctgttgcacgcggacagcatctcccctcgccacccccacaggcagctctgcctcctgttgcacgcggagagcatcttccactcgatggcagacatcctgctccgggaggaggacctcacgtttgcctcgaccatggtccacaccctcaacaccatcctactgacctccactgagctcttccagctgcgaaaccagctaaaggacctgaagaccccggtactcctcacccgcgggctccagccagcgtcgttcacgtgcgcacgggcgcggccgtgccagcccacccctcggtccccagagattggtggggaggagacaaagatgcgacccaaggcctcccggtccagtgtcaaatatgggtccctttgggcgggctgtatgtaagagctagccaggggcgtgggtctccttggagctgcccgctgtgcagggctctgcccacagaaggctggggaccctgctccggggtccatgtgccctccctgatacccaacccccacttggcactgcccctgtgcacacacagcagctcagttctgaaccccccttgcaggcccagttgaatcgtgcttactgggctgtgccagctggtcagggtcgggcctgtggatacaaccccaccggggtcgggcgtcaccacccccctgaccctcctccttggcctgggcccccctctcccgcagagggacatgtctgtgtcagccagggtgtcacggtgctgtccggcccaggagttttgagtgcagacccaccagggctggtcggagagagcaaggaggcgctcaccattctgccaaaccactcggggggaagtgggtcaaaggcctcgctcggactgagctgcggagggtccctggggttggctgtcatactggacagggtggcggctccggggcttccatctgggctgtgctcattctcctcccagctcagaccctgcgctggcccatctctggggtctccaggacatccaggcctgtgcctgggggcattggggcccgacctctaggaatgagccaggccacactcctgcctccctcctgtaggatgttccttaggggaggggctctccctagggtgggctcagctccaggcgtggtttcaagtgcaaagtgggctgcaaaggaagaagaggtagttttgaggatgacaggaatgcgctgcccaggagaggaggcagggccctgagcaggcttcctccccgcccgcacccagcgccctcgtggccccccaggccctgccgtggaaggctgggagcgtgactgcccttatctgccaggccaggctcactgccggcaggccctcgcagccacagcacgtggctctgtgcgcccgagagtaatgacagggtctgaggaggagctgtcagcgttccctttgtgacggctccttccggctgggctgccaaacacagcccggggggccaggccagcccctagtgccccgcgaggtgcccgtggcgggcgtgggcgggagggggcacggctggggggtgggacccaggccggggaggggtatggctgggggcgggctctgttgacggcgcacaccccctcaccctgcaggagagcaggaacctgttctgctgcctgtaccgctcctggtgccacaaccccgtcaccacggtgtccctctgcttcctcacccagaactaccggcacgcctacgacctcatccagaagttgtatccttcgctcaccatcctagcgtccagcctcagggggcctgtgggggccggtcccagcggactccccccgaggctcccctccaggcctgtggcttcagggcccgtgaggcccagtgagggacgcagctgaggaaccagggtcatctcgcgaaccggaggtcgggaagggtgcgtgcttaggtgagggtgccccaggagagaggtagggtgtcctcagcccagtgctggcgcggggacggggcggttggacggcaggaggagttgagcccaggggcctttgggggccgccgagccccgcagaggacgtgccggcagaggcggagcagccgcggggcctcgggacgagggacggccccagcgcccatcaggacctgtctcagaggaaggcatccaccgtcaggttttgcttggaacactgtgaagcaaaccagctttctctgcatggtgtgtgacctgggtcagacagctacgtaggaggcaggattggccttctcctctaaggggcggagagctaggataaggaaagaggggccctgcggcgcctccgctgagggtccgccgtggccttgcccggctccctcaggcgcccgcacgccgtcacacctctgtctgcccttcatcactcaggcaggaacagggccctgcctgccccagcaccccctgggccgcaggcccgagataagagcccttagggcctggcgggcgcagaggagaggagcagacggagcgcggggctgccctgccgcctcggtctagaggggcagaaaggcagagggaacaggccgctgcggctgtgctttgtgtcccgatgctgctcaggtggaaacacggcctgagccctggagccagggcctggggcaggggctgcacgctctgtgcagccaggccagcccctccgtgcccccagctcagctccccagagagcaggctgcccccaatgcccccagcccagctcctcagtgggctgccccagggcccccgcgcccccagcccagcccctcagaaagcagtctgcccccagtgcccccaccccagcccctcaggcaggtgggctgccctggccagcggtgaggcttccttgaccgccctcccagcggggacctggaggtcactgtggatttcctcacggaggtggacaagctggtgcagctgatcgagtgccccatcttcacatgtgagtgtgtgccgtcctgcagggaggctgcggagccagattcagagagtggctctccgcccctggggagggaaggtgggcgggcgggcacccagggacacttctggaacatcaggaatgtgagaatgggaggacggggctcaggcggccggctagaacagggcatcagagcctgcctgtgcgctggcaaaacccacctggggcaggcagggcggccattgggagtgctctcccaggcgcctaagagccagcccctcgtccctgcagagcagggctggcatctgccaggagctgatggcaggtgctcagtgtaacacctgagctaagtgtgcgggagaggcagctggccggggcgagcgcagctcttgatgccttgcctcatctagtgcctgcgccccagagcaggcagctcggaatgcagcctgtgtgcttacggtgtgaaagtgaagccaggcggcagccctgctaacagccagcttcctcctgagcctagcacccaggccccttgcttgggcaacacccctgacctacccaggccaagccctggagcccaaaggtgacccaggggctgcgggctgccccctcatccaaagagaaggcagcttctccacacagccaccgtcatgatgacaggcacatgagcaagagagagaccctgttcctagcggaaggcatcagagcgtacccagcacggtccctggactgacatttcacttcctcagaggtctcccggagcagcctagcttgtgctcccctgacggcaggtccagcccaaccctagagaagccacagacatctctccaggcccagggctttcgtgcggagaccacaacagagtggtccacagctggccctgcctagccccgttcgcaccctcggtggcctcgagccctgtggtgacttggtttggcccccaggccagctcacccggggccagagcagggacggggtttggaaccagcaccggtgggcctggggtgaggggaggggctgctgcttgagacccccactcctgctgcagcccagcctgaggcccgcacagagttcccaggtgacatggtctctccagctctgtgtggcttgtcctctaccaaggatcctcaagatggggccttagacacaagaaagaaatgagtgattccctggaagggctcgggagagccgcgtggctctgtctagttgggaccgtgctgggcagggcccgggtgcgtccctcctgtcaggcacagcgtaggcagggctggcatctgacgcagatgtccaaaagtgtccaccagacgctcctgggctcggtgtgttcagtcacccaccaaagcacttcccaccctgccctcccttaaagctgccccaggccagcctctctctggctcaccctgtttacagcgctctgtgcccacgtgtggagcgggcccaggggtctgtcacgctccagccggggcccctcagttccagggagcggcgggtatgtgccaggccctgcggctggctggggttgccaggctgaggtgactgtcgggaaggtcggacagcagaggaggctgatctcgtgtgatcacgggaatggctcagacgccgctggaggggggcaggctgcgaggagcccagccaccgcgctgaccctcctggccaggttgcggtgctgtcagaaccgtcctgacccctgccaccgccctccctgacccctgtcctctgccctccctgacccccacctccaccttccccgacccctgccctccgccctccctgacccctgcctctgccttcccacagacctgcgcctgcagctgctggacgtgaagagcaacccgtacctgatcaaggccctgtacggcctgctcatgctgctgccgcagagcagcgctttccagctgctatcgcaccggctgcagtgcgtgcccaaccctgagctgctgcagactgagtgagtgcccagctcggggacacagcctggcgtgtcggggcatgaaaggggtgacctgggccctccctgacctccacctcacacctcctctcactgcggacactgttcgcctctcggccgcttgcccgtaggcctcccgtttccacatcagagcccctggctgggagacctggcgctgttcacaaggtggtaggtagttgggttgagtttattaaaaagtttgaacgcgtgctggagtgacccaaacagaaggtgcagggggaggaattcgtctcccgtttcagagactgtgtcgcctggggcacgtggtgggagagccacagggggtccctcccaggctcagacagccctccccaacccgccgtgcagcagagagacagccctgggccacggtgtgccccgggtcgcctcggaccgtccctgtcgccgatgggtgtcggaaccaagggtgcaccacggccatcctgctctcgacctatccacaggcaggacagatcccaggctggctgcccggaagggccatgcacgccagcctccggggcatccagactcccaccctgaacccactgctggcccggcccccggagcctgttgggtcatgtctatatttggtaacccttggaggctttgcctcatccacaggcatttggcatccgagatggaaaatttcacttgtcaggtcgccatggaaacaagcagagccactgagaagatttacgccgaatggagcacacccagcttgcaccagatgccctgtgcgtctagaattccctcccaggctgtgcaagcccctcggcaggctgggctcctcgctcccacaagaggactcaggcctttgccatgcggtggacacaggcagccttcagatggccctgtgccctctgtcctgcagggcctggggcaccaccccacacacctgacctggtctgtccaggggccagacgtgtggtccccaatgggttttctgcctgccccaggccactcgaggggccggagccccaggccaaggcgcagctcctgcgcaccatgccccgctccccggacagcggcggggagggccgggtgctgccccagctgctcaagacgccgctgggtgatcctcaggaggcggcactcggtgctcggggtgcccgggggcaggggcagccagaggattaggtgtgggttttattccctcggccagaatgcctctggctgctaggactcaaaaaagcccagggcctgtcctgtgtttcgttggcctggcctctgctggccgccagtgcctgataggtgttagggtcaccctggcagccacttaggagggaaggtgagaaggaggcaggaaaggctgcttgcctgtgccctctgggccgggccgcagcccctgtgctgatgaaggccggtgcctcctaagagctctgtccactacatctcctcgcatagggagcattctatgaaaaggaaggaaggctcagatcagttggagccctccccaagccagggtaaggcaggtctgcaggtggaagctgggaagaggaggctcgcccctggtctcccgtggtcagcggcagcacgcctggggcctctggctgataagtggctcgcaggcctggactggggtctggtctacgctctgctgagagtctgctgtgtgccctcaggccagccccatggcttctcggggctctcgatgtcttcatcagtaacacactggactaaatggatccatgggggtctgcccaaccttcatggccttgggttcccaggctctccttgcagggacccaagagctgccctggaagaaggcaggggagagcgggtgaggagggggcctcagggccagctgggggtggggggccgcttgccggcttaggcttagagatacctccgccctggagaggcagccctgcgcagggtggtggcaggaagacagcggcgggctgcccagcaggcccacgagcaggaaccagctggaggagcctctgctccttgcccctcgcaccccgctgtggactgagggctcagggaccctggccactggttcaggcttctgggccattttctcctctgtgaggcaagagggagcctccaaagcagaagctggtgacactcaccagccaggagccgggtgacagtgcatggtggcagaagagagggctggccttgggttctggaatcccagccctgcgctgctggccgggtgtcccccagccactcacggcttgagggtcgtaaacatacagggaacacgaagggctgagcagcggccacaccctggactggcagggggcgacagggggtgggggcaagcctcattgccagcctccatgtcggaggagcccccacagccccgacacagccctccctgcccccaagaccctgggcggggaagggcctgcccacagggggctgagtcacatgaggggcaggacttgctgccttcagggcgcgggagcaaggggaagcccagcccccccacccccgccggcctggccacatctgtgcacagcacccgggatttgccgccgtcactggcatctccctggcaacccctaatctcagcccctctgcgtctaatgcaaagagtgctggggggagaaacacagactgtgggtgccggcctcagacgacgcgcttcaccaccatctctggcctgcacgtctccccctcttccatctgcatgcgtggcgtggcatctgtccaccccctggggccagtgctcgtgtgtccctcagcctcctcagaagggggagctgctcccttgtgccagggacacccaggccccaggaacactatgccagggatgtcccttccgctttcccaggggagcccagaatgctgcccgcagactggcccctgagagcgaacccagcccagctccttgtgagctttgctgaaccagtggtgcccgaggcccaggtgaggtgtactaatagttcaccccagcagagagtcccacaaagactcttctccctcattttggcctcgctggaggcagatcatgtggtccgggaagaatctgcttctggactctgaagcctagaggccctggtgaagggctctcttgacaactgtgggctgatcagctaggcagagaccctttgggccactgggcccaggaaagaagcggccacagccacactccaaggtgtttacaggttgtgtatctttgtcaggaagggaacaggctgagtagggctatggggctgctccagttggcatcccaaccatgggaagagttccccctgcccctggtcctgggtgttttttcagaggtgccttccaggctctgaccatcagcgggctgcgccccaccaggagccaggttcatcagtgagggttccatttcgtgaagcacttgtgattcccccaagcggactgagctgctgagcctcaaagggacagggttgtagccgcagtggccacccattgggcacctaggctgggactggacaccagagcaagttcctcctgtcgtgtctggcattggagctgtgcggtgcacaacctgtgccacggcacagagcagctaggagggtgctaacaaggagttctcagaggcgtcagctgcccagtggcaagaccagctttcctcccccagggacacagagtgactgcgggcctctgagctccagagctaaaaacagatgtcctgccaagtggagagcctgtagacctcagccatccctgtggtccctggcctcagccctgcccctcctcccccttctccctggaccctgttccaagccccagctggcttctggctggctgctggccctggctttcaccccaaagggagccactcataaacaggaaatgcttcctggtgtgatgcctgctctgggcaccgttgccagcccacaggctgagggctttatccaagcagcagtgttgactggtctcgcccgctgtgggggagggggtgctccagagcgctcccctctttggggccaagagttggggatttgccagggctgaggtgggtacatgtcccaaggtcgggctccaccagcctgtggccggtgctctcccccacagcagccccacgtgcactcaggccctgacactgagcccttctgctcccttccacagagacggtctgaaggcagcacccaagtcgcagaaagcagactccccaagcatcgactacgcggagctgctgcagcacttcgagcgggtccagaaaaagcacctggaagtgaggcgccagcggagcgggcgtggggatcccctggaccggaggggggtcctctgacggcctggcgtagagacaggcccacggaacggtgccaaggcgtaatgggggtcttcaggcctcctccccgcagagcccaagggtctgcctggagggcaaggctgggcctggccaccagcgcggggcagggtggtgggctggaggcgctgaccaccgcgctaccctcagagcccagccccaggcccccagctgcactgggggtcagacagagctggcttcccaccagggtggggccacaacctcagacatccctgttttctggaatcgggttctttctaacgccctcttgtaaagagcttgatgccccaagcccaccagagctctgacctcgtgcagatgtgtgtacatacatgtatacccgtctgtgtgcacatagggaccagcacagatccgtatgaaggacgcacccctccccaataaagaagtgacagaaagctctccacccacgcctggcctgctccttcccacaggtgcccgccccgccgatgctcagcagccctggg

SEQ ID NO: 203 - DNA, 30993 bp, Hippotragus leucophaeus
  source 1..30993: mol_type = genomic DNA
ttcgacaggaaaaccaatctcagactcagggatttgagacaccagccccaggccccaaacacttggccgctgccctaggcatgatgcacctccaagaaattcagcactgtttattaggggttggacttccacttttattttcatttttacctggttggtccctgcgttcttaagaactggccccatttatggctgaatagattatccatccccaccatccttcatatatttccagaggtctctaatggagatcctgggctcagaacattaaaaactgggatttcttttacacaggctgagtctcttccattcttctttaaaaaatttaagaacccaaaagagaaactgaaaggagaaaacagcctaatttaagaagctgaccccaaagtaaattctgcattcctgttgttatttctccatggaactgcactgccgttcccataacttcttcaaaggagtagtttattctgtagttcattgctaagtctacttggaacgccctagaaaggtttttccattagtgactctatccagctggctccgttgattagtttagtggtggcgatgacatattctgtacctccatcttccagctgggagagaaatcgcagggcagcaatttcagcaaaggttacacccccgaggaaaaagatcagagtgactcggttttctcctggttgacctaaaatttgaacatttcagaatgaagaatcattatttttaaaaattatgtatttatttttggctgtgctgcctgtgggatcatagtttcctgaccagggatcaaaccctcgcccccagcattgcaatgcacagagtcttaacccctggactgccagggaagaactatttattattgatgcttcttttcccacctcttaaaaaactgcatcattcctaagaacagtcttatgtcttggtccagacagttcacttgaaactcaggaaccatgattttgatttcaatgttttttccaacttaggagatcctcaactcagaggttgaaatctgctactcctaagggagtaatgagttcccgtgcttacaatgtaattcacaactaacaacagcagtaatactggactctgactccaaagtcctttacaaatgtatttttcaaagcaattgtgttaatacgtgaaaaccacagaaacagtgcatgagtatctgtagttacgggccccagacttacgtttcttttgcagtcctgtgggcaacggctgccgttcctcaaagtgggggcctgggaggatacgcagaacttcctcaatactccgccagccgggccgggaaagcagctgggccagtcgcacactgagtggggcgtaaccactgtatacgtacgatatgtccgtggggttctgttaaataattgaagagaaaaaagcttgtacagcaagagacagagaagtggagccacctaactgcggcttttggggtaatgcaaaattatttgatttggctttgaaggtagaaacacaaagccccaaaatagctggctccaatgctgaaatatctggcagcaatattgaaatatctttctctaatatcaaaatattcttctccagtctactcatgcttggctctgttcttagcagccgaggggtcactttcttctttgttgtaatttatttttaattggaggatgattactttacaatattgtgttcctgccacacatcaacacgaatcagccacgtgtgcatgtgtgcagtcgagtctgactctgcaaccccatggactggagcccaccaggctcctctgtccatggaattttccaggtaaaaatactggagtgcgttgccatttcctccgcccagggatcaaacccaagtctgctgcacctgcaggcgggttctttaccactggcaccacctggataggtgtacacgcatcccctccctcgtgagcccccctcccagcccatcccacccctctagtttgtcacagagcactggatttgagctccacgtgtcacacagcaaattcctgctgcctatgtatttaacatatggtaatgtacccgtttccatacttttccctccaaaggttcatttccaactcaaaccttcagaagccactcaaagcatctctaggtactgaagatggaaagctgttacttggtttggcaagaaacttcttggcaggtaaagtggagcgctctagctgagaaacagaacccttggacccatcaattctactttcaggcatttatcccacagaggggataagaccagaggagaaaagaccaaagcataaacacgttaatgcaacactgtatgaagtagtgaacgactgcaaatgacttgaatttctaataaatcatgaaacaagatataactggaaaaccactatggagcaattaaaaagaagttaaaagaatgacggagggagtacttctctggtggtctaatggttaagaatccacctcccaatgcagtggatgcaggttcgatttcctagctggggaactaagatctcacacgatgcagggcaactaaacccacgtgccatggtaaaagatcccacatgcagcaactaagacctaatgcagtcagatacatatataaaagaatgaaggagggcacttccctggtgatccatggattaagactctgtacttccactgcaggaagcacaggctccatcccttctcagggcagtaataccctgagtgctgagagggtaagaggtagatgggtgaggtaggtacaggctggtcagggcagtgaagagccaaactaatacatgatttacacggtacaacacaggaattacggctgtcattccaatcccaaagaaaggcaatgccaaagaatgctcaaactaccgcacaactgcactcatctcacacactagtaaagtaatgctcaaaattctccaagccaagcttcagcaatacatgaaccgtgaacttccagatgttcaagctggttttagaaaaggcagagaaaccagggatcaaattgccaacatctgctggatcatggaaaaagcaagagagttccagaaaaacatctatttctgctttattgactatgccaaagcctctgactgtgtggatcacaagaaactgtggaaaattctgaaagagatgggaataccagaccacctgacctgcctcttgagaaacctgtatacaggtcaggaagcagcagttacaactggacatggaacaacagactgatttcaaataggaaaaggagtacgtcaaggctgtgtattgtcaccctgcttatttaacttatatgcagagtacatcatgagaaatgctgggctggaggaagcacaagcttgaatcaagattgctgggagaaatatcaataacttcagatatgcatatgactccacccttatggcagaaagtgaagaagaactaaagagcttcttgatgaaagtgaaagaggagagtgaaaaagctggcttaaagctcaacattcagaaaactaagatcatggcatctggtcccattacttcatgggaaatagatggagaaacagtggaaatagtgtccgactttatttttctgggctccaaaatcactgcagatggtgactgcagctatgaaattaaaagacgtttactccttggaaggaaagttatgaccaacctagatagcatattcaaaagcagagatattactttgccaacaaaggtccatctagtcaaggctatggtttttccagtagtcatgtatggatgtgagagttggactgtgaagaaagctgagcactgaagaattgatgcttttgaactgtggtgttggagaagactcttgagagtcccttggacagcaaggagatccaaccagcccatcctaaaggagatcggtcctgggtgttcattggagggactgatgttgaagctgaaactccaatactttggccacctgatacggagagctgactcatttgaaaagaccctgatgctgggaaagattgagggcaggaggagagggggacgacagaggatgagatggttggatggcatcaccgacacactggacttgggtttgggtggactctgggagttggtgatggacagggaggcctggagtgctgtggttcatggggtcgcaaagagttggacacgactgagcgactaacctgaatgaactgatattcccaccggggagaaacaatccaattttagtactgagagaagagattgttttagcttttgtgccaagaggcagcctaataaagccccttatgaaaaaacaaaaaacgaatataagaaaaatgaaatttagaaagatgggaataaataaaaaatataaagcaaagtgcaccctactttgaagagccaaggtatagaagatgcaccatttatgtaaaaatgtttgtctaggatcgcctggtgatccagtggctaagactctgtactcccaatgcagagggcccaggttcgatctctgttcagggaactagatcccacatgccacaattaaaagactcagagcggccaaatcaataaataaatattaaaaaaaaatttgtctatatacagaatctttctgggaagatgcgtaactaactggttatagtgatcaattctgagtggagacgggttggctgtgggaggaaccctgcttctcagcatctgctttccttttgtgctggatccttgcctgaccctccccaccttctacctggtgctctgtgcccaggaggcagccctgtgggctccacaccagctggaaaatggagacaggacaggactgtgcggtcacattttgttgccccgaatccctctgtgtaatgctgcccaaggctggttgagtcccttggcttgtcaccccacagctctgctctcctggttctggaacccctgcccttagacctcagatgggagggggtgagtggttctctactgcactgcctgtccctggtccaccccatctttataaaactccatcaaactactcagtacaagagcactgctttctgctaggatccacacattaaaaaaataaaaaattagaaaactgtctttagaaagcaaagcagatgaacagatcaagtagcgtatgtcatggcaatacaccagcaatgggaactcaattgagctgaagtacacatgcgggtgtctgactctgcaacgccgcggactgtagcccatcaggctcctttgggcatggcatttttcaggcaagaatactgcagtgagttggccatttcctcctccaggggatcctcgtgacccaggaatcgaacacgagtctcctattatcttctgcactggcaggcggtctctttaccactgagccacctgggaagctctcagtgaagttgaagaggagcatcttacttgctcatttacatcatccatccaaaggcgtaacgttttccggatagtggggtaattgtttctaccccccgtctgtggcttcagcagaccagccttctcgaggttgtgcaaggtcaggatgtgctcatagccgtaggtctgcaagagaaatcaaatcaggaaaacggtttctgtgactttcaaaaaggagcacttccaacaaatccactggtgagcactctggggcatgttaccaaaatccaggcgatgactgtccatgggtgcaggcagggcaggatggaagcctgtcctaaagctgcttgcccatgccaacaaatccagctcactggatcactcaaaggatttaaatttttcattttaaagttccgagaatttatgggcccaacttaagtgagcagcaaataaattatagtattctggacttccctggcagttcagtggttaagattccatgtttccactgctggaggtgggggtctaatccctggtcaggcaactgagatcccccatagcacggccaaaaaaaaaattatagtatattttcatatggaatataattagctgttaaaagcagaatgaggcagacctacacatcctgattaagtacaagtttctggatttattcttaaggacaaaaaatagaatatagtaagtcctctagataaaaaaaaattctgttctgagagcacgtttttaagtccagcaaagttagcctgagtacccaactaacacaattggagggcaagctgcagtttctcttaagcctcacattgatggaatgcacatgcacatctttgaaagtttgtaacttttgaaggtttgtgtgtaggggacttactgtacttcacataacaggattttatttctattaaaaaagatctaatgagtaataaaaggtgatgcttatatgatactttccatgttttaagtgctttatatatgttaactcaatcattcttactataacctcatgaggtagacactattatctccatttgacagagaactttaaataaattgcccaaggtcacacagctaatgagtaacagaggtgggactcagatccagttggtctcgccccatggtctgtgtatgtaaacattctttgtacacacacgcaaagaaggggatctggaagcacacaaaccaaactgctcacgtaagtcctctccagggaggcgaatgcagggagggggaggcgatggtggggggtcacagtttgtaccatatgtgtgtgtgtgtgtgtgtgttagatgctcagttgtgtccaactctttgcaactccatggactgtagcctgccaggctcctctgtccatgaaattctccaggcaataataatactggaatgggttgccattcccttccccaggggattttccagacccagggattgaactcgggtctcctgcattgcaggcagattctttactttctgagctacctgggaagcccttgcaccatatacttctgcttcatttgaatgttatgtgatgagaatgcacatgtaattttttaaaggcaaagcaaacaagaaacccaaactaagtgagtatttagttttgacaataacgtacttaactgtaaatagtaacagcaaatacatatagcctgaaacatttttaaacagagaggagaattttaaaaacaatggtgggcttttccttactataaagtaacaggcctgatttaagtaagttggctaaggaatcgtcatcagaaagttcccttcctccgtggaactgtctggttaaagagcaggagcactagtccccggctgtctgggtttagtcctggctccggtacatactattcatgggattctctgggcaagaacacaaccaccgcagatatgcagatgataccactcttaaccagcagaaagtaaagaggaactgaagactctcttgagaagggtgaaagtggagagtggaagaactggcttaaaactaagtattaaaaaaactaagttcatggcatctggtcccattacttcatggcaaataggaggaagtggaagcagtgacagactttactttcttgggctccagaatctctgtggacagtgactacagctgcgaaatcaaaagatgcttgttccttggaagaaaagctacgacaaacctagacagcatattcagagacatcactttgccaacaaaggttcacacagtcaaagctatggtttttccagtatcatgtacggatgtgagagctgggtcataaaggcggagcaccaaagaattgatgcttttgaactgtggtgctgggaagactcttgagtcccttggcctgcaagtagttcaagccactcaattttaaacgaaatcaacctgaatattcattggaaggactgatgccgaagcttaaggttcaataggaagctctggtcacctgatgcaaagagccaactcattggaaaagatcctcatgctgggaaagactgaaggcaaaaggagaaggggatgacagaggatgagatagttagatggcatcaccaactcaatggacatgaatttaagcaaactctaggagagagaggaggacagaggagcctggagtgctgcagtccatggcatctcaaagagacacaacttagggaacgaaaaataactggcacacactagctggtgaccttgggcaagttacagcactactcttgccttagttttctcatccataaaatggggataagactatctcgatcatcacctttgtaaggattaaacaaatgaatacacataacactcttctaactaagcctggcatgtagtaaaacctcaataaacattaactaatgttattattatgcaaacacagcagacaaataccaaggacaatccctccaggtattaaaacatttaaaagataaaggaaacactacacccaaatagcagctttgggaagtatttttttagaaagacctttcacccctggcaaattagtcatttattttttttttattttttttttaattaaatttatttatttatttatttttaattattactttacaattctgtattggttttggcatagattgacatgaatccaccacaggtgtgcatgcattcccaaacatgaacccccctcccacccccctccccacaacatctctctgggtcatcaaaaatatactgacctgtagaatttctcttttgtaataatccagaactttctgtttgagtccactattgcacacagactggaggcaaactagccttaacaccttgatcaagggatgtttttgggcaatacaatcctcaatgtagctgttgacctgaaaacaaagtgtaaacgggtaccagaatctggtccggggactgacagaactggatatttactattatttttcaaagtcaaataaaggagatgagtgggagaagggctcgttcttttctttccctcagctccctccagagtagctccttcggcccctgctacacacacccccgccaccacgcagacacaccagcgatcagggaacacaggctggcgagggcagactcaagggacccagcagcctgtctggactcatctgtctccatggatggacaacctccagaggctgttgcatgtcctgggtgtgtgatcctggctaccccggcagcaatttatcagcataaagtaacaagaatctttctagaagatgggaattttcacaaattgaatcatttccaatttagtaatagaggtggatatgtaaaggaactatcagaccaatttgctgggacctccctggtggtccagtggctaagactcagcgatcccaatgcagggggcctgggagtgatccttagtcagggaaccggatcccacatgccacagcgaagtgatcccacatgccgtaactaagacccggtgcagccaaattaattaattaatttttaaaaaagatcaattcacttaggaagtaaatctattcatttagagatctttgattttaggggcggggcctcatctttctgtgcatggaagaaagtgctttcaatacaataatcttaactacttaagatctctattttcacattttgcacctgctcttcaaaatatttagataaggcacgtgaatcaaagcaattgcttttatagctgtaatcttagctttgataaggtatcaattatttgttagaacagtttcattttcacatactttatcagtgtctattccagacataaactcctgctccactgtcaatttatcaaagaagtcttcagaagctaaaatggaaataacaaatttgtaagtaagaaattcaattaatgttaatgcttttatacacagagcatgattaggaaacatggcatgcaaaaaagaaagcaaacaaaaaattcaaactgccacctgaaaagaatctaagaaacatggaaaactacaactctgacctcctaagttacatccaggaatagtcaaccactgtaccctttcgctattcttaggactctcatgaaatctcaagatccttaggactctaataagatcttaggaatttttcttcagtatcagtgaaagctaatttgccaagagccttttagttgcatcatcagatcgaacccagtttcacctcatttccacgtccatcaatatgaaaacaaaggactgattttctaacacttttatgtaagattcaaagtatactttataaaacagggcattgaacaatctctaactcagcttttacagcctgtgttttaacaagtaaattcatctttggtgtaatagacatttcccaagctctttcaaaatacttaacataagacttcaagggaaaaaccaaaactgaaacagaaactggattctgctctaagtaacccttagagacaagacaaaaaccagattgaaaaaattaactgcctcatgttaggggaagaatttttttctctttttgacatttcaaatattgtatcacatgattatattatcttattaatgaaagataactgagttaatcacaaagggaacatttttgactataaacatgggaacatttaattaacactgaggataacatatggtattaaaaaagagctaaccctcccaagggagcatggtggtgccaatggccgtggtgtgccagtcagctccaggtgagctccatcacttcccaaggatactcactagttacatctttgatcagctctgcaatcgaggtgtgatttgcaagggagcctcgcgctgcctgcatgtggggcagctgtgaaacaaactgcttgatctccccaaccgtcttggcgttgtgcctttcctgaaatgcataaaagagcagaagcgggaagtggggaagatattttaagcgctctcttctttgtattgcttagaggacattcaatttataccaatgcaaaagaaagaatggaatacaaataaatcaggccggacccatcttcaacatgacataaaaaacagaaaagacaggctcggtgttcctgttcactacattagtactttttaagggagcaaatgcctaaggtttttttccttcccaggcaccagataatactgtgattagtatttgggggacaatattaggttatccacaaacatttctgagtaaaaaattaaaatcaagacattatgttaagagcggaacatgagtgagtgaagtcgctcagtcgtgtccaactctctgcgaccccatggactgtagcctaccaggctcctctgtccacgggattttccaggcaatagtactggagtggattgccatttccttctccaatgaatgaactgaacaagtacagtaatgcagactagaggagaacaaaggtatatttcaggtccctgaaatgtgacagggacaatcagaaacagcattagaaagcagagctcatgctcaacattggcaggcagaaggaacagaacaaaaatagaagtgaagctatcacagaaaagctacctttctactgttaggtattgtgggagactgttaagtcacatattagcagtcataaatagcaaaaagtttcctctgtaacagaaaaaaaatccattcttactgctgaacctcaatcttgaatattgtccatggataaaaaggaccttactttgtgatgagaaattttttttgtttgcaaagtttagtaattgtaaagcaagtaactcagaaaattgaagaaaatcaattaacaaatactaatcctaagaaaaaccatacccttgactagacagacctttgttggcaaagtaatgtctctgcttttcaatatgccatctaggtgaagaaagctgagtgccgaagaattgatgcttttgaactgtggtgttggagaagactcctgagagtcccttggactgcaaagagatccaaccagtccattctaaaggagatcagccctgggtgttctttggaaggaatgatgctaaagctaaaactccagtactttggccacctcatgcaaagagttgactcactggaaaagactctgatgctgggagggattgggggcaggaggaaaaggggatgacagaggatgagatggctggatggcatcactgactcgattgacgtgagtgtgagtgaactccgggagttggtgatggacagggaggcctggcgtgctgcaattaatggggtcgcaaagagtcaagacatgactgagcgactgaactgaactgaactgaatcctaagaaagatgaacctagggacttcccaggtgtgtccagtgttttaagacttcaccttcccatgcagggggtgtgggtttgatccctggtcgaatcacgcatacctcatggccaaaaaaccagaacataaacaacagaagcaaaaactgtaataagttcaataaagattttttaaatggtccacatttaaaaaaaaaatcactaaaaaaataaagatgaaacctggaaatacacactcagtgaaaaaaatcagtcttcaaagttctcctaatatatgtttccaaagactgaacatgcagagttcagcatcttactgaatttccgtttcaaaaatgagcttaaccaagaataaaccagtggctgggcaagagaaggcaggaaggtgataatgaagccatccatttaaaagctctgggctcctgagatttcactcttattatcacctcctgcatctgcagagttcccttgccattggcatgttggctaaacttggagcttttggcccaaattacaagttctatgatggaggatcttttatttagagtacagctggctccctcttaagagagatgggaaataattaaaaagaaggtaaaacaaatatttacggtgaaagcttgtaaactcaaaatactacccctttctctccctaaaagagaaaaacaccttttctcatgggtctgggaagaagtttaaaaagaaaaccttgggggggatttccttggtggtccagaggttagaactccttgctttcaatgcagtgggcaggggttccagccctggttggggaactaagatcctgcatgctacgaggtgcagaatgaatgaatgaataaaggtgcatatatttaaaaaaaaaaaaaaagaaagaaaaccttgggtcctccagtggctgagcccatggtttctcaggagagctgcagccccactcagtggctgcactttggcagtccttgcttgctaggaggggtgggcagtctagcctgtgacgtacagaagctggtaacaaccaaaccaccttacctcgaatgctgcggagatcacctttgctttcttgctaagcacagagcccacagcattgaagtttttatctctgatctcagcgtagagctcctctgcagaattcagctgaagcttctttgcttccgtgggaaggtccttaccaccgtcgccctgctttttaggggcgaatttctccggaggtaatttcacataacctgaacaacagcagaagggaacaaggccctgcttgtgtttaatggaagaaccagtttagctcaggcactaaacggaattttccaactcagaagagggtggaagctggctttagaaaaaatggtgcatgagactgaggctctgatttttccacaatcacagtacagaatgcagtcactcttcaatattagtatcacggttccacctttctttggagtcacctatctaaatcactgcggcaacatttagttagttcctaaatttattcagggatgggttacgttttcacttaaaaaaattttacaaggatctctcccattatcttacggtgtttttcaaactgtaggtcatgtccctttagtggatcacgaaatcaagttggtgggttgtaatcagcattataaacaaacatacaaaacattaaataccatagtgcatcacatgaagtaggggaatggtttttattttaaataaaattttgcttcagtttcatacacacatatgtgtgtatgtagtaggtcatgatataatatgtattttgttgttgtccaaaatagtttgaaagctatcacctgaaagtcaatttcagctcactttctgtttttacaaagctttattggcacaaagccatgtccatttgttttctctcatttgcgactgctttcacattacaatgaagaatggagactccacagaggcactgtataacctaaaatatctgctatctggcttttacagaagctgtccactccgatccaggagaagctcccaaattactcggcacagcatccagttcctccactaagtagccttaatccacttctttcacctgtgttccctccaaaccaacttagtcaccatttccggaaataccccacatgctcttacgagttgccttagcacataaactggtttaactctaagaagcttggcaatatgaatcagtatgaatcaaggaccttataatattaatacttctgacccctaaatcctgcatcagagaatgcagaggaagaaatatagtatatcaaaaaaaattatgtacacagatgcctttataaccattaaaaaaaaaaactgcccaacattaggggaagggttgtacaaaccatggtataatatatattatggattttaattaagctattaaaattatacatatgctgagaaaatgctcatcttcagttcagttcagtttagtcgctcagtcgtgtctgactctttgcgaccccatgaatcgcagcacgccaggcctccctgttcatcaccatctcccaattgcactcatctcacatgctagtaaagtaatgctcaaaattctccaagccaggcttcagcaatacgtgaaccgtgaactctctgatgttcaagctggttttagaaaaggcagaggaaccagagatcaaattgccaacatccgctggatcacgctcatcttataccaaatcaaaaaaagaggttcagggaatccctgtacctagtccagtggttaaatcagcgctttctctgtgaagacctgggttcaatccaggttcaatcaaaatctggtcaaggaactaagatatcccacaagccgcgtaggctcccacaacgcccccctccccccgccaaaaaaatttcagaataatttgtacaagctgattctactttttgttaactaaaaacaaactgtgcatgaaaaaaatgactatgaggaaatacaccaaaatattaacattggttgtcccaaagtttgggggcaggatttcagggatcatgggaaatgtgtgttttacttctgtattttttcaattttcccttaatcaatgtttgacttatattatgaaaaaaaaaaaaaccttgctgccaagaaactgaatttacacacattccttctcttcttggagaatcccttcctacctctcacctatcttacaaagcctcccctcactccccaggccacctccctgccctaaaccctagctccttctaacggtatcttaggtgttttgctctctgcaaccatgagaggagaggctccctcatttctctggttcctacctactatctagcatagaactcctctgtccatgaaatggagtttttagaagtattcaagatgccatctttcggtgactttcctgggtggtcccgtggttaggaatctgccttccaatgcagggatcttgggtttgatccctggtcagggaactgggatcccacatgctgcagggcaactaaccccatgtactgcaactactgagcccctgcaccacaaaaaagactcaacacaaccgaaaaaaaaaaaagccaaattttggaacaaataatttaaaaataagactttttacagccttattaaagactctgctttgtggaaacccctcttcacggctgtgtcttcatcttctcccttagccacccatctatccaattgctatccatgcattcttatggtagaacacacctaacataaaacttaccattttaaccattttacaaaagcctttattacaaacacaactttctataaccacagctggtctctagttctagaaccttttttatcccaaaagaaaaccctgggacttccctggcagtccaatggttaagactccatgcttccacttcaggggctgtgggttcaattcctacttgctgaactaagataccgcatgccttgtggtgcaaccaaaaaattaaaaaacaaaaaacccaaaggaaatcccgtacccaacaggagttgactccccacgcttttcctgagctctggccaccaccagctggctttctgcctgcatgctttcctccagggctcttccttggctccctgtgatataattcaggatgccaaaagagactgcagctcatgtaaatgagggaaggaggcctggatgggacaggagcggtggagtctgcggtagtctggagagaagggcctgtctaaagaagggatctgcactgggcaccagctgccacacaggaatgtggtcgtggggctgccagagcctcagaggtttttaaagacatggaatacatcaagatcattattagagtcttctccaattttaaacagtgacagaaacagacacaaatcatgcagtcaaaagcaaataaaacatacttgtgatctctgaccccaactgcctgttaagcctaactctcacaggccttcaagtctaccatcaagtgtctccaacctcctgttctcacctttctcccagaatgtaccccgctgtgccctctgcatcagcaagctttttgccccactgttccccgcaggtattatgctgcctgcctctcaccagcaacgccccctaaattctacccatctttccaaacccagtacaaaagccacctcatccacaagctttcctgaatgactgcccaccttggaatctatgttctccaactgcagggccacctgcatttagccctgggcctctgctcacagggggcacacacagtcccatgcagtaaacactcgccagcttatgtgtgacctacaaggacagttcactcagatgtcactgaatcccagtgtctgcaggtctaaagtcagcattttaatttttccaaatactgagttatttagaaaggaagcatcttaaaaaaaaaaatggtcttttgagttactattttggcatattttttcttctctgtccactataataaatactgcttagaatatgggtttttctttgaaaaaaaaaattaactggtcttttggatattcctatcagattacctattggtaaaagggagagttactttactcactgttctgaatgccataaatttcatcaatgagtccttcgtacgtaagctgagtggcaagaggcgataataaatccacgttccgatcaagcaacaagagattatcaaacacggggaatattgaattctggcttcctgtaaactctctcttcatcctgatcatcatattggccacttgctggaaacaaaacatgggatcaggtgggactttcctgggcataagcagatttaaaaatctggctaagactaaaaaaaaaaaaattggctagaacttccctagtgatccagtagttaagactctgcgcttccaatgcaaggggcccagatttgatccctggtcaaggaactaatatcccatgtgccacatggcacagccaaaaaaaaataataatcagctaaaaatggaaagtatcaaaaaagtaaaaaacggagaaaaacggtggcggaatgagatggacaagaaataaacagcgacagaaaaccactccatgttggatgcccgttccaacacttacactgttaccagcgatttctcaatgaggcataagatcagtccatttctattattcatggaagttctattctataaagccaccgtgaatgcaacagtttcatcatctgatcaatatataaccttgatttatgtgtgttctatttaaagacattaaatatatgctcttgattctccaacactatcatttatacctaaatgaagctcatctaataagagttttctccgtaaaggcccatcatagccttcctacatcatgaaaactggatagcacttctgcaccaccccgggggccgttttaacagtgaaatcaccaaccgaaaaaaaaaaaaaaagcacaaaaatgcacacccacacaaaaaagtggcaatgagtactgcactatagtggcaaaaatcacacttgtttatggtatgagttgaaggcagagggttgcttgctgtgatctcagctaagaacatgcacaacttcaattattggatgatacaaattactgcctccctgagtgtatctgcaaaacactgtaccaatttgggagctacgaagaaattttagcaagtatgtgaattttcaaatcaaaacagattcccactcctccccctcccagggaccagggtgcccttgctccaccaccagaagcatctcccatttctcacccgggcgcactctcctttcccaaagatctgggggatagttccgtacagagcttgcagggtcatcagccccttggctgcgtggtacaggctggtctggtcactttccagatagcactcctgtagagaggaagggccagttaccatcacggtcacctgggtgccttgtggtgcctgcctctgtctggtgttgggacttggcacctccccactttgccaggaagctgcagactggggtccagtttacaaagctgctgtttggcagcccaggtcaggagcccaagagctctaccatcaggggacagctacggaagcaattctcccaaggcagagccttctggaaggcactcctcctcgtttaccagctcttgaataagctactgattagaaaagattttatgggcttcccatatggctccgtggtaaagaatctgcctgtcaagcaggatcgggaagatcccctggaggaggaaatggcaacccactccagtattcttgcctggagaatcccatggacaaggagcctggtgggctacagtccaaggggtaacaaagagttggacaggacttattgactagaccactactaccaagaaagactgagatgggaaccagtttttatttctatgctttatttgcaattggagaatagttgctttacaatgttgtgttggtttctgccatacaacaacgtgagtcagccataaggatactatgtcccctccctcttgaatctcccccccatttcacctctctcattcacagaggcgagtgcagaggctaggagggcactgagggaggccacatggcgataccacaagtgcacgtattctctgagccccagaatcccaggacatatgctcacaatggaatacgtggcagtctttacaaacatgacacagattttcacacacactgacggcaactgaaggttgtaacatcttgagaaatgaaaaaggggcagctgaacaatctttagagtgatccaattttcagaaaatatattttaccttatgaagtatacagggtatattttgtaaagtaggcaaaattatacttttggcatagaaaaagggacacaaaaatacacatcaaaccagctggggcgaggtgggagggaggttcaagagggaggggacatacatatccttatggctgatggctgattcacgttgttgtatggcagaaaccaacacaacattgtaaagcaattattctccaattggaaataaaacatagaaataaaaagaaacataatacacaaaagtgacaactcaagagaagaaaatctaaaagtcaataaattatgaaaattataataaaaatgaaaaaaccacattgctaattggctatattccaatacaaaataaaaagttaaaaataaaaaaaaacagctaggaagtgaccggagagactccagcagttttgacactggtaggagcacaggttcctgactctggttgtcttgttctaaacctcagctgtgtcacttcccagctggtgccttggggcaattagataatctctctatgcaatctcaaaaaggacagaatgatctctgttcgtctccaaggcaaaccattcaatatcacagtaatccaagactctgccccaaccagtaatgctgaagaagctgaagttgaacggttctatgaagacctacaagaccttttagaactaacacccaaaaaagatgtccttttcattataggggacaggaatgcaaaaggaggaagtcaagaaacacctggggtaacaggcaaatttggccttggaatacggaatgaagcagggcaaagactaatagagttttgccaagagaatgcactggtcatagcaaacaccctcttccaacaacacaagagaagactctacacatggacatcaccagatggtcaacaccgaaatcagattgattatattctttgcagccaaagatgaagaagctctatacagtcagcaaaaacaaggccaggagctgactgtggctcagatcatgaactccttattgccaaattcagacttaaattgaagaaagtagggaaaaccactagaccattcaggtatgacctaaatcaaatcccttatacaatggaagtgagaaacagatttaaggggtagatctgatagatagagtgcctgatgaactatggaatgaggtttgtgacactctacaggagacaaggatcaagaccatccccatggaaaagaaatgaaaaaaagcaaaatggctgcctggggaggccttacaaatagctgtgaaaagaagagaagtgaaaagcaaaggagaaaaggaaagatataagcatctgaatgcaaagttccaaagaatagtaaggagagagaagaaagcctttctcagcgatcaatgcaaagaaatagaggaaaacaacagaatgggaaagactagagatctcttcaagaaaattagagataccaagggaacatttcatgcaaagatgggctcgataaaggacagaaatggtatggacctaacagaagcagaagatattaagaagaggtggtgagaatacacagaagaactgtacaaaaaagatcttcatgacccagataatcacgatggtgtaatcactcacctagagccagacatcctggaatgtgaagtcaagtgggccttagaaagcatcactatgaacaaagctagtggaggtgatggaattccagttgagctgtttcaaatcctgaaagatgatgctatgaaagtgctgcactcaatatgccagcaaatttggaaaactcagcagtagccacaggactgggcaaggtcagttttcactccaatcccaaagaaaggcaatgccaaagaatgctcaaactaccacacaattgtactcatctcacacgctagtaaaataatgctaaaaattctccaagccaggcttcagcaatatgtgaaccatgacttccagatgttcaagctggttttagaaaaggcagagaaacgagagatcaaattgccaacatgtgctggattatcgaaaaggcaagagaattccagaaaaacatctatttctgctttattgactatgccaaagcctttgactgtgtggatcacaataaactgtggaaaattctgaaagacatgggaataccagaccacctgacctgcctcttgagaaacctatatgcaggtcaggaagcaacggttagaactggacatggaccaacagactgttccatataggaaaaggaggacgtcaaggctgtatattgtcacccagcttatttaacttatatgcagtggttaaataaacaggaaatctctcctctgggcaggttttgtcatgatgggacaagttttcctcagctgctaccaagtcacattaattacacagatgtgaattaattacaccagggaacaccattataggtacacgatttaaagttaatacagcaaaatgttaattacagaatctaggtgatgagtataaaggtattcactgtaccattctttcaactttcaagtatgtttcatataaaacattaggtcgggggcagagtcgggggcaggtggaaaaatctgtactaccattggaagaggtttactgtaagcaaaacaacggggaaagtgactttaaaaaaaagagccaagaaactcttttggttataaaattcatcagggttgccagagagttcttccccgggttaactctttgaagatggtgatcacagtaacaacataatacagaagaaaaagtttcaaataattttgggcacaacaccagtgcttctcaaaagttctagtctccagactagcaggatcactgtcacatatgcaaaattcaaagaaggaaacacagataaacatgattacattaagaaaacacacatagggtggggagtaactagaagtggcaaaagcaggcattctggaatactggtagcagttttgttgttttttttaagcagagtcccaggtgtgttcactttgttaaaatccatcaaactttatactcatgatttgtgcactcatctgagtacagagtatacttaaaaagaaagaaagtacacatagaaaaaccatcataaactaagtcaagagacaactagagtagcccctgcttgctgcaactagccccctagcgcagcaacaaagaccattgcagccaaaaatataaatcaaccaataaaaattgtttttaaagtgccatgtttacttgaatataagacatggtaccataaaactcctagaagagaatacaggcaaaacattctgacataaatcataccagtgttttcttaggtcagtctcccaaggcaatagaagtaaaagcaaagataaacaaattggacctaatcaaatttataagcttttgcaaagcaagggaaactataaacaaaatgaagacaatgtacgaactgggagaaattattttcaaacaaagcgatggacaagggcttaatttccaaaacatacaaacagctcatacaacttaataacaaaaaaataaacaacccaattaaaaaaaataagcatatggtataaatggacatttctacaaaaaagatatacagatggccagtaggtacatgaaaagatgctcaatgtcactaattattagaaaaatgcaaatcaaaactacagtggggtaccaccgtacaccagtgagaatggccatcattaaaaagtctacaaataataaatgctggagggggtatggagcaaaggaaaaagggaaccctcccacaatactggtgggaatataaattggtgcagccactatggaaaacagtatgaacattccttaaaaaatgagaattgctatgtgaaatagcaatcccactcccggatatatatctggaaaaacaaaaacactaatttgaaaagatactgtatgtaccccaacattcatgagagtactaatcagacagggaagcgaccaagtactcattaacagatgaatggatgaagatatgggtgtgtgtgtgtgtgtgtgtatatatatatatatatatatatatataaaataaatgtatgtgtctgtatacacatacacacacaatggaatattgggcttcccagggggcactagtggtaaagaacccacctgccaacgcaggagacatgggttcaatccctgggttgggaagatcccctgaaggagggcatggcaatctggagaatcccatggacagaggagcctggaaagctacagtccaaagggtcacacagagttggatgtaactgaagcaacttagcaagtatacaatggaatattactcatccatgaaaaaaagaatgaaatcgtgccatttgtagcaatgtggatggacctcgagactattatgcttagcgaaggaagacagaaaaagacaaacactatgtgataccactcatatgtgaaatctaaaaagataagaccatgaatgtaaacacaaaacagaagcagacttacagacatagaaaaccaaccagcggtggcagagctccctcacctgccggcctgcatctcctacaagtgtaccatatgaataactgcttcttgcctatccctttgcctctcactgaattccttctgtgctgagacacaaagaacctgagccttagtaagtccagacaccagctactgacagccccaccaggtggcagaagttaactgtatgctgctattaagcaggcagactccagaccccttggaatcagaaggttgatgatgctgacctccacttacctcaccactgaccaatcagaagagtgtcgacaagctgatcacgccctctttgggccattgctataaaagtcctcactactccctccaggaggggacacacagttttgagggcattagcccactgtggccccctttgcctggcaaagcaataaagctatccttttctacttcaccgccccccatccaaaaaaaagacaagaccagtggggcatggaagaggggagggacaaattaggggtatgggactaacagataccaactagtacaaaaaaaaataagctacaaggatatactgtacagcacatgaaactatacctaatacaataacccataatagaatataatctgcaaaaatactgaatcattctgctgtacatatgagatgaaaatgaccatcaagctcacacatttggcaaaaatcacagcctgacattaaaacagaaaatgccaaacttactttgaatgcgctctccgattccatggataggagatctccatcaaaaggaataagatctaggctatactcctccctatgaataaaagatcccaaaacacccagatccttcaaccgctgttcgcacaataagctacgtcgtggcacaaacaaaatgtggaaatctcttgctgggccacgtctgtcttcactgcaaaagaaggaacatttgttagcttatgagctccctagagtcttcaactatttcacttactctatctccactgctgtgcacacagaaagcactaaataaatgctggtgagataaacatatgacattgactttcagacccaaacagttacagtcactttcttgctcttttttttttttttccctgacaggaaaccagcattgattcatagccaatatgtgcattttctagctttctctttaactattttcaggggcattaaagctctgaggtttactgaaatggtgtatgtgtcttattgaaaacaaatggatctttaaccaaaccaatgcagccacagagactccttttaaaattaaagctcactattgactcttctttctcctctccttgacagtgaacttctcaaaatagcccatatggcttttaagattttaggggccacatcaatcgattatatcagagtgcagatggagctgggagaacttcctctctagactggatgctatattaaattttaatcagctcttactttgcttatgaaattcaagtaccttgtcatcagtataaccattagagggaggcttttttgttgttgttcatttttaaaaccaggtcctttccttgatacatatccaaaattttagctgtcctaaaagaatgcagttttataataactgccctctcagactgtttgaacaatgtcacaagtttcctatttccattcttgtatttttccatgtttgtcctagtttttctaaaagaccactttttgggacgtctctggtggtccagggtctaagactctgctctcccaatgcagggggcttgggtttgatctctggtcaggaatctagatcccaacaaagggtttgcatgggtttctctgatggcccagtggttaaggaactgctcggcaatgcaggaaacactggttcagttcctggtctgggagatcccaggtgccatggagcaaccaagcccatgcaccacagctagagcctgcgctctggagcccatgagcggcaacacctgaggcccacatgccctgagtccatactccacaacaagagcagccactgcaaagagaagcccgcacatcacaactagagagtagaactcactctctgaaactagaaaaagcccatgtgcagcaacaaagacccaacacagccaataaataaatactaaaaaaaacaaggaaaagagttttcatgttgcaactgaagaccccacatgccacaacgaagatcgaaggtcccgagtgctgcaactaagacatagcatggcaagataaataaatattgaaaacaaacaagaagcaaaagaccactatccaaggcactggcaagagaaggggtttacaatgaaaagctcaggacattaaaactgttagaaggattaactcctactggcacaaacataagttctgagatacctgagcacgttttcagcaatgatatccatcaattctagcctgggtctgacaaaaaaaattatattcttgacatcggctgctggcaaacgacttcctttaagcgtaaacattttttccacttcatgttcctaagaaaacacatacacaaaaagttaacaaaatcactcaacgttaagtatcatagtcagactcggacatcagaaacactcgcagtcaatgcacatcaatgctttgttctcaaaatttagatttcccaaagccagctgtattaacaggaaggtttcagggtgaagtcactgtgacagtctttgagtgtaaatgactcttaacgtgataaactatcaaagataccaggtaacagtcatataatgctggacttctgtggtggctcagcggtagagagtacgcctcccactgcaggagatgtaggtttgatccctgggtcagaaagatcccctgaagaaggaaatggcaacccattccagtattctggccagggaaatcctatggacagaggagcctggtaggctactgtgatctaaagggtcacagaaaagtcagacatgacttagcgactagacaacaacaacgagagcaattaggatcaatacagaatcattaaccaaaggatcactgtatacaaaatgttagccatacattagcatctgtgttataaagacccaaccaccctgcaagccatttactcaggaggaaatgtaaaatcttactattattgccgaagtacagagttactaatacctgaacaaaacctgaacagttcacttaccttcaacagtgaatactgtgcaatcaggccaaagggtccagtgagatactcatcccaaactattgcctacaagagggaagaaatgaacattacagttaatatcaagaatttcaacaatagcaacagaaaatggcagtcatacatagtagaactactgccctcaaagtctgaaactggctgtggtcacatttatactgtgtggatcttaaggaaaaaaaaaaaaaaaaaacagcgtcagggcaagtaatgttactggcagtcataggaaacttaagatttaatcactgtccttcaaagccaagtgggcattaggaagcatcacaaggaacaaaactagtggacatgatggaattcctgctgagctatttcaaatcctaaaagaggatgctgttaaagtgttgcactcaatatgccagcaaatatggaaaactcagcagtggccacagggctgggaaaggtcagttttcatttcaatcccaaagaaaggcaatgccaaagaatgttaaaactattgcacgattgtactcatttgacatgctagcaaagtaatgctcaaaattctccaagggaggcttcaacaatacgtgaaccaagaacttccaggcgttcaagctggatttagaaaaggcagaggaaacagagatcacattgccaacttctgctggatcataaaaaaagtgagaattccagaaaaacatctacttctgctttattgaccatgctaaagcctttgtgtgaatcataataaactggaaaattcttaaagagatgggaataccagaccacctgacctgcctcctgagaaagctgtgtacaggtcaagaagcaacagttagaaccagacatagaagaatagacttgttcaaaattgggaaaggagtacatcaaggtggtatattgtcaccctgcttatttaacttatatgcagagtacatcatgagaaatgccagactggatgtagcacaaggtggaatcaagattgctgggagaaatatcaataacctcagatacgcagatgacaccacccttatggcagaaagtaaagaggaactaaagggcctcttgatgaaggtgaaagagaatgaaaaagctggcttaaaactcaacattcaaaagacaaagatcatggcatctagttccaccacttcatggataatacatggggaaataatgaaaacagtgacagactttattttcttaggctccaaaatcactgcagccaagaaattaaaagacacttgctccttggaagaacagctatgatcaaaccagacagcgtattaaaaagcagagacactactttgtcgacaaagctcagtctagtcaaagctatggtttttccagtagtcatgtacagatgcaagagttgggctagaaggctgatcactgaagaactgagacttttgaactgtggtgctgaagaagactcttaagagtcccttggattgcaaggagatcaaaccagtcagtcctaaaggaaataaacactgaacattcattcgaaggactgatgctgaagatgaagctccaagactttggccatctgatgtgaagagctgaaaagaccctgatgctgggaaagattgaaggcaggaggaaaaggggacgacagaaaacgagatggttgaatggcaacactgactcaatggacatgagtttgagcaagccccagaagatggtgaaggacagggaagcctggagtgctgaagtccatggggttgcaaagagttggacatgactgagcgactgaacaattagaggaaacaaggaactgtagtttgttgtgtatctgtgtcacggtattattatcagactgaaccatatggaaactgccaaatgcaacagttcaacctactattttataagtagcatgcaattcaattataaaaactaaaacctctgatataggtattataaggtttattttgacaagagaaaaattttaaaggctcagaaagtttaaataacatgtccaggacttcctggcggcacagtgggtggaagtccacttgccatgcacaggacatgggtttgatctctggtctgggaagattctataagcctcagaacagctaagcccatgagccacaaccactgagctcaagtactgcaactgctgaagtctgcatgctcaagggcccttgaaccacaactaatgagcccccgtgctgaaactactgaagctcacgtgccttagagccagcaagccacaactactgagcctgcatgctgcaactaatgaagcctgtgcaccgagagcctgtgctccacaagacgacaagccagggcagtaagaagcccgtacaccaaaactagagactagcccccaaactctgcaactagagaaagctcccaggcaacagcgaagacccaacgcaaacaaaaataaaaataaataattaattaattaaattttttaaaagtccaaggccatatcaggaccttgaatatacacagcataaagaagtcaagtttccagcctgggactgaacaacctcacagagcattgctctgggaccctctgagcatttctactgctaaactccagtgtcagttctttttctttcttttttaaattgaaatttttattgagacatctgtagaattacaaatattcagttgaaagaaacaatacagggagactccccaatatgctttgtccagtttcccccaatgcaaacattttgcaaaactatagtacaacagatattacaaccagggtattgacactgatacaatccatgatctcattcagatttcagagttatttaatgagctggaactgggcgcctaggacttagcctgcttttgttttctctccatagctgctagcactcactccacctcttggggtcctattttttctaatactgactgctgaatttccccaattttcctcttctcttcagagttatattgccagttacttaggaagactgataaatcctaaagggaaaggaaggaagtgaagtgaagtgagtgaagcgatcagtcgtgtccgactctttgcgacccggtggactgtagcccaccaggctcctccgtccatgggattctccaggcaagaatactggagtgggttgccatttccttctccaggggatcttcccgacccagggatcgaacccgggcctcccgcattgcgggcagacgctttaacctctgagccaccagggaagccataccacttaaaagaagtcctatgaagttcttgatctacggtttctgattccattgtgagctgggtgctaataaacatctaacaagaaaatactatttaagtaagctgacgttaaaaatctcagatagttacaacttctcacaattcaagtgagcagcagattgcaaggtgttggtagttcatgtgaatttttttgaggatatgatctttgtaatgaatggacactggtgcagctacgttcctgggcggggccgcctccccagttccagtatctcgggtgggaactggacagggggttaccggatccgcctctctggaccggagcggcacctgacacaagctggttctcgaagggctgagacaacacggtggcttattctgcagccacggaacaacagcgatgccacgcgtactttgcgatggaagccccaccaaaaggcccctctccccgacttatcgttcccgccggctctcctccctggaagccctaggagacctagtacacttcgagcccaggcagttagggaccggatgaggccaggccggacggcggtgtcgccgcccgctgtccctcaccttgcttcccgcgcacttgtccaggaactcgcgcagctcgcgacgcactgcctcgcgcagcacattgaggttcactcgcccgtaggacaggtgtgccgccatcttgccccaccgccccctttacccactactccaaccagctctgcattcccctacgtgtggcccaccgacgctgtcacgtgacgacaggttcacgtgaccagggccgctgacagcacgccaaacccggaaaactgtaatgggaggccatcagtcagtctccctcccggtcctagtgcccgcctctttcgtcgaccgcgtaggtcccgaggcatcccaagaccccatccagactcctccgcagtccggggcagctgcgctgggtgctagttgagtttaaggacagagattagatcctgcacgtccagtttaaaaattgaggctttcttcttagcagcaagtatactctctgtaaaatgataatgaagctatatttgaatggaaatcttttcagtcagatcagtcgctctgctgctgctgctgttaagtcgcttcagttgtgtccgactctgtgcgactccacagacggcagcccaccaggctcccccgtccctgggattctc

SEQ ID NO: 204 - DNA, 8632 bp, Hippotragus leucophaeus
  source 1..8632: mol_type = genomic DNA
tttacaaagtactggcgtgtgggtggggctctgggtctaactgctcacaggaaggacggcccccgggacccaggtgttcctacagtactcagaagggctgggaagaaggaggggggcgctaggaggactcagaacggctagggaaggagggagaaggcctcggagggataaggacagcgggagaagggtaagggctcgtagtgagacagcgaggtggcctacgagatccccgacagcccttcacccgcacgcgcaggaccctgcaccaccccctcgttcgtgtttccggctgctgctttctgcatccgggacacgaaaagactccgttaggcctcgggcggcagcccctgaccggaaccggaagtggaccccgagccaggagaaggaagccggtggccgacccgtcagcagccggcggcggcctcgaggggcggcgctgcgctgctccctgcgaaccggtgccgcggccaggcgggtggccggcccaagggcccggcgccatgaagctgtacagcctaagcgtcctgtataaaggcgagtccaagacggtgctgctcaaggccgcatacgatgtgtcctccttcagcttttttcagagatccaggtgagcgggccctggagggcggcgcccggacggggaggcccggggtccgggttggagaccgcccgggaatcgaggcctggggcttggcctcctgcattggagccggtggtcttttcctcggcctgtagctcattctggaatatagtccgtaatcagggtttttcaaattttctatcttataaaaatgtccgggggcttttgaaaaagtgcagattcccctaggctcacgcccagctgagttccagcaatctgtattttaaaccagccactcagtggttctgacccaggaagctcacatgcttaagcgccacgtttgtattatctggctgggctttccaacagttcggtgtgagagttcctggtacactctgtcatattatggaggaagtcactgaggccccaggagatggataccaaaccagccaggactccaacccaaattgtatgctctttactgttgggctctagtggtacaaaagggttctacagtgaagatttagaaggaagcatggaggttttagggcttacaagcctttgaacatttgcgaggcacttgaatgccatcaagtgtgtgttagaagtaccacagacacttaacagcctgttcgtgggaggggtggtggtgactcaggcacaaaaggagaaagaccctacaaagtctgtgtctgtaatcacccagtctccaggtctggtggcatctggattctgttttgactacttcattgggctgttttcttcttgatgagagtggcttgctggtgggatctcaaacaattcctcttgttattttgttgaaatcttctgcttctttttgggtccttcttggtacttacattctctgtcatgacctctagtctctattctgtgttgctgcttttctgtgatggaactttggatgctaacttggttaactcttgattcttttcctttctctttcccctacccacacgtactgacgatcctcagagatttcactttaggactttaatctcactggttttcagtatccagaccagtttcagatgattaacacaactgcagtactgtagggaaatctctacgaatgtctcttaaaacaacacataatccagttgagcccactgtttttctcataagtcctcctgtcttctgtcctgcccacctcatgattaccagaatgcgaacctcagaccttcaaaacattttccggcttttctggctcttgtatgtagaatgtcaaaatgaatgcagttcttcctttgtctaattatatttctactcttaagctctgtctctttttagttttattgcaaggacttccttattttcagactttcctgtaagggatttttctggtcctattcactctctcaggataataataacaagtaatactatgcgccagacatcatgctaagtgctcatttagtcatcacagcatgtctcaatatatagacaaagcgcggtgcagtaagtcccttaccagaggtcacacatctcgtaagtggtggagctgggatcccagccagggaagtccactccagacgtggtgagtcctcactctgctgcgtggctcttggtgtgatctcaggagtgtatgaatctgctggaaccaactgtggattccacaagtcaggaccctgcgctgatggccctttatatgacatttccagtcagaggcttcttattaactctggatcctccagctggactgttgtcacctgtgactcttccattctggccacatctttttcttgggcccatgaacctcctcctctccctcagccatggtacaaaccattttccatttccttgtcttggctaagcccttgccctcaattccatccagagtgtcctgggtccgtaccacggattagccccagacgacctgaggctagagccagcattcactgaggatgcctgtcgcattgcacggtccagcatgtggcagctgccataactgactgtgtatctgctgaacagtttttgccacttagatgtctccatcacagattttgtttcttcccgcttcttgggagttattggagccttgagtagaggagctggcctctgcttctctgctgtgtcccaaatcataccctgaccaaaacgttgaattaactataacctatagaagattccccagaagtctggaagtgggttgtttgggtctgctcggtagcaagcaaatgtggtttgaatggttgagaggatgtgtaattatctgtattcatgatcatcgacagagtgtttattactttttcctaaggttgggagagaagaagtgaaaccaggaagcaatgtctccttagtgtataagctcaggggtcactttgcattgtgctggggacaaggtgacaggaacaggtaatatgtgttgtgtttcttagcgttcaggagttcatgaccttcacaagtcagctgattgtggagcgctcagcaaaaggcagccgagcttctgtgaaagaacaaggtaagaggacccatcaccttgtaagcacgtgctggcccggccaccccacctcaggtggcctagagctctgtccacgggagggctgccttgtgatggagagggctcccaggaccacgatcctctgctggcttctctcttccctcctcctccgtttcctgttatgcagaattctgtgcccactgttggtatgtcggttgcttggttaaatcacccccaaaagcttagacttgcttacaattagggtctgcctctcttggagcagtaagcagccttcctgctttgtccttttttgcctttggatttgtaaacgtctcagaaaaggacctccacccagccctgttgaggaaatactgtattctgtgctgcttagtgcttttgcccagtaacctggagaccccttattttccctcatgaccttagttttttcttcttcatgattcaggtttcctgtaagaatttttaggcatttattttaggggcatttggttagctatatcatctctgaatcctttccaaatgacaaaaaatcatttcaaggattgtgactgttttgtagaagccctgtacaggctgtaccttttgataattcgatgacttcagcatagtcatacttgagaccccagccagcagtggctcatttttttctggatgggctttatctcttcctcctcctcctgccctgtccccactgaggctcaccacagcgtggagcaggctaggttactgtagtgaggaaacctggggccctgacaggtgatttcctcaagccagaaaatcttttaccgagttttgttgtgtatatatgaaaatggaagccacttagcttgtccagagttccatcagcttgggagcagagcagagcacctctgagggctgcagcttccaagacacgggggagcctgacctcaagctcagggtgggactcagacgagcccttggggctgtttcctgggatgtttctgcgccactactgatccttcgaccctggcttcgcgcactgggccttgggactttcattcaccctgaagcaggtgttgtccacactacccgcagagcccccacacatgctgccgtatgtgcagggtttcaccataaacctggctcagagccgcattgctgacccagaagacagaagcccagcactgtatcagtccagcggctttggcgggtgagaaagtctaaagccctcttgccatcctcttgtctccttagaatatctgtgccatgtctacgtgagaaatgacagtcttgcgggagtggtcattgctgacagtgaatacccatcccgggtggcttttaccttgctagagaaggtgagtttgcagcttggctggactgtacttgggcagacaggcatggactggggccaggagtgacgtaagggatgaaatagtgtgtccaaaatcagcctgctttcagcctcctcactctaaaccaagagacagtctgggagccttctcattcctgtctgtctcatcctgccctaccccttccccactgatttctgcttctcatcctgctagtgtccctggggccaccttggctctccttgtcagccagagtcccagcatctccccttcccggtggggccctcgggtcagccctagctgtgctttcgcgtcctcttgccagttctgctcctgcttccgccctgaaagtcgtgactttcagttccttatgagccacactaggctgcatgttctgccccatgacccacctcccttcttcccctcctcccctctttcaggccatctctgcacacaccaggctcctccccaccagccgcacttctgctcaaggagtccccctgctgccccatcctgcagttgcagctgctcctttccccagtgtggggctggtgcctcctcattcttcagtgtgtttctttgtggtgcggatgataaactcctcaaagaccctggccccacagcccctaaaacactcatgcataaaagcgcatgaagtctggtggctgcttaaattcaaaaggctgcttaaattcaaaggatctgattaccttttttgaagaattgttttgaaaaattaaaggtccaatatcctctttcctggaaattcacaacctgagaaaagtggagatctgtaatttgcatctccaataatttatcattcccagatgaggttcatatcaggctgggcatacttggattttaattccaagagtactgaggaagaagaaacttggacctagagtttctcccttgccattagccatcctcctctgccttcctctgtgggtcctggggtcctgagagcctctttcggatgagcactgagatggggctgttgttgagctcctctgtcttgcaggtactagacgaattctccaagcaggtcgacaggatagactggccaactggatcccctgatactatccggtacacaggcctggacagtcagctcagtagataccaggtaaggcgcaaaggctgtgaagcagaaaggccaacggccctgatggttgtgactctgggtgatgtgaaggctgatgtcctcttgaagatcgcaggaacctgcataagacctgagctcctaggcaggcttttgcttttccagtatgtgtttaagcagcctgtggtttttaacttctgaaagtatatccagcttgcttggttttgagccctgtttccaggcagccactccagtcctgacgtttttatttttacttctttcctagaacccccgagaagctgaccccatgactaaagtgcaggctgaactggatgagaccaagatcatcctggtaagtaagtaaattagggaccaagttcagaaacacaggcaaaaagatttgccagtagtcaagcccacacagctgattcttgttttaattatagtcaaagcacttctgaaagtggtggtggcccacctgtccctgtgcatcagaggccttgaaagccagattcactcagacagccactctgtggttctacctcaatggtgcctgccttagcctgacccacagcccagcaggttccttcttttcagagtgtgggttttggtgcagacggaggctttctgactaaatacaggtcccgagtagtcagaaacaggcctaattcagaagagtgggaaccctgcattttacctgaaatctagtttgcaagttctgttttctgcttttgttttaaaactctgagctacctttggctttggaatgaaagttaagagatgacagtcttcaggcacctctctgtcttctgtaacgtttctccacgtttcctaaccaagccctgtctctgccttctgctgcctcagagcctcagtcctgtgagcaagcacacagaggcaggggacacacacgcactgtctttccttgtctctccacagacagatgggtccaggtcacccagcccattctggctgcaggggtaaaatctggattaccggtcactctgccttttatccatcccattcatgtcttgatccagttaaccttttatggtggaaatttgagttgcttagccgtgtgttgagataaagaatgtttttgctcatttctcattctgtgccatttcatatgtccaaaccgagggtaatgccaattgcctctgagggccttgcagttgaagcagtggccatctggggtgggagcaagtcagccacttcctgatggccctggtggcggggctaggggctcttgtgaggacctccatccctcgtgtgtttggaaagggtctgtctgcactaagtgcagaggtgctctcacagagctgatagtcgtgagatttagacacagttcccctgggagaagcatgacacggctgggcagtaggaatatgtgtatgtgaatacgggcgcaggggacatttcctggagtgtggctatttaagcctgtgctttggaggatttgggggcagtgctttatgtccagttagaaccttctagatcctccaggaaggtcactaggccctgtgtcctccagaggtctgggtcactgtgtcttgatgctcatatgtgggggaggagcccaaaggaagcactttgctgtgactgagcttcatgagggactggcgtctgctcaccttgtgaacagagcaaggcattcttttgtgtctttcctcttgtccagcacaacaccatggagtctttattagaacgaggtgagaagctcgatgacctggtatccaaatccgaagtgctgggaatacagtctaaagccttctataaaacggtgagtgtggcctggccgctcctgggcaccccgtcactcggctttccctgcctctgggctgcttcctccctcccccaacctccccaaggtaaggatggctcctcctcacccttgctgtctgaagtatgccaccttcccagagaggttccaacgcttctgatttgttaacttggactggagtgtttaaccttttggacagtaagggtgcttcatttgcttggtcaacacacacgtttgctgtcatgatgtgccttggagggagatgcctgtggggttaggaggtatctgaacaggaggtgaaggagaaggtaacagaggccccatggggtacctctctgctctctgaagatatccttagtaagaaacaccctcacggggtcagataactttatggggagtcaaggctggagcgaaggaagagacattcctgttctttatacttggctaaacaacaggaagtttccttccttatcggtagcattaatggaaagtggacagaataatcttgggagtgtgaactacttctggatggcttccctccacttctctctccttggtggttccagagcccctagtaaggccaactggtcccctcagagctcccagttctgtgtgtgctgaggtccgcctcatcagctctgttttgtctctctcaaggcccggaaacaaaactcgtgctgtgcaatcatgtgacggctgccagcagaggcccctgcactggaatgtcaccatcactcacatcggaaccacggccccccaggaagcagagccacctcgtaacaacccaagtgggacagactcaacttcggctttggagctcctgggagaaaccgaagggtggatggggaactgggggtggggaaagttcaaattcacatgtctagttatttttgaaaagatactaaggcccctgaatgtgtattttggggccaaatggaaccataaagctcagtgactccatagatgctgcagggcttgtttctaatcccctgggaaggatgtgggcccccaacttgtgcaaggcccatggggggttcagagccagctctttgtggatcttcacatgtgtgggttttgtctgtatactaactattaacactacaaggagcagggtgccctgactccaggactggggagggatggccactgtggggctgcagtgggcatgggatcagggtgggggactcaggccagtgcttctgtgttgggaggagacagctactggacttcataaattctgagacctggtttgcattcctgctgagattgactttgactttctgcgatacccatccagcaagcaagttcggtaaagaaccctagaagtgggggagggggcgctggccctgacttgccgtttggccttgagcatctggatcagagc

SEQ ID NO: 205 - DNA, 204389 bp, Hippotragus leucophaeus
  source 1..204389: mol_type = genomic DNA
aagctgtatcagtagaaagtataatggctatgtacttttttgatgtgacattgatttgctattctgacagattcaataatgtttacgatttaagttcattttcctaatttttacttgctccattttaacaagtagaataaacatttcattgtacagtaggatgtgagcagagatttacatgtgtgtttacaggcataacataattctggtccagtgcaatctgttaacagcagtattatcttagcataattcaaatatccctgtacgccctaccataaattatttcatccttttaaggatcctgattagaaccatgtatcattcagtttatttcaaaggccttgaaaaattaagcagtgattgactcctcatgagcatcctagaaaaaaggcacaaatattttagacataaatctcaggaaggaataaagaaacaagcaccagctatttgcaggttccagagaatgtctcttctttgggacacactatccttctgaatgttcacactacttgaactgggagaccagtagtcatgtgaggaatacactttccacagaaccctccacatctgccatagactttggttccatcctgaaaatagaagaggcagagatccgggagaatctgttacatgctggtatctgtgtgcacaaggcagaaaagcaaaggctttgaatcatgtggctgaaataattagccaaggtttcctataacaattatacttgaggtcaaagatcatgccatttcaggctcagttgaaatctgtggtcacaggaattagagaacccgagattcatattagccacttgataattataaactacactttacgttagacagttcctctcaatccacgcatttttcatcaaggtatctatttgcttcagtgagtttattaaaacctcttccaatttgttgtccagtgtttctcacagactgaataaaagaaaggtattaggattttatataagattctcatggactaaataaaagaaggatattatgcaaacttgaccttaacttcaaacatctcctggaagcattggaaacacagcttgaagaaaatataaaaggcgaaagaatggggggaaacaactggattgaaagtaagaattataattagacacagagtcagacacaacttagtgactaaacagcaacaaaaaaggagattcttcttcctttttagaaaagcagagctgctaactgaggaatgggtgagcagaggctggtgaaggaagtgatgaggacaggataaattttctttccagactgtcttccaactttaggtccaaaagtcaaatggccttttgatcggatgaaacaaaaatagtttgaactcttatggtttctgaagaaggtaagttttgctttatttatgtttttgttttttttaatctaaggagggagggtagaaaaggaaactgggttcctgaaacttttgaggataaagaatgttttgagatcaggggcttttgaagttgcctcttctttcagaagctttctacactctagagaatctgagtaaacagagaaggggatggcagtaaaaattccaatttatatacattcctgttctcaaatggatcaagtaaacccctaatcttgtttaactttactaagaaatgaaaatatgtgttcatttccataagtacatttgggtttcataagtcagagtttcacaccatgcgtcagatctcaggaaataccttcatgtgcaaaatctttgattgagggagaaattctcaattaagtaaacaaatagtctttacaataaaacttaaatagacgcgaaaggaatgattgtaccaaatattcatttttactgctgcccttggccagctgtcatttaaccagaagataccttcacaactagataaagtcagaatatctcattgcactgtctaaattttatacctactcagaacatattttaactaagtaattaatttatttccattcttctacccaaaagaatgacacctaaatttgccaaataaatatttagaaataaatagccattttaaaagcctactgtttacccatgtgatagaaataataaaaatataaagtctttaattattaattaaaacacaaattcataatagtcagaaataaagtattttaaagtctgcaaatatcagaaaattgaatttcatttacaagtagtattcatatataggaatgaaatcacttttagcaaaagaaagaaaaattctaaaaccttggtgtaggcagggactgttgatggtactgatttaaatggtgcaatataggtgagaacagaaattataacacagatcctgatttaatgtagatggggtcatgctatttaagatgtggtaattctaagtaccaggagccatctcataaattttatgtgttagcacactacaccagcaccacaattaggaggataatactttagataatacatgtgctataagaaaaattaaaatcccagtgcactggccctgagcgccctgtctcgtacattgaacgtggactggcaatctacttcacgcatggtaatatacatgtttcagtgctattctctcaaatcatgacaatgttttctaaataaagatagatgaggaaaatgttcatacaaccataaaaatattcctaattcttgaagaaactataaaggatgttcattaaatgacaaatgactctgacatcactaaatcactaaatcaaagcagggaggtaaataaaccaaaaatttacctcttactttgaaatattaaaatgtaacagtcttcaataattagagtatagttaaaaagactacctctttttgaagcacctgtgtttcaaaccattagccccaaacttgaactacttaaatctatatgctctggcacttgatttcatgcacagatatctatagcctaaacaagaatgtgtatatatatatataaaacctccctaagacatgaataaaaatgaacctcattccataatttcattagttatacctcatcataatgtaacataccccattatatggaaaaactcattagtcattcagttcagttcagttcagttgctcagtcatgtccgactctttgcgacctcatgaattgcagcacgccaggcctccctatcaccagctcccaaagttcactcagactcacgtccatcaagtcagtgatgccatccagccatctcatcctctgtcgtccccttctcctcctgcccccaatccctcccagcgtcagagtcttttccagtcttttccacctcatgcaatggccaaagtactggagtttcagcttcagcatcagtccttccaaagaacacccagggctgatctccttcaggatggactggttggatctccttgcagtccaagggactctcaaaagtcttctccaataccacagttcaaaagcattagtcattaacttcatataattctgaatttaaggtagaggaatttaacactacttcacagcacagaagtatttcagacaggctttttgtttttttttttttttccttttttttttttaaattaattaatttatttatttttaatttttactttacaattctgtattggttttggcatagattgacatgaatccaccacaggtgtacatgtgttcccaaacatgaacccccctcccacccccctccccacaacatctctctgggtcatccccgcgtgtcagccccaagcgtgtcatatcctgcatcagacatagactggcatttcgattcttacatgatattatacatgtttcaatgccattctcccaaatcatcacaccctctccctctccctctgagtccaaaagtccgctatacacatctgtgtcagacaggctttttggtccagcaggacttacctgtgatctgtgaatgatcacagaggcataactgccctgagccagccactttgctgtactggatatcttcatcccagttcctgccaaattaatgctgaattgtcccttgattataaataaaaaataaaaaaaaataagactagatggaattagtaaatatatatatatatatttatgcatgtacttggctggaaacacatgaattggcatgatcttaaaaacttgccttcctagattctttagaaaatgaaagaacattgatataaaacatacactttcttacactaacaaaatgaacaagctaaagattttttaaactgattacaaataaatcttctcagttacaagggacaactgaaataatgccagatagtgttatctgtcggaaagtaactttgtccagtcctaggactctagtgattgacagctagagcttacattcctatagcatcagcagcagcaagtctagatagaagaggtgtcacagggactggtaccagactagcatttatccagcttcaatttttgactcctcactgctaacttcactgataaggtacacctagttaatgtgtttccttctgttattgtgcccttacatctatcacacaaaaactattgaatatagtattatggtcccagctatcacatccttttaagtacccaaaagcgttatgcagatgtgtgatgccacatgaattacacacatggtatgtgagccccctagtggcattatgatttaattattttcaagacacaagaaccattttatgtcaaaatattctagactatcactgttaaaaactaaacttgaaatatctgttaagaaatgacttaaatgggtaaaatatgtggcattcatgtatatgacctcccagtacagaatcacacactgaaaagctgaggtatttaaatgaatgctaagtaagcctgcgccaatgttcaggatacatatagatttagagctatgttaggacaatcctagatcacatcacaatattccgtggcctagggcacaggaatcttgagcaaaactgtgataaaacattaaggattatgttacgtggtggaaaatattatctttcatgaaagcaaaagtaaaatagatttcacatatatttgtaatataaattactacaattgctaaaaattatgtatcaattcagtttattaagttagatttcttatcaatcacatacttatttaaaatcaaaatagattcaaaggtatttacaatacaatgataatatatgcagaattttcccctaaacagaaataatttgttttagataaactccaaagaaagtttattattatatacatcatttggttatggaatttaaaatacctgtatgtttgcttcattgatgtaatcctagattccaaaagtaggcctaggaactctgtgtgtgtgtgcttagtcactcagtcatgtccaactctttgcgaccccagggactatagtcctccagactcctctgtccatggggattctccaggcaagtatactggaatgggttgctatgccctccaccaggggatcttcccaacccagggatagaacccaggtctcctgcattgcaggcagatactttactgtctgagccatcaggaagacccattcaggtactcaggaagtgtttttaaacagatgaattaagtgtaacattataaatattaaattttagcatcataaaaattaatatatagatatatatatataaaccctttatacttgtgataataaatgacatgaacactaggcacatcagaattttacattagtaaatatttaaattaaaactaattctaaggatatattctactatttgatacttagtcgtctgatacagattttgaactaaatatttaatccgacattaactcattttttaagtcagcttcttgccaaataaaagaaatggaaatatatcctgtgaagcagcttgtctgtaactaaccatttatggcactcttgttgtgtcatgcagtattttcacaacttaatatttatcatttacctccctgctcagcattgctgggaaggattcaaatgtatatacactggaagtgaaagaaaaaaaaatccaactgagtaatgagagattcaagggtcattaacataatcagttgggtctagaaatatctatagcttcatttttccagattaattttcaagagctttgattacttctttagtccttcaaaagctacataatggtatcaagaagcagaaaaacagttcatctgaaactggggatgatatcaattgaggtaaaaatgcatttcactcatttgttcaaaattgaggggcagacttggtgtcaagtagccacaagagtggaaaggtcgatccttatcccaattcccaagaagggcagtactaaagaatgttcaaaccaccaaacaattgcactcatctcccatcctagtaaggtcatgcttaaaatcctgcatgctaggcttcagcattatgtgaaccgagaacttccagatgttcaagctgggtttagaaaaggcagaggaaccagagaccaaattgccaacatttgctggatcacagagaaagcaagggaattctagaaaaacatctacctctgtttcattgactacgctaaagccttcaaccgtgtggataataacaaactgtggaaaactcttaaagagacaggaataccagaccatcttactggtctcttgagaaacctgtgtgctggtcaagaagcaacagttagaatcttgtacagaacaactgactggttcaagattgagaaaggagtacgacaaggcctgtttactatcaccctgtttatttaacttataagccaagcacatcatgagaaatactaggttggatgagttacaagctggaatcaagattgccaggagaaatattaataacctcagatatgcagatgataccactctaatggcagaaagtgaaggggaacaaaacaacttcttgatgagggtgaaggagaagcgtgaaaaggccggcttcaaatgaaatattaaaaaaaactaagatcatagcaactggcccatcacttcatggcaaatagaaggggaaaaggtggaagcagtgactgatttcctcttcttgggctctaaaatcactgcggacgatgactgcagccatgaaatcagaagacaactctgggagatgctgagagacaagaaagcctgatgtgctgcagtccatggggtcacaaagagtcagacacaacttggtgactgagcaacaaaaactatgggagtactgagaaaggtcttagtcttgatctgagaagggaagcatagattgatggttgccagaggtaggagtcaaggggaagggaagtgtgtgagagtggacaaaaaagaaatcttccagtgacgataaatcacaagtagaaggaaaggtgattcaaaagaactaagaattcaacaaataggaatatcttcctggaataattagcttcattaaaggaaaatatacttatggatacagagggaaagcatagaaatagatacaagctttaaagttccacttcttggactgactgcttggttcatacgtccccattatgtcattaggttttacagttttaaagtttgttccacctattttactatgaaagggatctataaatctaatgcaactgattctaaaatttatataaatttatatttcttttataaagaaattaaaataattaaaacaagtttgaaaaaaagaataaagttaaaggacccacactaccgtgttttaacacttattataaggctatcattggagaagggcatggcaacccatttcagtattcttgcctggagaaccccatggacagaggggcctggtgggcttcagtccacagggatgcaaagagccagacacaattgagccagacacagcttagcacacatgtgagcataaagctgtcagaggtggtgctagtgttaaagaacctgcctgccaatgcaggagatataagagatgtgggtttattccctggatcaggaagatctcctggagtaagaaatggcaacatgctccagtattcttgcctggaaaattctatggacagaggaacctagcaggctctggtccatgaggtcaaagactcagatgcaactgagcacacacacacatccacacccaaacatagagctatcataaccaagacagtgctgtgacggtgaagagagagacatatgtcgatcaatggatcagaacagagtcagaaacagactcaaaatatgtccagttgacttcttttggccacaccacatggcaagtagaatcttagttccctgactagagactgaacttgtagccactgcattggaagcatggattcttaaccactgaaccaccaaggaagtcccctccaggtgatttctgacaaaggtggaaggagagaaacaactgccttctcaacacatggtgttaggaccattggatgtctataggcaaaactcttccaacttcatacaaaattagttccaaatcaatcataggtctagatgtaaaacatacaactataaatttttttaagaaaacatagcagaaaatctttgtaacttggactaagtcaaagagttcttaaatacgacactaaatgtcataaagaaaaaaaatggtaaatttgaattcattaaactttaaaacctccacttaagtgtaagacacttaagaaaaagaagggataaggtccagaccatgagtgaaacatttgcaaatgttataaacaacaaaagatttgtatccagactatatacagaactctcaggacttccctggtagtatggtggataagaatctgcttgccaatgcaggcagaaagattcgatccttggggtaggaagattccacatgccgtggggcaactaggcccctgaacttggagcccatactccacgacaagagaaaccactgcaatgagaagaacacgcaccacagctagagagaaacccctgtcaccacaactagagaaagctggcgagcagcaacaaagacccagggaagccaaagattaattaactaatttaaagaaaagaactgtcgaaactataaacattaatgaacaattaggaaacaaacaacttaattgtttagatgagaaaagacttggatatgcactttaccaaagaggatactcagatgacaaataagcacatgagagacgcttaacattatgagtgaaacataaattaaaactacaaaaagatgtcactgaagatggggaaataaaaaccttggcaatactaagtgctgacaaagaagaaaaacaactagaaatttaatctttgctgatgggaatttaaaaatggtacagtcactgtatcaaatagtttgaatggggggtgggtaggagggaggtccaagaaggccaggatatatgtatattcatgactgattcacatggctgtacagtggaaaccaatacaacactgtagagcagttattcttcaattaaaaataaattaaaacaacaaaaataaactagtttgcaagtttcctataaagttaaacatacatataccatatgaccctacaatctcactcacaggcatttctcccagagaaatgaaaatacatgtacacacaaaaacctgtacacaaatgtgcatatccgctctatccataatttccaaattctataaacaacccattttcttccaacaaatgaacactgtaggataactgtatgatatccgattgatggaataatgcttagcaatgaaaaagaacaaattattgacacatgcagcaagcaaaagacagatggacctcaaaagaattacattgaccaatgtaatgagaaggaggccaatctcaagaggttacacactgtgtgacttcatttctatgacatttctatgtcatcccagaaaatgcaaaactaaagcaatgaagaaaagatcagtgtttaccaggaggtacgtgggaggaaggaattgactccatggagccagtgtgagggagttgttctatattcagattacggtgataacaacatgaatttgcatacatgtttaaaactgtatactaataaaggcaattttactgttatcttttttcaatttaaaatgtgaatgaatataacatctaaagaaaaaaaaaatccagttgaacttgaaaacaaaacccaaactacattctatatgtaagaaatacatttcaaacaaagtgactcagaaaagccaaaattaaaagtatgtgtggcagtgaagagagaattactgtgttgacttacagtgatcatcttaaaaaaattaagataaattaattaattttaataaagggatgtgcaagactgtacggacttcccaggtggtgcagtgctaaagaacctgcctgccaatgtgggagacagaagagacgtgggttcgatccctgggtcgagaagataccctggaaaagggcatggcaacccactccagtattcttgtgtggaaaatcccatggacagaggagccttgtggggttacagttcatagggttgcaaagagttgcacatgactgaggtgactttgcacacacacaagcacgcaacagtatacctggaaactgggcataaaaagagagcaagtgaagcaaatcctgataatgtaaaatagaattcaagtctgatatcagaaaaacatgacaaagaagtgctaaaaaccatgatccacaatgaagatataacacatgaatattatacatcaaataacacagctacttttatgaagcaaaactacaggagatgaaaggagacataggtaggtagaaacaccctaatgataggaaattgtaaaataccacttctagcaacaagatagatcaagaggacaagaataaggagaaagaggatctaagcagtataatcaaaagggtatgcatatatatctaacttgacacattataataaaaaatacacattcaaaatatttaaaaactggctctaaatactcaaaatgtatgctggccatgatcctttggcattgggtatttctcctgctctcgtgtaatcaatattaattacaaaatagataaagagatacacattggggagttctcttttttatggctctgtgaaaagtacaaaacattttacttcacttcacttttgatatatgtattctaaagtcacatcacactccttaacttcatcttatattacaatatcacaaagtttattttccctaaagattaccatatgtgtccattctctttttagcatttatgtcctggggtgccctgtcatatgcaaacacagaggatgtggttttgatgaatgctaaacaacagaataagttctttctgtgacattaaacatctggagagtattcatggaaatgttgtataaattaacacacaatctggtttatatatttgacagaatatcttcaagaatactgggcagtttgtactcttagtaacagtaacttcaggcaattgaacacagactggaaaaaaaatgggcatatctttttttgacagcacatacttatgcccaataacatctaattttggaaataaagctttgtgttccagaaatatctagaaaactctgtggggaagacatctcaccttgatgagcaggaggagcattttattactataatgatgctgcctttgactttctgaaggatcttagacagctttttgacacagagtgtctctttctccagctgtaaactggggttacccagtttacaactacaaaactttctcaagatattgtagggggaaatgaccattgtattacttatttgtgtatcagtctcctgtgaaatttattgatgtctcactgaccgggggcttccgaggtggtgcaggggtaaaggatctgcaagagatgcaagagacaagggttcagtatctgagttgagaagattcctggagaaggaaatggcaactcactccaatattctttcccgggaaatcccatgaacagagaagcctggcagagtatagtgcatgggatcacaaagagtcggacacaactgagcgacagagcacagccataaacgtttgtttacaagtctctacgtgagcatatgtcatacatcttctcatttgccggaccttattcaattcaacatgttataagaaggaccagatttccagaacttcatgatcttcccaaaatgatggtaccttgtagcagactcttcacatctctaggtggcatcttcaatttccctctctctaatcatatcaagtacatgaccgaaaggaagagattagaaggaaaatggattattggacaatgctgaccagtcttgacatgagctggtcattggagaatgaataatatccatttaaaaaagtaaaaatggaaatgttattttaaatacatacgtgagggaaaagattgtttagagcggtaaaagttttagattacacatccttgaccttagaacaaggtgttcaaagagatgcaatataaaacttcagaagggggagttcatcaggggaaacagagtcctgggaagagaactaaataaaagatgtaggtcagagagtcatcatcttggaggcagaccaatcgtctggtacacgaacatgagagaagaagagaaagagaagaatagacatgaatcgagctgctgctgctgctgctgctaagtcacttcagtcgtgtccgactctgtgtgattccatagatggcagcccaccaggctcccccatccctgggattctccaggcaagaacactagagtgggttgccatttccttctccaatgcatgaaagtgaaaagtgaaagtgaagtcgctcagtcgtgtccaactcttagcgaccccatggactgcaccctacaaggctcctctgtccacgggattttccaggcaagagtactggagtggggagccactgccttctccaatgaatcgagctaaccaggctcaaagattgagtgagagcttgagattcctctgaaaagttatctatcttaaaagcagagccaagagagggagcacttttggaatggcaatttgaagagacctgtggactaaagagtgaaacataggaaaaaacaggaatagaggagaatttcctcaacttgaaaaagaacacataccaaaaatctgtagccaacaatacagttaatgatggaagtttgaatgctttctccctaagatcagaagcaattaaagcatattcactatcgccactcttcaaaatgcttgaagttacaaacatacgtactaatatgattctacttatacaatagacagaaaaagaccaaaattatggaaaggaagactagattagtggttgctagggtataaggtgaagctggtggtacaagaggagtagttgtcattataaaagtccttgtgatgatgaaaatgttctatatcttgatatagtgatgtcaatatcctagttgcaatattctactataatcctataagatgttaccatttggggatactgggtacacgagatccctgtcttatttcttagagctacatgtcaacagttctttcgaaacaaaatgtttcatttcaagcatttaaaaaattataaaatacaacagccatttaaattctcttgaaattgtcctaaggttatacaacaactggagaaacacttattcaagaaaatctatgaaatctaggttagaagagtaagtgtctgtgacatttgaaccatgacctgtttatggcctgtcctctcttttccccacctcagcaagatgatagctccactcatcatgggtacagctaagaacagaggattttatttcccccagctctctgttagggataagctttttccgagggtatatgtcaagggcagcagggggcaggtgagataccagcactcctcatctcacacagctctgtgctacagaagctggatcagaggtaagaactacagagatctgaatctctgttccaccactcagtccttactcatagatcaggagatctgcctcaggcatggtcggccaagaactgaaggcctgaatcattcccacttaaaatcactggtagggcacaggtttcatgctgagcagtacaagccaagaagatcagggaataatgtcaagacccagcattctgcttatagactagggatgttactctgcaaagtgggatctacccactcaatccacagagtgggtgcaaaggctcttcctcagggaaaaatcaagttgtaagaacagaaagtttcacagattttcctaggtagcctgagtatttgggacagaaaatggggaagttcaagcctaaaggggctattgaaaaaaaaagagattttagtggtgtgtagttaagaggagcatgagagcaacaagcaaaatagtaggtcagatctcagtttaacagagaaaaccagggaaagagatagctaagaatgtctctttttgaggtttttctgacctgacctcaaagactgacctataagcctacgctggccctggggcttgagtttaattggctcagatcatagagtaatttatgcctccaggatgttattgaaagaacagagccatcatctaccaattagtagtgggtaagaattgagtgtgatatcaatagaggcagaccagctagaaacttcatcaaagagaggccagctaaaaacactatcattccagaaggattgggtgactgtacatgtccaaggctgagccctctgaatagggacactaaaggctacatattacaggggaaatagatgtcactgaaatagcccagtcaaggagctaaacaaataaacaaccaagaaatgacaaatcctaaaggggaaaggaaacttagtatccactgctgctaaaatatactatctaaaatgatctgttttcaacaaaaaattgtgacacaggcaaagaaactggaaaagatgactcatataatcgaggaaaaggcagcagaaactgcctttgagaggtttcagatgtcagaccgtgcagataaagattcaaagcagctattaaaaatatgtccaaagaactaaagaaaacccatgtttaaaaaagtaagaaaagtatgataataatgtctcatcaaaagagactatcactaaagagataaaaattatatttataaaaagatctaaaggataactctggagctgaaaagtacaataaccaaaataaaaattcactagaggggatcaaccagcagattagagctggcagaagaatcagcaaacttgaaaagatactaatagtgatgatacaatctgaaaaagtagcaaaaaaaaaatgaagaaaaatgaatagagcctcagagaaatgagggacaccattagtacaccaaaccatgcatgatggaagtaccaaaaggaccagataatatatttgaagaaatcctggctgaaaattttctaagtttggtgaaactacattaacctacacatctaagaagtcaacggattccaagttgagtagacacaaagagatccacatccaaatatatcacaagaaagatgctgagagtcaaaaacaaaggaaaaaatctgagagcatctagagaaaaataagcatatatatgggaatctcagtaagataaattgctgagttctgtcgttcatctagaagccagaggacagtgggatggcatgtttagactcacagacttaggaaatgaacttacagttgccacagaagtaaagcatacaagtaaagataatttcatcaatagcaactatgaaagacattataattgtatgtttctttattctcaacttatttaaaagtaattgtataaaccagcatgtatgtaattataccattgaccagtaatatacagacatgtgggcttcccaggtggtgctagtagtaaagaacccacctgccagagcaggggatgtaagagacactggtttgatctctgggtggggaagatcccctggagaagggcatggcaacctactccagtatacttgcctggagaatgccacagacagaggagtctgctggctatggtccataggttgcaaagagtcagatatgactgaagcgacttagcacacatgcatacagaaatttaacatacttgaaaagattgccacaaatgaagcaggtaggtggaaccaaagatgtttggggataattaaatgaaagcagctgataactgcaatccacaggaagaaatgaagagaagcaaaaagtttcacacacacacacaaaaactctatgaaatttaagttctctcatttcttacctctaaaagatataaaattatatagtgaaagttgctcactcgtgtctgactctttgcaaccccatgcagtctatggaattctctaggccagaatactggagtgggtagcctttcccttctccagaggattttcctaacccagggatcgaacccaggtctcctgcatcacagatagattctttaccagctgagccacaagggaagcccaaaatcatataaagtaatattataaaaatgtattgtgggtttgttatataggttagatggtatatgcattacaaatacaacaacaacaaaggaaagggggaaagtatatgtaggagtaatacttctatgtgactgcaattaggtaatataaatctggagtaaattctattaagatgtacactgtaagccctagagcaactattaagaaaacaattataaatatagtgagaaaattatgaaagaaattaaaatgttacacttgaaaacattcactgaatttttaaaaaccagtaaaatggggacagaaaaccagaaatgaaatgacatatgaaaaacaaaatggcaaatggcaaagataaattcagatatatcaatcataacattaaacagtccaatcaaatggcagaaattcaaaatgctctctgtaagagtgtcaaaagcaaatgggaggaaaacatatacaccatgtactataaacaagctgagttgccactataatatcagataaattagactttaaaacataaaatgatactacagatgaaagggaacattttgtaatgacaaaagtgtcaatatataaggaaattatgacaattataaacggacaatcacgtgcaataaaaatctcaaagtaaataaattacatacaaagtaaatgaaactaaaagattgacatgagaagtagataattcatcaataataactgcagtttcaatagataaaataactagggagaaaatcaacaaggaaatggaagagttgaacaatactttaaaccagctagccctgacagacagccagagaacacttcacccaacaacaacagaacacgcattctttccaagcacacactgcacattttccaggatagccatatgctatgctataaaacaagcctcaataaatttcaaaagattgaataatacaaagtgtattttccaaccacaatggaatgaaagtagaaatcaatcacagaaggaaatgtggcaaattcacaacagaggatgagaaggttagatagcatcactgagtcaatggacatgaatttgagcaaactctgggagatagtgaaggacagatgagcctggtgtgctgcagtccatggggtcacaaagcgtcagacactcagtgatgcaagaacaaaaacaccacactcttagataacccgtgagtcaaataagacatcacaaatgataacagaaaacactcaagatgaataaaaatgaatacacaacaccaaaacttcaggaatgctgcaaaagaagtatttaaaggggaatttatagttgtaaatgcccatattaaaagataaaaaagctctcattccatgacctaaacttctaccttaagcactgaaaaaaaaggtggggggcaaattaaatctaaagcaagcagaaggaaagaaatgatactgaataaagtggaaactggagaaacaaatgagaaaaattacagagaaaatcagcaaaatcaaaagttggttttttgaagtaagccagaaagaaaaacaccaatacagtatactaacacatatatatggaatttagaaagatagtaatgataacactgtatgcgagacagcaaaagagacacagatgtatagaatggacttttggactctgagggagagggagagggtgggatgatttgggagaatgacactgaaacatatatactatcatgtaagaaacgaatcgccagtctatgtttgatacaggatacaggatgcttggggctggtgcacggggatgatccagagagatgatatggggtgggaggtgggaggggggttcaggattaggaactcatgtacacccgtggtggattcatgtcaatgtatggcaaaaccaatacagtattataaagtaaaataaagtaaaaataaaaattaaaaaaaaaagttggttttttgaaaagaacaaaattaacaaaatcaagaaaagagaggagattcaaatcactgaaatcagaacaactgcaaatcttacgagaatataaaggattataaggcaatactatggacaattgtaagccaacaatttagataactttgatgaaatggacaaattcctaggggaaaaaaagtaccagaatagacttaagagctagaaaatctgaaaaaatccacaataaataaagagattgaattagtaaataaaactacattcacaaagaaaagcccaagctcagatggctttgctggtgaatcccaccaaacattactttttcacaaactcttccaaaaaaccagaagtgggggggtacttaccaatttattctatgaagccagtatttccctgataccaaaaccagacaagggcatcacaaaaaaagaaaatgataggccaatatcttttctgtaaacagacaaaaaattctcaacaaagcataccaaatctagtgacatacaaaacggattagatatcatgaaggatttccctcaggaatgcaaaattgcttcaacacacaaaaatcagtatgatacaccatttcactatcactatagtaatgaacagtaaccacaggattatctcaacagatgcagaagaagcatttgacaaatccaacattcacgatgagcctccctggtggttcagcggtgaagaatccacctgtcgatgcaggaaaagcaagagacacaggggatgggtttgatcaggtcaggaagataccctggaggaggaaatggcaaccaactccagtattcttgccaggaaaatcccaaagacaaagcagcctggtgggctacagtccgtaggggtcacaaagagtcagacacgactgaacacacacacacaacatttatgataaaaccacttaacttaggaatagaagggcacttcttcacattgatcaaaggcatctacaaaacactcacaactaacacaataaatgataaaggacttaatgcttttcctctgcaatcaagactaagacaaggatgtccactgtagccacttctattcaacattatactgaaagttttagacaaggcaatgaggcaagataaagaaataaaaaaaaaatatccagactgcaaaggaagaagtaaaactatttgtagataacattcctctgtatacagaaaatcctaaggaatccaatgaaaaattattacaactaataaatgaatttagcaggcttgcagattacaagatcaatttacaaaaatatggacaaaaattagtgatttactgaggcctcagattttgcagagtgtctccttactggaaaacgctctctgataaaagtctttttttacctcaaactggaatcttctctctcattaatatctccttaagtaagtaaggctttttggctaagattaagtggtggctcagacggaaagcgtctgtctacaatgtgggagacctgggttcgatccctgggttgggaagttccctggagaaggaaacggcagcccaatccagtactcttgcctagaaaatcccatggatggaggagcctagtgtccatggggtcgcaaagagttggacacaaccgagtgacttcacttttttttcactttttaagtaacacgtactgatgccactgctgtctcatggcactctctacatatttaatgaaagttaatcataacctctctctcttttcctggctaccttcttcattttctttacaaaacatgacttaaaccttcccctcttttcccctgattctactcctagatagattaaaattttatctttctcagacagaaaatgttaaataaatatatttcagtgtcaagtgcaaataaatcttttggtctcaacattgtgttttggtaccttacaattatactgggcagtttagacattacgacatggtctacatgagtcatattgaactcagggtggttgaataaaaaaacctaagtcactttcatatcactgtgctgtgtgctgtgcttagtcgctcagtcatgtccgactctttgcaaccccatggactgtagccagccaggctcctctgaccatgggatttttcatgcaggaataccagagtgggttgccatgtcttcctccaggggatcttcccaatccagggatcaaacccaggtgtcccacattgcaggtggattttttacctactgagccagcaggaaagcctaagaatactggagtgtgtagcctgtccctccttcaggggaactttttgacccaggaattaaacctgggtctcctgcattgtagatggattcttgaccagctgaactaccagttcagttcagttcagtcattcagtcatgtccaagtctttgcgaccacatggactgctgcacatcaggcttctctgtctggcaccaactcctggagtctgctcaaactcgtgttttcattgagttggtgatgataaccaaccatctcatcctctgtcattttcttttcctcctgcctcaatctttcccagaatcagggtcttttccaacaagtcagctcttcccatcaggtggccaaagtattggagcttcagcttcagccctagtccttccaatgaatattcaggactgatttcctttaggaacccccaaggaatctgactttgaaggccagtggatttgactacagaacttccacaggactggggaaacagactcttggagggcacaaaccaaaccttatgtgcaccaggacccaggaaaaaggaacagtgaccccacaagagactgagtcagacttgcctgtgagtgccctggagtagccagtgaaggtgtgggtcgacagtggcttgccatggggtcagggcactgaatacaacagccctggcataagtccttttgaaggaggtcaccattattgccatttggtctagctgctaagttgtgtccgactcttgcaaccccatggactgtagcctgacaggctcctgtgaggactttttactgactgagctaatagaaccccattactgtaccatagttggcctcaggccaaactacaggcagggaacacagccccatccatcaacagaaaattgggttaaagatttactgagcattctacctatcagagcaagacccagattcctccacagccattccctccaatcgggaagtttccacaagcctcttatccttatggaaaccacaatcacagaaaactaaccaagctgatcccatggatcacagtgctgactaactcaatgaaactgtgaggcacgtcatggagggccacccaagacagatgggtcatgagagagagtactgaggaaacgtggtccactggagaacggaatggcaaaccacttcagtattcttgccttgagaaacccatgaacagtgtgaaaaggcaaaaatatatgacactgaaagatgaactccccaggcaagtaggtacccaatatgctactggagaagagtggagaaatagctccagaaagaatgaagaggctgagccaaagtgaaaacaatgcccagttgtggatgtgactggtgatggaagtaaagtccactactataaagagcaatattgcataggaacctggaatggaaggcccatgaatcaaggtaaactggaagtgatcaaacaggagatggcaagagtaaacatcaatttttttaggaattggcaaactaaaatggatgccagatgagctacttcaaatcctaaaagttgatgctattaaagtgcagcactaaatatgccagcaaatttggaaaactcagcagtggccataggactggaaaaggtcagttttcattccaatcccaaagataggcaatgccaaagaatgttcatgtctttgtgctgacatccagtcacatccacaactgggcattgttttcactttggctcagcctcttcattctttctggagctatttctccactcttctccagtagcatattgggtacctacttgcctggggagttcatctttcagtgttatatttttgccttttcacactgttcatgggtttctcaaggcaagaatactaaagtggcttgccattcccttctccagtggaccacatttcctcaacacacaactgcactcatctcacacacaagcaaagtaatactcaaaattctctaagttaggctacaacacatgtgaatcaagaacttccagatgttcaagctgaatttagaaaaggcagaggaaccagagatcgaattgtcaacatacgttggaccctagaaaagataagagaattccagaagaatatctcagttcagtcacttagtcatgtccaacactttgcaaccccatggactacagctctccaggcctccctgtctataattaactcctggagttttcgcaaaacttgtgatctgggcacttcctttgcttagatttgtgtttgtacagtactgaatgcatttttgtgggaaaagaaaataaacacaggccacatcttcattaaatacagtggaagatggataattagtattacaaaagatgctcttttcaaccacttactcagtaaaggaattttcctgcttggtatctggcatttgttgtgtttctctacaaccataaaatcaaaacctttatttgtaattttctttgtacagtatgccaaatcaatatcagttcagtccctcagtcatgtccaactccttgctaccccattgactgcagcaagccaggcttccctgtcgatcaccaacttctggagcttactcaaactcatgcccatcaagtcagtgatgtcatccaaccatctcatcctctgtcgtccccttttcctgccttcaatctttcccagcatcagggtattttctagtgagtcaattctttgcatcaggtggccaaagtattggagtttcagcttcagcatcagcccttccaatgaatattcaggattgattttctttagggtagacttattggatctccttgcagtccaagggaatctcaagagtcttctccaacactacagttcaaaagcatcaattcttcagcatataagttaaataagcagggtgactatacagccttgaaatactcctttcccgatttggaaccagtctgtttttccagaaaggagtaagacaaggttgcatattgccaccctgcttcattaaattatatatagagtacatcatggaaaatgccaagttggatggagcacaagctagaatcaagatcgctgggagaaatatcaataacctcagatatgcagatgacaccacccttatggcagaaagcaaagaagaactaaggagcctcttgatgaaagtgagaggatagtgtaaaagttggtttaaagctcaaccttcaaaaaactaagatcatggtatcctgtcccatcacttcatgtcaaatagatggagaaacaatggaaaacagtgacagactattttcttgggctccaaaatcactgcagatggtgactgaagccatgaaattaaaagacgtttgctccttggaagaaaagctatgaccaacctagacagcatagtaaaaggcagagacattactttgttaacaaaggcccatttaatcaaagctatggtttttccagtagtcatatatggatgtgagagttggactataaggaaagctgagtgccaaagaattgatgcttttgaaccgtggtgctggagagtcccttggactgcaaggagatcaaaccagtcaatcctaaaggaaatcagtcccgaatattcattggaaagatggatgctaaagataaagctccaatactttggccacctgattcaaagagctgactctttggaaaaaaccttgatgctgagaaagactgaaggcaggaggagaagatgacagaggatgagatagttaaatggcatcaccaacttgatggacttgaatttaagcaagctcagggagttgatgatggacaggagagcctggcatgcttaattccatgggtcacaaagagtcagacacaactgagtgactgaactgaactgactaaaatgaactggaatgagctgccaggatagccctcgtatccctttaccaggttctatttgtatttctgggtctaagatttatatatttatctcagttaacttttgttttcatacatgccaagaatagctttatccttaaaagtctgtgttcatagtttaggtagatatttaatcactttctataattcaaaattaagacccataatgcctcacttaatcattgcctcaaggaaatggcaacccactccagtgttcttgcctggaaaatcccagggacgggggagcctggtgggctgccatctctggggtcgcacagagtcggacacgactgaagtgacttagcagcagcagcagcaacataatttttgctagaatgagttgtcattttttttaattgaatttattttattattattatttttttttactttacaatattgtattggttttggcaaacatcaacatgaatccgccacgggtgtacacgtgttccccatcctgaactcccctcttacctccctccctgtaccatccctctgggttaacttccgtattcatttgagcctatagttctagtgacctcctttaagtgcacttctctaatacagaaaaagtcctctttttttaatattcagcctatcttccatgccatttgatggaaattgtgaatacaaaattcctagaagagacaatacaagcaaactattgactacttgtcttcaaaatgacatcaatattataatttgttctcctgtgcatgattttttaattttctataaatctacctaatgatgctatattcacctagcttttatctctctgtcttattagaaaatattgctcgctcataacaactctataaaatcctttattaaaaatgagacactaaatttcttttggaaaacacactttgtactagaaatctcaaaggtgacataaaaaaatatatgaagagaaccctggaaaagaaagaataaaaccaggaagacatggaaatgtattacttcacaaataatagaaaattattctgagaatgttacaggcccaggaagctaaaataactgatgttggtagcagtgtaatgaaagtcacatgcttgtgatgtatttctttaccttgtaatatatgtctattcatttctaggaactaagtggaaagattaaaaataataaagcatcgtggaaggagaaacaggaactaaactatttcaaattcttatattatacctttcaaacaaatgcaatattagcaaagatgcttttcttccaaagtttatctataaactttgcaataaatttcatctaagaagttagcattttctatttacttatgttttttgcggtactgtggtcaagaaaataaatgaggaaaatattattaatttttttcagtgagaaaatactaaacaaatatgaaatacctgtgggcatctggcagcactatagcaatctccagctgtggcaaatggaactgcatttccaaatactgtctgggcaaaaagaaggtctgtagctagaaaataataaatgaaactcttcagcactaagacactgtattcaaatcttcattgaaaccaaagcatacagtcttcacattatattcttaaatacattcatataattaatccaaaactttaagcaaaaatgttgcacaattgtcatacataacatagataaggctctcaaattttatttaacataaaatgttcatcccaaaaactgccctaaaaatggaagggacatctgtaactaatccagatgttttaaaagctaaatatatgctctattgtattttagatcacagtgaatatctaaaatagataaagtggggtcaaggaacaaaattagaagaagcattatttaaagataaataggtgtggaggcatgggttggcaggggcttaccatagggacagtggcactggaaggtcccccagtgtaaacccccttggagttagccattaatcctgccatagagcctgtagactccaggctgggtcacctcaggccaaacaactaccaggaaaggagcacaaacccacccatcagcagataattgaattaaagcttcactgagcaaggccctgcccaccagagcaagacccagtttttactatcaccatcccctcccatcaagaagcttacacaagcttcttagcctcatccatcaaagggcaaacaagaagaagcaagaagaagcatagtctcaaagcagctaaaacaaaaccacattacataaagttaatcacgatgaaaatgcataaaattatgtcccagatgaagggacaagataaaaccctagaaaaacaagcaaatgaaatggagataggcaaccttccagaaaaagaattcagaataatggtagtgaagatgatccaggatcttgggaaaagaatggaggcaaagattgagaagatgaatgaaatgcttagcaaagacctagaactaaagaccaaacaaacagagataaatggtacactagaaggaatcaacagcagaataaccgaggcagaagaacggacaaatgacctggaggacagaatggtggaaatctctgccacagaacaaaatacagaaaaaagaatgaacagaaatgaagacagactaagagacctcggggacaacattaaatacagcaatatttgcattataggagtccctgaaggagaagagagagagaaaggacctgagaaaatatttgaagagataatagctgaaaaattcctgaacatgggaaagaaatagtcaaccaagtccaggaagcacggagagttccaggaaggagaacccaaggaggaacacaccaagacacatactaaagttaaacagggagttccagtggctagcactcagtgctttcactgctcaagggcccaggttcaatccctggtccaggaactgagattccacaaactgtgtggtgtgaccaaaaaaacaaacaaattttaaaaaagataaattatgacaaagcaatatgcaagtgcttatagagagtacacatatcagttcatttagggaattcaaaaacacccagctaaaaaatgtgctacttctttgatttcttgtattattacattatattattatctcatttctattttatttttgctaatggtgttaacataatttcttgtttggcaaaaatgctggggattctatataaagtatcaaaaaagtagagatcttggctcagaaataggagaaaccctgaagataagctggaccaatcactttttgatgcttaaaccacttaaataatattccaactaatgttcattcagtcagtggctttcacttctgctaacgatgtttcaaatacttttcaagaagactgcaagaccactgcatgccctggtgatgacaccagtccccctggaggcaatcctcaaaggtagcatttccggaaatatttatcatatctctaagagtagtttccaaacccaggaggccttccgtggtgtgccaggtcagcttgtacccaatcatgagaacaagtttggtgtgtctttccctatctgcatgcaaaatgagttcgtgttggtagcttaaaattggtcatggtgagaatatatacatcaagaaactgaaaaataatacaaatcaaacttttttcctggttgttaagagttaactgttgaacatttacccattgcttacgcatggcacttagggttaggctgaggcaaacagacacaattttcaaatcatcctttgcgatggtctcctacaccattacctggataactccaaaatagctttcacttaaagagtccaaagaaagctgaaagctgaagaattgatgcttctcaactgtggtgttggagaagactctgcagagtctgttggactgcaaggagatcaaactagtcaatcctaaaagaaataaatcctgaatattcaatggagggactgatgctgaggctgaagctccaatatttggccacctaatgcgaagaactgactcactgaaaaagatgctgatgctgggaaagattgaaggcaggaggagaaggggacaacagaggacaagacggttggatggcatcaacaactcagtgaacatgagcttgagcaagctccagaaagtgaaggacaggaaagtctggcatgctgcagtccatcgggctgctaagagtcagacacaactgactgaacaattacaggtcacaagctaaatgcaattatcctttcatgacacaattaacatttcatgccacagatccccatattctgtctgttagaaaatcacagagtgtgcctctttaatattcctctcaggttctcaggctctctgtcttaaaccttgtccttaataatttagaccctcatcgctttctatctgaactattatattattaataatattagctttctaatcatcttcatggataaaatttgttttccctccaactaagtctgtttcctcctttgcttatacttttaccccaaaggtcctcataacttaaaagaaaaaaaaagataaattcaatttatagtttagtatacattgttatttatgatcttctttctgggaaattctttaacaaactgctaccagcatccactcaatttttgcttaggcaaaattgaatgacttaatctctgatggaaccaagatgcttcaccatcccatgctatgttcaagatgtctctgcctcctgaaactccattttctctctttggttaatacaaatttatttatttattttcaattttaatttttttactttacaatactgtattggtttttccatacattgacatgaatccgccacaggtgtacaaatttagctacaagatttcctcaagatagcttctagaggaaagttgacccattcagcaaatatttctttagaacatattatgtattgggcattattataagtactacaagtgaatgaaacagggcctgatggactctgagtgctaccagagagagaggtaagtaacagagtagatactatcatatgttacaggtgattattgctataggaaaaataaataaccaggaaaaggacaggggggaagggagtttaagcatggagagggtctaggatgcattcattgggaaagtatatttaagcagagacccaaaaaatattaagtggtaaatccaacatataactgtgggatagtcattctaggcagatagaacagaaaatgcaaaggctttaaggaggtacggggtagatgcttgatgtattcaaggaacagcaaagggacaagtgtgtctgaagcagttcatggatgggaggaatgtggagggaaggagcagaaaaataatgggttgggaaggccatgttgagttttactggccactggcaaggttttcattttatgagttagatgggagatgtttggagagttttgagcaaaggttggagttgttaaaaagatgaaatgagatcatgtgtgaggcatgacatggcttgctttatggatcactctggcttctctgctgagaagagaatctaggtcaggagtaggaggaaaggtgaaaaggaacttgagcgctaccagagtaaacagggatgccactccgtaggtaaaataattcgggtggaaaaaataatattgacttctatcaaggtggtagctagtgaggtaatgtcaaagtgggccttggtgtgtgtcttagctcaagctgccctaacaaactcatagactgggtgtcttaacagaattatttctcccagttctagaacctaagatcaggtgccaacatcatcagggtctgatgaaaggcccctatttggcttgtagaacttggtaatggatggcatgcaagaatgagagaaaggggggagttaaagatgttgctgtttcaacatgagtaactagaagattatagttgccatatattgaaatggtgaaaattaggggtagaaggagtttttgtgaagaaacattgaaagttgagttgtggatacattgccaggtgcctattagatgtaggtatgctgagaagggagtttaatcttgaaattcagggcagcagtccaaattggagctatacatttgggactgtcatttaacagatggtatttgaaatctgtaagttgaaagagacctctaaggaaatgatggagtcctgaatttcttcaatactcattgctgtagaagataaagaaccaagttgagaaacagtgaggaaaatggaagaaagagtgaccaagacaggcaccaaatgatgagcgtgtggactcttggaagccaaatgctgctgatggatcaagtgaagtaaaaaccaagaatttgtcattggatttagagaaatggagggaaaacgggtgacgtaagagagaaaggaaagcttgctgaaataatgttctggacttggttcaaagcaagaaacccagagcacaagtagagagggctgcctcagacgggagctggaacagttcacccacagtaaccaggagaggaggcagagtctataggtcaaggtttaggtgggctaatagttgtgatgttaccaaaagtggggtccaactgcttgccactctaaagccaataaagagtcagaaagcgaagtcactcagtcgtgtctgactctttgtgaccccatgaactgtagcccaccaggctcctccgtccatgggattttccaggcgagaatattggagtgggttgccatttccttctccaggggatcttcctgacccagggactgaacccaggtctcctgcactgcaggcagattctttaccttctgagccaccagggaatccccaataaagagtcaagggtggtgaaacggaaaggttgctttatttcagaggccagcaaccagaggactgggcaggctcctatccacaagccagttcccccaccactgacagtcagtgggcaaaagcttttatagacagagggagggggctacatgcaaaaacagcacagtcagctctgagagtctccttggaattagtcatgcagtagtctgatcagagtcatcctgattgctttaagtacagttagtctttagttccaggctttccaggtagcactagtggtaaagaacctgcctgacaaggcaggagacataagaaactcaggttggatccctgggtcaagagcatcccgtgaaggaggaaatggtaacccacttcagtgttcttgcatggaaaattccatagacagaggagctggaggtctatagtctatggggtcacaaagagtcagacacaactgaagcaccatgctcacacacacacagtctttagttccaggatcagtttcttcccatttctttgaggccagctctcaaaattgtggcagcttatgtcacagctacagtctgatgatcatcgtgtagttatcttcttcaacctggtgggagtttcagtatctataagacagctcaaaggatatggctcagaatattatctatagccctaggggaggaactaaagatccttgaccttgcctaatgactattggtctcctttgactgttttcctttgtttctgcattttctcacttctatgattaaacttattctttggctaaagtttctctacagacagaaggcaggctgaggacatgaagggcaagaaccataggatcctgcaccatttcagtggtagtttgcagaaattccattcttggtgttcttcgtttctcagtgagagaggaaacaagatcatcagcaatcagggactagagtggaggtattagaaattttagaagcttgaagctggagaagaagctgtgagttagacactgaaaggagtggagggggaatggagtagggtccatgcaagctcaggagtcagcatttaaagtaaagcagtcaggaggcctgtgtattatttgccacacacacatttcatggtgcagatgcagagcaggtgaaaggtttaacttaatcaagactggagttttggcacacaagtctgaggaagacaatgaaagcaagtgggaagtgtatacatttaatattgtatcttcagagcccagtccaatgcctggagaaatggcaggcttgttagataaatgaatgaaaaataaaaagttaacgaacagcaaataagttcctaattgtccattatttactcagcaatgctgacacagcatatattattaaataataactttatttatagagcacttactacctacagggaatttactaggtatgttgcaagtattatctcttaattctatccaaaaacaaaacataaataaataaaagaaggaaagaagacataaaaagaaagaaaaagcttgagaggcatcttactttagaaatgaggggatttaggcttagagaacggagaaggcaatggcaccccactccagtactcttgcctggaaaatcccatggatggaggagcctggtgggctgcagtccatggggtcgcacagagtcagacacgactgaagtgacttagcagcagcagcagcaggcttagagagagatgcccaaggtcacagactagtaaccagatgaagagagcttacactcaggagtctaacttcagtttatgatcatatccaaagcagcgtaatccttcctcactacagtaacggtgggtgtttagcaaatggtagctactattactgacaataatagttcaccatcatatgactgcaagttagagattatgtattcatgcattcacagtctcaacacttttttgtttctttttatgatttaggcactatgctaggctttggtgatttaattttgattgagagtttctgcttctgaaatgaacttatttgccttttcatgtcactatgtaatatccaggagggtagactgtctgatggtcagtatatgtgagggttcataaatatacttaaactttactgtcctgtaaattgattcctagaaaggcagcaggtccataatctggaattgtgggtgggagggactttaactctgcaatgccagttactaactctaagaagtggggcaagtcacttaattctgtaagtgcatcttaattttatcacttgcaacaatatgatgaaatactgccttatctagtataaggttgttaaaaaaaatcaaatgagacaaagtataagaaaatattagacaaactgtcacctgaaactaatgttaattattactttaaacctttgcagaaagcttatgcaactacatttaaaatattgatttccttacttttaatgtaatttggaattttagggtagaggattatatctcggaagggcaatatctttattacaacagtatctttagtaataacagtgtcattaccaccacatttttattaagaatccccaaggtccatattgttgcattgaagaatgtagctaataacatttttttttaaatttttaagtaactattttacaatgctagaccccagataccacatacaccatatagaatattgttaaacttgtattagcaaataaatgtttctcattttccaactagagattcagtacttacttttaatttgcatggaagtaagatcaattcttattttgctaaaaacagtgtgtccagcagccagatagtcatttttacattcacagtcttgcctcctgcttccattaaaaggacattcatatggatttcgtagtctataacaacattagaatattttggtgttaggtacagttattagaccataatgtaaatagtaactttggaagtgggagggaaaaagaaaccctcttcaatattttttgtgtcaacaagttaaatgtgaaagaagtaaaaatcactcaaggttaacgtacaaaatgatcaatgggaaattcaagactagtttgtagaaaaataattcagctgtggttctcctagcttttgttaccagaatcaacttgatttctatgaaaacatacacaggtcttaaattgtaccctcctctgttgtcccattgctcacccacagcatccttcttattcaatctttctgtgagtacatgttaatacccaaagtttgattactgaacaggcatggacaacatctggcttatgtcctaatatgttcacctgttgttaaattacttgtcccgctgtgagctattcaacaaccactccaaactctggaacttctaattctcttgatggaccataaatatgcacagagaaggcaaaatacagctcatacctaaaaccatacacttcagaaaagttgtcttcttcacctttgatcaatgatatatattccttagggttctgcaagtgcatgccagcacagtagatctaaagggaaaaggcaaagatctggaaaagcttgtttcaaagtcaatggtcaatgttaaaatcaaataagaaatgtttatataatacctttgttattcttcctttaatgttaaggtaatagtcaccatccttggtaatattgtttttcacttgtatttctttacagctggtaaaagttttaccttcaaggacaagtgagtacaacttatcaacaatgaacatattacagacacaacatgaatttaacttaattatatcaatattgttatactctgaaaaaagaaaccttcattttgtggagtgtatgactactctaaatatttttttaaaattttagttaaaacttctttagagcacttagtttctaaatagatttttgaagtctttacttacagtcactgacataacatttcttttgagcatctggttttaaatgctttaaacataaatcactggacagaccactatcagccatgcattccactcttctctccatcatcccaactccacaagtcacagagcactgtaaatagagtaaaattggaagatgaactaataagacagataataaggccagtaaatacacatctcctcctccctgactaggtccttttggaacaaactgatgcttcagcctcccaggaggctgaagagtcacaggtgggataaatccttaagagactgaatctattctttctcagttactgacttcttccccttcattttgtatagttatctcagcagtatgttgtaaatacttgataaatatgatttaatgatggtcattaaaactcctgagtttttactcagtgatacatgttaagttttcatagcaatatttacctgctttttatcaattaaattatacagtggaagtgagaaatagatttaagggactagatctgatagatagagtgcctgatgaactatggacaaaggttcatgacattatacaggagacagggatcaagaccatcctcatggaaaagaaatgcaaagaagcaaaatggctatctggagaggccttacaaatagctgtgaaaggaagagaagtgaaagcaaaggagaaaaggaaagatataagcatctgaatgcagagttccaaagaagagcaaggagagataagaaagccttcctcagctatcaatgcagagaaatagaggaaaacaacagaatgggaaaaactagagatctcttcaagaaaactagggataccaagggaacatttcatgcaaagatgggctcgataaaggacagaaatggtatggacctaacaggagcagaagatattaagaggtgacaagaataaacagaagaattgtacaaaaagatcttcacgacccagataataatgacggtgtgatcactcacctagagccagacatcctggaatgtgaagtcaagtgagacttagaaagcatcactatgaacaaagctagtggaggtgatagaattccagtggagctatttcaaatcctgaaagatgatgctgtgaaagtgctgccctcaatatgccagcaaatttggaaaactcagcagtggccacaggactggaaaaggtccattttcattccaatcccaaagaaaggcaatgccaaagaatgttcaaactaccacacaattgccctcatctcacacgctagtaaagtaatgctcaaaattctccaagccaggcttcagcaataccatgaacttccagatgttcaagctggttttagaaaaggcagaggaaccagaggtcaaattgccaacatccactggatcatgggaaaagcaagagagctccagaaaaacatctatttctgctttattgactatgccaaagccttcgactgtgtggatcacaagaaactgtggaaaatcctgagagagatgggcataccagaccacctgacctgcctcttgagaaacctatatgcaggtcaggaagcaacagttagaactcaacttggaacaacagactggttccaaataggaaaaggattacgtcaaggctgtatattgtcaccctgtttatttaacttatatgcagagtacatcataagaaacactgggctggaagaagcacaagctggaatcaagattgccgggagaaatctcaataacctcagatatgcagatgataccactcttatggcagaaagtgaagaggaactaaaaagtctcttgttgaaagtgaaagaggagagtgaaaaagttggcttaaagctcaacattcagaatactaagatcatggcatctggtcccatcacttcatgggaaatagatggggaaacagaggaaacagtgtcagactttattttgggggctccagaatcactgcagatggtgactgcagccatgaaattaaaagacgcttactccttggaagaaaagttatgaccaacctagatagcatattataaagcagagacattactttgccaacaaaggtccgtctagccaaggctaaggtttttccagtggtcatgtgagagttggactataaagaaagctgagcaccaaagaattgatgcttttgaactgtggtgttggagaagacttttgagagtccgttggactattaggagatccaaccagtccatcctaaaggagatcagtcttgggtgttcattggaaggatttatgctgtcgctgaaactccaatactttggccacctcatgcgaagaactgactcattggaaaaaaccctgatgctgggagggattgggggcaagaggagaaggggacgacagaggatgagatggctggatggcatcactgactcaatggacatgattttgagtaaactctcggagttggtaatagacagggaggcctggcgtgctgcgattcatggggtcgcaaagagtcggacacgactgagtgactgaactgaactgaacatgttaagtttgcatagcaatatttacctgtttctgtcaattaaattggaaatggaacagggtacaaataacctatattactcatatgttcaattcatttactttttcactgaattaaaaaatattgcttaagtatctgctcaaaatgcaagccactgtgccaggctctcttaggaacagacacaaggattagttataaagcaagttataggaaacatagagactagatatttgtacaaataactgacatagtgattgttagaaaattagggtatgatacaactctgatatctagattgatgtgcagattaccatgcaccccacagctagaaaatctcattcataagattttaaattcataattaaatactgaccttgctccattttccaactttccaagtggccatatgcaaacaggtcctaaaattgcatttgtaaacctgaggagaaggcagcacagggcatactcgatagtctataggccacagctcatgaagtttatgtttctccgtagattggaccccaacgcaatatgtaatcctttgttgataactaaatccacagttacctgcacactgaaaaatacagtgttacaaggggtgaagaagatgcccttaaacttaagggttcacagcttagggtttccccacacaatcccatttattagcctcatttacagatgggtaaacaaaggttcagagacattaggcaactttcccagtaaatggaaaggatccagattcaggactgactgtctatttgtagtgcctatgttttttgctcgtttgggttctttttttctttgcttatttttcttgttgatatttaagaatagcttaactgaatgaaaagttatctcctgataagcacagatctggaaaaatgaaacatcaatggttcttaactgaaataaaggacatttattagtcttaacatacttgtaattctatataaatttagcatacatctatcttcatacacacaatgttatgtatattaccattgcctagaataggtaagtgatttagatataaatgaaagatccagagcaaaaatgggcaaatagatttctgactccagaaaaaaagaataacaaggaatagagttaccttctaacctaaaacaacagaaacacctggacaaaatatataaaacaatagctcttaagacactggatattaggcaataaaggatagtgatccctgggagatggaaacaaagtgaccctgtaattcctccagcttactgcattgagagagtgcccaggttttggaaaaaggaaagggaccccaatgggacagcagagttgactagtgaaaacatgtgaggacaccaactgagaccaaggtcggactgatcaaaaactcatgaatcactgtatctggcacgcacacaggaccagatacagtgtcagttcccttcattcagactgtaaaaccttatatacatgcagcaataggtactgtattcaaaagggtcttgtggcacagtagaggggaatagctaaccctagactaaacaatgcactgtgcaagcatgctaagtcacttcaggcttgtctgactctttgtgaccccatggacttaacccgccaggttcctctgtccatgggattctccaggcaagaatactggagtggtttgtcatggcctcctccaggggatcttcctgacccagggatcaaacctaggtctcccgcattgcaggcagattctttaccacctgagccaccagggaaggcctaaacaatgctttgggatttttttaatgtaagaccagagtcataacacacctgtctcatattaaaaaactgtaagagctagacaagaaaagtgcaaactgcttacaaacaaaataactacattctggaacaaagttcaaaatatacatacagatacaagaataaaaactatccagtagccaacaataaaaatcaaagttcacaataaaaaataactagcatgcaaagtgaagtcgctcagtcgtgtccgactctttgcgaccccatagactgtagcttaccaggctcctctgtccatgggattttccaggcaatagtcctggagtggattgccatttccttctccagggaaagagacaggaaaatataaactacgatgagaaaaatccatctatcaaagaagaccctgaggggtgagtgacatcagtgaaagtagcagagcaacgatgtctgaaaatgttctcttctataaacgcagtgagaaaaccggcaacacgtgaaaatcaactttttccgagctctgtaaactaaccaaaggcttgctacaatcctggaagcatttattaacgaaataaagctaaatcttggaagaagagttttgtatgttttatgggctctatttccattccccctcttcagccctgttgtggccttgaaaatcaatacctctgcaaacatggtgaagaacaaaagcctgaagccaccagaggaactgaaatgtctaagcctcatttccagaaaactatcattatttgaactgtttggtgctttcctgaaagacctcccttgcaagtctctctttatctgactttactcggcacttgcccagtgctaaaagccttctccttgggggcatttttggacacaattaaaggctatgtttaactttgcaacttccacaggaggtggataagcaggcaatcaatgggcaacccaaaaaagcttaaaaggaaaagtttggaaaagaaatgtccacagggctttaaaggctccgacagagtcataaacaactaggaggccatggacatccacaagtttatccagggctgtggcaaacttaggaaataactgagacgtgcctacactctcactcctgactgatgtcatggttctgcataagcaggaagtaaagttaaggaacagttgtctgttgaaggtgctcacacattacacagagccccttggcaaagactggagattaatggttccaaataactcagaaaataattatccagtcataagtttagaactaaactaatcacatagagactttaatgaccacatgtgacaaagaaaacagactttacagctagttcagaaaagtcaataacaacaacaaacagtagtaaacaaactatggggagatgggagaacatgtatagaaatccatgtagacccctaaacaagtaaataggttgaattaataatcagaaaatttcacacaatcaaaaatccaggactagaggcttcattggtgaattgccccaaatgtttagagaagaattagcaccaacccttccaaaacacttccaaaacacagaatagaaaagaacacttcctaatgagcccagtatttccctcatgccaaaactagatgaagacatatcaagggaaaaatactacagaccaatatcccttatgaatatagatgcaaaaatgctcaacaaaacactaacaaaacaatcccagaagcaaataaaaaggattgtacatcaagacaaagtgagatttatcccaggaatgtaagattgtttcaatatatgaaaatcaatcagtaaactacatcataggaagagactcatatacaaagaccatgtaagtatctcaatagatgcagaaaaagcatttaacaaaatctaacacatttttatgatataaacactaagcaaactaggtatataaggacatgataacagaatctacaaaaaaattcatagctaacatatttaattatgaaaattgaaagaaaattttcctccaaagaggaaggtgtctgtttttaccacttctactcaacagatttggagtttctagccagggaaactaggtaagaaaagaagtaaaaagcatccatatttaaaggaaaaagtaaaactacctgaatttgcaaatgatatacttctgcatatagaaaagtaatctataccaaaaaacaaaaaaagaactggccttcaaaaatgtgttttaacatacaaaaattaattatatttctgcacattataaatggataagcagaaaatgaagagtacaattccattttcagaagcataaaaaattaataaaattcttaggaacaaaattaaccacagaagtgtaaggtctgcacaatgaaaattataaactttaaaacatccttgaaaaaaattaagtcctaaataaatggaaaggtcatgttcatggattagaagacacagttaagatggtaatattcctcaacttgataatgagtcagtgatgctgaagtgtacatacaatgtgacaaggtcatcctaaatttacataggaatgtaagggacacagcataagcaaataatcttgaaaaagaaaagcaaaatttgttccctccagttcctgatttcaaaacttaccataaaactaccttactataaaatcatgattatgtggaaccaatataaggacagacacataagtcaggtaactgagttgagagttcagaaataactcttgaataacagataattcaatgcagaaagaataatttttccaaaaattgtgttgaaacatctggatagccacatgcaaaaggataaagttggatcccactttacatcatatacaaaaatataatacaaagtggatcacagacctaaatgtaacagccaaagttataaaattcttagaagaaaatataagctttgtaaccttattttcttagataagatacctaaagtataagtgaacaaaaatgaatatgacttcatcaaattaaatacatttgcatgtaaaaagatactaaggaaatgaaaacacaggatgaaaatttacaactgacatcacagaaatacaagtatcataaaagattattgcaaacaattatataccaactaattagacaacctagaagacatggatggataaatggataaatttctagaaatgtacagtctcccaaaactgaaccaggaaaacacaaaatatatgaacagactgattaccagtaatgcaattatatcagtagtaaagcaactcttaaaaaacaacaatccaggaccagactgcttcacaggtaaatcctatcaaacatttagagaaaagttaacatctatctattcaaaatatcccccaaaattgatgaagggacactttccaattcattctacaaggccagcattaccttgataccaaaacttacaaaaactagacaaataatcacacacacacatacatacacacaaatacagatcaatatcactgatgaacacagatgtaaaaatcctcaacaaaatattagcaaaccaaattcaagtggagtttagtccagggatacaaggctgtttcaatatccactagtcaacattcatgatacaccacattaagaaaatgaaggataaaaatcatatgattatcttaatagtacaggcaacatacctaaatatattaataataaaagttatatatgataaacccataactaacatcacacttaatgatgaaaagttgaaaacttttcctctaagaatgggaacaagtcaagaatccccactcatcacttttattcaacatagttttagaagttataaccatagtggtcagaaaaaaaaaaaaagacaaaaggcactcaaattggaaaggaagaagtaaaattttcaccatttgcagaggacaagatattatatatagaaaactctgaagacgtcaccaaaaaaggtattagaactaataaataaattcagtaaagttgtggaatacaaaataaatgtacagaaatctattgcatttctatacattaataatggactgtcataaagagaaaaacaattttagttccatttatgctgctaagtcacttcagtcatgtccaactctgtgcgaccccatagacggcagcccaccaggctcccccgtccctgggattcttgccatttccttctccaatgcttgaaagtgaaaagtgaaagtgaagtcgctcagttgtgtctgactctccgcgaccccatggactgcagcctaccaggctcctccgtccatgggattttccaggcaagagtactggagtggggtgccattgccttctccgacacatatgctacttctacccatttcccttattttctacagaaccagtctaattgtaaaacagtattatacttaagagaccctccaattggctaccaacaccatcctccaatggataccgtgaccatgcagtatcacataggaagaccaggtgtgtcttctttaagtcctggggatcaaatctatcccagtttttcaggatacagttcaaaggagtgaggctggaattgttagctcccgtcttgtccttaagaatcttggacaagcccccaagatgaaggttgttgctgaaccccacaaagacgccgggattcttggcctccagaggagaagaattcaattaggggccagagacgaggcttgatcactcagagtttttgtgtaataaagttctattaaagtataaaggagatagagaaaacttttgacataggcatcagaagggggcagaaagagtacctattccatttatagcctcctttaaaagaataaaatatctaggactacgtttaaccagtaaagtgaaagacttgtactttgcaaactataaaacactggtgaaataagcagaataagacacatataaacagaaagatataacaggtgcatttggactggaagaactaatatgttaaagtgtccatactacacaaagccatctacagatgtaatgcaatccctgtcaaaatatcagtggaatttttcacagaagtagaacacagaatcctaaaatttgaattgaatcattaaatgcctggaatagctatagcaatcttgaggaaaaaaaaaagttggaggtaccaaactctgctttcaaactatattataaagctatagtaatcaaaactctatgatactgacataaaaacagacacatacatgaatggtacagaacagaaagcccccagataaatttatgcttatgtgatcaatcaaacaacaaaaaagctaagaatatacaatggagaatagacagtcttatcaataaatggcattggggaaactggacagctacatgcaaaagaatgaaactggacaactttcttacaacttatacaaaaataaacttaaaatgactagagatttaaatatagtgcctgaaactataaaactcccagaagaaaaaataggtaatatattctttcacaccaggcttagcagtgttttttctttttttttttgtatacatctccttaagcaagggtaacaaaagcaaaagcaaacaaatgggtcctcagcacattaaaaatcttttacatagctaaggaaactatcaacaacatgaaaaggcaccctactgaatgggacaatatatttgcaaaagtgcacctgataagaaaataaataagcttacacaactcagtatcataaaaataaataaaagcaaacagtccaggtaaaaaatgggcagagactctgaatagacacttttccaaggaagacttacagatggccaacagatacatgaaaaaatgttcagcattattaatcatcaaggaaattcaaatcaaaaccatgatatcacctcatacttgtcagaatggctataaacagaaagatttaaaaaaaacaagtgttggcaaggatgtggaaaaaaggtaacccccatgcacttctggtggagatataaattggtacattcactgtggaaaatattatagcgtttcctcaaacaattgtaagtagaattaccatatgattcactaactcaaaacaatatatgcaccccaatattcacagcaccattaattacaacacccaagatatgatagcaatctaagtttccataaataaataaataaagtatatacttcatatatacaccttaaacttgtacagtgctgtgggtcaattatacctaaataaaactgaagaaaaaaattttttttaagcagccaactatgcaggcccagatgccaaactgttcctggtagttggtttcacagttgtcaccgcttgacacttcagaaatgcaccagaatttaacatgcatgtcactattcctgtatttgcaccatctatcccagtgcttttattccttaggttaatatatacactattacccgctcccatgttcaaattcagacccagtttcaactgtatcaaatttgagactcaattttactttctaagagggaaaatcctcaacttcctttctttgccttacctgggatgagtctcctgttagcacgatatacttgcagggagagtttctgcactttttcaccgctagaggtctggtcgcgaggtcacagaaactctcactcacttgaatgttttgcgcatccatgcacttcacttgccgatatgtctctcttttcttacacgataccgagcactagaaacacaatgatgaaatgaaaacactctctcactgaacggctgtgtgaaagtttacctgacaatactcacatccaaccactctcctgccgcccagtggtactgtatgcagtcccgaggccaacactctctctgaaaataaggccgcgtggacggatcacacttttcttccgccacccgaccaactcctctgagtctgcagtacacatccctctgctgaactccggagccacaggtcacagagcactgtgaagaagcccaaacgatttgaataatcaactactgctgctgctgctgctaagtcgcttcagtcgtgtccgactctgtgcgaccccatagacggcagcccaccaggctcccccgtccctgggattctccaggcaagaacactggagtgggtggccatttccttctccaatgcatgaaagtgaaaagtcaaagtgaagtcgctcagtcgtgcctgactcttagcgaccgcatggactgcagcctaccaggctcctccgtccatgggattttccaggcaagagtactggagtggggtgccattgccttctccataatcaactaacaaatataaaattatgtaaaaatcacaaaatagagtcatgacctattttcttgtttcttttaacgtagcctggtattatatcacgaataagaaaatacatgcaggaagtatttttaacattgtctggtatggagcagctattcgaatacacaaatagatgttctttattttgcaatatttattcaagtcgtatagaaactatgatctgatactccatccgaattggtaattgtcttctgacttaaacatgcttaatatctacaaaatttgccacaacattcaatcaaactattctactattacattgcttttgaaaattatttaaatccttacactgtatgcataatttccctcaaagcaacaataatttccaagtttgggttcatctttatacctacagtaggtactatagcatgggtgtcctaatatttgttgactcatgattatatttcaacagagaggtgtttgaggaaactgtgtcagcttacagtttacctaggcaaccttgccttaacctctccaggtctcatttgccttatctgcaaaaagaagattttgcgttgtttgtaaaatttcatagaacttgttccacccatttattcctgacagtagatcttcaaaggaagtaccaagactgaggtcctgagtctcagagatgttaagtcttttgcctgagctgctgactggagtcactggtgaggcagatttaagctcacttctttccagactctccttgtgctgcctccagggaacagagaaggacttggcagcctctcagggctttttcagctccacaaggccaagccataaaacaacagaacctgaccacaaccaagagctgtgatgccaacagtaataaagtatggacaatgtctaagggtatttatttaatttgtgagcttggtttttatactctttgttattccagaagggattggaggtcatattgagtgttatgtggggccttatcattgttcccaactgtgatagtataaggataaaaattcaggtttttcattaaggtctttatttatacaagattcccagagtcactgatctctctttcctaacagtaaatatttatctgcagaatatagtttcatcatgaacttaaaaaaacttttaaagcccccaatgctaaaaaacttagttcacttgatagattcaaatttctctaatagattcttatagcagttttactctagaggtccctttaaattcagttttttgtgttgtgtctgtaaatagcaaccactgactcaaaagagaatttttatattattttttaacttacgaagaatattctgcatatctacgtagcttacttatacatgcatgctaagtcactttagttgtgtctgagtcttcatgatcccatggacgacagcccaccagactgatctgtccctccaggccctcctccaggggatcttcccaacccagggatcgaactcgtgtttcttatgtctcctgcattggtaggctggttctttaccactggcaccacctgggaagcccataagttacttatactaaccctcaattaatgcttttgcagttgaattttgccaacttgttgaatgttttttttaaaaaaaaaaaaaaaacatggctcctttgtatgcagataataatcacatattattttgtgtattttgtccagggtacaatattaagcaggcaaagatgttgggatgtggttttgcttatttgaacctctggtgaaaatgtttagcctataaaataaaactcctgcaaacattttccagcaataattacagaaatataaactatatttagaaaactttctacctctaaacctgaaaaaaaatattcctgaaaaagaaattcacaaaagacagcttagtaaaaagttttgtcagacaaatgtaatattctgttattcaataatccaagttgctgattgatcctgactgaccatagcacaggtttagaagactccactggggccacaagtaactactattgtggagctcatcctcaaaggaaacaaaccaacaaacaacaaaaaaaaagaaaaaagaaaaaactggactattggactactgcttgcttttcttttcttttcttttctttttttaagagaggagaatataaaagactaaactgatatatttcagatttgaacagagaagagaacccattgcttaagtgaaatatttcttagcttagtgtcatcaataaccctaactgccaagtccaacaaaaacttttcatgtcttttcttagttaatctcactgacacattcaacaccactaaccatgttctgctgagccattctggcttcagtcctctctggttccaggtacttttctctttgagtccttaattgactctattttctttgtttagcctttaaatgttagtgtttcccagggtttataacttgcttctctttatactttctgaggtctctctaagcaatttcttctatataccaataatttctaaatctgttctttccagctagaatagtaacccactccataattcttgtctggagaattcaattgacagaggagcctggagggctacagtctatgggaatgcaaagagttggatacagatgaacaactaactctacttttttacacttttttatatattgacaagattttcatgtgttttctacatagatttgtcaaagacatctcaaatccaacatttccaaaggagaacttatggccttttcccatcagctcctcttccagttgtaaatggtgtgaagatataacaactcactcttaactccagcaatgtattactattagaatgatctcccaaggtatacccctaactccaaaataggcaaccttattcaacagctttatagagccacatatttataagcacgttaaatgttgtctttctttaaaaatccaggtaactcatatgaaggcaatttgaggctattattacatgtatgacacaaataattgatttaaggcactaactcaccaccactgtataatttaattcagataggaaaagtctgccaaatttcctacttatgcataaatgtactacagcactacaactgtccaacacaagcctggacagtggaagtgtagaagataaattttagccaatccacaggtacaatagccatgttagctactacagaacagagatgaagaaatgttagaacatgctttgccaaaatgggttcattaatgctaattcactctgtcatttaataaacaatcatttaaaatgtaatagtaaactccttccttgatgcattatttataatttcctgttaatggaataagattttgattttattatagtcagttatttgtaagatttattatattattattatataattatataataatattatattattatttatattttatttcaagtgaatcagtattggagcagtagtagaggattttgagtttaaaaagactctggaaatatctaattccaatttctcttcaatactgaaatctattttacagcagtagtgaatgaatgaacatcaaatccatccagacttccatagcttcatatattcactatatcctaaaagcattctggttttggtttggctgactctgaagttcgcaaattctctcttatattgagctgaaatattcttctttaaacttttacccactgtttagaatctgtcctccctaccagcatagaacaaatacatactgacttccatgtgagtaagtatcaagatgtgaggcctggaactgtggcagctattttacgacctttagcagttgatcaacagaactacagaaatgacaatccagcacacttgccattgtagaactcctgaatctaacttaaatctagtgactttctgattttattgtgtaaagaataaatgtcttcgagttcaagccactaataatcagggcttttcctgcttgcaacagaatacaatggaacttatacagactagttacaattcaactgtgcttctctggggatttggtaatttgccaagacttttcttttagtgtaggtctcagaataggtactattccaaaaatctgagcagaatttattagtgcaaagatatgaacacttcgtctattaatgtaatctactcaagggtttccctggtggtgcagaggttaaaagcgtctgccttcaatgcgggagacctgggttcgatccctgggtcgggaagatcccctggagaaggaaatggcaacccactccagtattcttgcctggagaatcccatggatggaggagcttggtgacctatagtccacgggtcgcaaagagtcagacacgactgagtgacttcactttcactttctttcaatatgttgctagtgatttaatacatgatcaatagaaccttcaattatttacctatgatgtgtgacatccatatataccttaaattgatgcaacagacttttttatataaaaataagcccgtaatgaactcaacacaacatggaaattacatttctcttgaatgcattattatgtgtagcccagcgacattctgcaattgttgactttaggtgctttgtaagaggagcaataggttgctaaggaagtaaagtttgctaagaaaatataaagacaagctaatgtaaaaggataaaaataaaataattatggtagcaattacagtagggaaaactcagaccagtattcaaatgctcgcccctctccccatcacttcctgccagtgacctgcacaagctacttaaaccatttaagccttgtttcctcatatacataatgaataatcccgacaactgtgaggaatacagaagtctctcacacagtgttaggaggtcagtgacccttgctgcttcctgcctagtcccattttttcacttttcttacagagatacaattatccctgccttgaaaaatttctcaacacatgcctcaaaccaaagagtattagtcatctcagcccactcaaagacagactgtcctaagtatcaagaaagatgataaaggaagagatttcacaggcagcatacaaatgcaaaaacagaattgctggtactagctataaaagattgagaggcatattcatccattcccagagcaaagagacatcctccttcaccttgggctccaagctgtcttcccagaagaaacactcaacctgggtataaagataaggacccatgggagcttaaggttcactctctttgtagattataaaggatatatatgtgtacagtggaaatttttcaagtatgactatatacatatatgcgtgtatctgtgtgtgttggaaatatataaaatatggaactacagaaatacgaaatcacttaaacatgccagcatttagcagatagtttccaaaaaagttttttcctgatccgagggtttgggaaagggggcactaaccaatagatctgagatttttggaactcatatcacctttggttccagctctgatcttaaaatactagaaagaaaatgatgggtctctaagaaggggaaccaagtaagtgactgtagtcacaaggcttttgattcaatagcaaggcctgagattaggtcctttctaagctgttgagcaggtttcccttgatcaaggggaggggagaattctgaacaacttttttctgagcatgtaaactacattctgatggcactgaactaagcatgagacatgaggaatctaacaccagcctagccttaaaaacttgaatttataagtaaagctggtactctcaaatggataaaattaggtgaaaacataaataaaaaaatgtccagttccagaaagaaaaggatgagctcttttttttttttttttttttttaatgattctagtatttctgttacatcaatggcatacatctggacccaggagacaaagaactctatgcagttatgtttgttcctgtttggttgcagtcattaaaatgcattactaaatcctttcattaaaaacaatgatatcaaataccaactcagaagtgttaatttcaaaactcattgagcacctctgtggtcacaatttgccaaacaaatctttccattagaggtataatgtaaaatagtaataaaatgaaattattttctagtgagtgctattaaagcaatgttacaatttatgcagccagaacaaagtagcaaccagtaattatctcttaactacctctgaaattacgcttctgttaaatatattattatatgtagcacagcgacagcctgcgatccttaactccacgtgggtactttttatagaataaatcaaaaaccaacgacttcacaagtggtcatttgtttctggcagagttttgggttctgtgtgggtgtatgaagctaatttctataacaaggaaaaccaattcaaagagaagaaggttgactctgtacaaaagcatctgtgttttttatagtctttacatattcatatctgtatcttacaaactcctggaatatgttcctttagtgaatcttacataatttcagacttggtggcaagccaacactgagttgttagcaccagtgattgatttactattgtgggactggaggtcaagggtcaggaagagtccctcatgaatagcaaccacagcagctgcaaggcagcgaaagagtcctgggggtcaccagggctactggtggccaaaaggggagtctctcccactcccatcctccagcatctcccacctgacgtcagaactgaaaggtttctgccatgtgctgggtgcagggcctttggaacgtttacctctccagtggaaagctgctttgtcattacctgccacatcttggtccagaaaaaataaagcctacccctactttaagcaaaaccacaacatgacaaatgtataaattaacagatggcaggtcctttttatttttatttttttttgcaactgaattatagaattcaaagtaagaagtatgtagctccgtactaagctgggcacttagtgaacaagatatccattgtatctaagatttcgaggcctgtgataatgctgaagaagtaggcatggttagataagtggtaaagaatctgcctgccaatgcaagaaacacaggagacacaggctcaatccctggattgggaagatcccgaggaggaggaaatggcagcccaggccagtatttttgcccgaaaacacccatggagagaggagcctagtgggctacagtccatggggttgcaaggagtcggacacaactgagtacgcactcacaaagactttaaactaagtcatagaagaattaagacttcttccagagctcatactatatgtaagtaaataatgacaaaaatatacgttatgaagtcacctggaaacagatgatgatgaactggactggggtgattgccatggagactcaagagtgactctgatgggagaattgagagaagctagggctaggaaaccccatggacggaggaggctggtgggctgcagtccatgcggtcgcgaagagtcggacacgactgagcgacttccctttcacttttcactttcatgcgttggagaaggcaatggcaacccactccagtgttcttgcctggagaatcccagggacgggggagcctggtgggctgccgtctatggggtcgcacagggtcggacacgactgaagcaacgcagcagcagcagcagcagcagggaataactaactgtggggtcaagggaaacaggatagacccagtgtttctttcttgaacaacttagtgggtagtagtggcattcactaaatagaacagataatgtgaaatctttaaaatcatggtcccccaaaaaataaaaaataaaaaataaaatcatggtccctgctaaatcatgaaaaataatttcatttactgtgtgtgcgtgttcagtcacttcagtcgtgtccgattctttgcgaccccatggactgtagcccaccagactcctctatccttggattttccaggtaagaaaactggagtgggttgccatgccctcctccagggcaatcttcccaactcagggatcgaacccatgtctcttgagtctcctgcattgataggtggattcttttccagtagcaccacctgggaagctccaatctcaaggagtgaaggataaaatttaggggcccaggggaagcccacttccagctcctgtctgagcctctatcttccaaatgtggctcctacatcaggcaaagacaaggaagttccatcagcagaagatgggtttctttttcccatggcaggattagctcttttaagagatggatacataccctgagatacggcagcaagcagccaggtagctttgagaaagcttagccccactgacatcaagcctcaggaaattattctggttaacatttctggcctcatttatgtttttctcctctttactattacccacgctggcctttgctgaacaatcacattcaaatatatgcctttccaagtttagatttagagtttacctctctgagtgtgccaaagcaagtatccatcagccttcttctataacctgacattcttagccctgttctcttctcagtataagctttgcttttgctgagtctttcaaagtctgtccactctggccttagaccagccaggctcccttgttctgtcatgtccctaactcttaaaccatctccaattacgatccatgtggaacttaccagtcccttttccaagttgctgctactgctgctgctaagtcacttcagtcgtgtccgactctgtgcgaccccgtagaccttagctcaaatccaagacttcagtgtggtaacaaggcagttactaaatacctcaacatatgtattttactgttagaccacctggaataatgttataatcattggtagcctcccttgtattcagtaaccgaattttttgtaaagtttatagcctccagactaatcaagactaatttgttattaaactatgaacttagcaaatgtgttaacactgtataatatcaattcagaggatagcgtgaaaaaaaaatgtgtaatagaacaaaatacatttagtggcataaaagtttcaaggttattgaaagcatgcagaatgaattaagattttctttttaaatgcaaacatacgtatataacgataaaacatcttacatacctccttccatctgttggctttccatgaagggcatcggacagacctacaagctttatgtgtccgaggtttctgtagatgactgcaatatttctcttctaattccctgtggaactggtcaatgcaaagcacctcacggtattttaaacctttaccacaggaagctgagcactggaagataaatatgaatacacttgattcattttaccttgactgatttatctataagaagcaggaaatgaaacaatcaaaacatcattgctttgatattttcatcaaattatactttgatatttctaaggagagaatttaaattttgccagtctaccctagaccataaatcaatgttggtatcataaggtaaccatgtattttataaaaagaattggttatcttccatacaccaagcactcttctggcacatacatgctttagctcctttaaggttaaagactatctgcaactaactactgttaccacacatattctaataaaaaacttgctttcaattctgtacggtcatgtcctactctatttttaaccctatatgtcttgccacagtgcaaactatgctttgaatgttaaaaaaaaatctcaatgtaggaaaatatgagagagcagaaaattgttttcaatacattaattcatttggcagcattgagtctctttcattgcagtgcacagactctagttacagcacacgactctccagttatggcaagagggcttagttgtttcatagcaggtggatcttagttccacgaccagggattgaacctacacctgctgcatcggaaggcagattcttaaccaccggaccaccagggaaatcctccaaatttattttttttaagcatgattcagttgaggttttttttaaatcagtctggcaatggtatcattccaacacaaaccctccaaactattcagcagaaaacttaactaaaatctctgtaaagacacaggttaaaaataatttggcttcagttttcaacaagttaccatttaatgagtgaagtcagtgcagaggagaagagctggagctctggcgttaaataccagctcttccacttactagctgggtgatgttagggatatttcaccccttgtccaagcctcggtttcttcattataaagatgataatttcaccatattactggtttattatgaagattaacatgagataaagcatatggaatgtctggtcctgttgcacatggtgcatcctcagtgaatattagcttctcctaccattttccttcataaactctcaggatgttgataattctcagcatcatatatgcaccagggaagagttaagctaagaagacatggattccagataactcctgtcattcttctgggatagctggtcacatatggtttcatttagaaacatatactgagttctgagaacattagataatatattatgcattttatgtatgagttcaaagactatatctaatagagactataaattgcctaaatattttaaattaaacaatgaatagtttgagggtaatttacctttattagatttgcaatgctatatcccatttgaataggcaattaattgaacttgttgccttgattattaagacttattaccatatctgagatgttctctttcccttaacacctacacccttacatgtgacttaaaacatatttaattctgtgtgaattgctaatggatcttcatcaattgtattgtgttcattctttcttgctattgatcttctctttcagatctacctttctttatgacatacttctcctagctgtttatcttaggcacttccctgcctgcttctttacttcagcatttattttttcaaagaatattacatattttatactttagtataaagcatactaaacttttaaaaatcacatactgttgaataccaggcatatattatcagagagtatccatacatattcacacacagaagaacgcttttaccagcaaggacctactgcatagtacagagaactgtactcaaaattctgtattaacctataatggaaaagaatctgaaaaataatagatatacatgtatatataactgaatcactgtgctttacacctgaaacaaacacagcgttgtaaatcaactatacttcaattaaaaatatattaagctgcattttaaaacacacacacacacagacacacaaagagtttttcttctcaggttcatattattttttctaacttttcgattgtgaccttttgaacaaaagagcattcattactctccctgaatgttcgttttaaacagtaatcatttgtgaatattcatgatatgaatgcagcaatacttatggaagattggaaaacatttattattttactctttctgtgaatattatcatgtttctataatatactaaaagtagcatataaatatagattcattaaacaactctttcctttgatttatcctcaaagtgcttataatccagatgacacatatcacctattaaatgaataaatgccagagtacgtcttaaataatattactcaataaagatcagaataaaaatacaacacagtaaaaaaaaccattaaaataatacaataaaatttatgattaagacaatcatgaaaaatagccatttctttatgggatatttggtaaatactcagaaagacgtgatatttaaactcagtcttgaagatgtaggtttgttgatggacaaaggtggatggtcttatatatttttttgatgtgtcttatctagatattacccttttgtctctgtttgtcagcattctcatagttcttttatcagtgccaagaatccaagaatctcaaagtaaacatgcaataaattgatatttcttataagaatgatcaattcacttacaaaactatgtaacgcaagaggagacattaagccaaagatattactttagaattaacaatacattttctctataagcaacatgtttgtacggaatgtaaactgtgacactatagttcactactgaagtgaaactggcttctcctcacctaactcaaagcctcctttgattctttctcttctttgttattctagtctgtaaccaagactatccttaaccataattttaagcatactgctttttttctttgctcaacaactgacaatgcatccttattgtctttggtagtaaaccaaacttacaccttctttgctttcttgatccacgaaatttcagtcaacatccctttccaacctcgtattctgtttctattcaacacacaacctttgctctaattaggcataatatgattactttccctttaaggtgacatcttcactcacagcaatgcctgactggtattctttccttttacctggactactcactcgccctggcatttctaaatagtatttatccttaaagcttaaagtcaactccatggacacatatcatccacttctctgaactcttctgtctcactctgcttctagcatttcatcattttctatttttgtctcatcctttatctacccaaagttctagaggtcaaggaccttttagatcacccaggtgacccacaactggtaggttcaataaatatcagctgattaattgatgttgatcctgggtgcaagcagttctaatttgtttttattaaactctaaaataatttattaaaacagcttatgaaatatattcattggtattaaactcaaggtcctctaggaaagatagacaaaaaatataaaatcaaagaattgctaagtaaattatgcttcaataacacttttaaagaactttttccccaagatctgaataaatatatcattttgtcatgtctgatgaatttcatgtggggatttaagtaagagaatatgttatgcaaagagtcatgttttagttggaatgaggcagtcacagtgtaaataagtagtgaaatattactttccttctctcaaaccacaaaacattctgagttgtaaagattctaaaaaatagtttatttggtagaaagactcaacttcgctgttcttttctctgggatcccagtaattcttttcattgcttttctctattttatgtccctgatacaattttatctccttgaagatatattaacactgtataactcatttccagcatgcttctcagattttttctttaaaaatcacctcgacacctttgacagacaatcttctgagatttttccacaaatactgtagaggagtagttacaggaagtggtgacattaaatacaagtaacctgaattgactattcttataaattaggtgaagacatgtgcctatttaaggaaaacagagcatttgaaacaaatgtagaatttgcaagccctaaaaatgcaatgaaatacccagaattgtgcaggctggatggcacattcaatcccaaaatggacagttggaattaatgagtccattctcacatgtttaactttggaacaagtctagtttttcaagtgaagttgtatataactacagaataagattctttctgatattataaatgtgggctattgctctgtttgtttacatataagaatactatagaagaataaatagacaatttgtgagaaacttgttgattaattctacgaacttaaattgcaagacaaaataaaataaggaaatgaagtttatctagctccagttctaggaaattggaaaccatgggtgtgcgtgtgggtgtgggtgtgggtgtctgcgcgtgcacaagcgcgcattgcactttcataaattttaacggtgatctaggtctctatcatctctgaaagtactgggaaatatactgatactgggttaattagtttgtatcctaattagaaaaaaaaatagccctgaaaagtaactattacactgtacattagccatgtgtaaattgccttttattgacaacaaactgggtgactttaggtaatttttaaaatctcattcaacccctatttttcatatgtaatattagtaaaagaataactatttcatataaatgtctgggtaaaggtaaggaatagaggaggaaatggcaacgcacttcattattcctgcaaagtttcacagaggagcctggcaggctacatggaacccatggggtcacagagagccgaacacaactgagcatgtgtcatgacatggcacagaggtgaggagaaagggattttttaaacaagagaaatgaccaaactcagaaaactctaaagaacttataaagctatagcaaaatgtaaaaaataaaattaataaagaatcctgcaaaatacaatgttgattacatgcaggacaaccttgaaaatgtctctcataatgtaaaagagaatgggaagatgacataaagaatatcattatctgaaaaatgctttgctcatccccatccctttgtacatgtcatttcctccaatcctaacacctttcttccattgcatccctgcaaatttttcaatgctaaattttaaattaccttccctccctcctttcctgatatcagagcccagactagattaggtgtggctcttacacagcatttatacctcaatactcagttacctgttgcatgtctcatttacctgctagactataaaatgctcctggaacagacctactgtaggaaatcacgaaaaatggaaagaacccagaatcactcatttttaattaaatgtgttatgaactattcttcgtctcagaggaggaagtaattcctgtgtaccatgaaccatcagttcagttcagtcgctcagtcgtgtccgactctttgcgacccatgaaccataggtcttctaaaataatagctatttcactggtggtacatgagttgatttagatgatatcttttaaatttaatgcttattttacatagcaatggtcaccctcaattttagctaagaagtagatttaaaaaaagaacgcaaagtttggcctactgaataacaagtgaaatcaaaggttaagtgtaagaattgattaccaattattttaattaagttcgactagaaggagcctggcggactacaggccatggggttgtcaatagtcagacaagacggagtcactgacataccatttataaatacatttagaaaagtatctagactagaaatttgactagaaatgtttatttcaatgctcctgcatagtgttctctatgaacaaaggaatatatttttgtttctaggttccttatgtaaattttagctaaacaactctaagggtaagtattaaaactaacatttgattcttaattttagaaaatcattattataaatacctaatattagaaaagagctctaacatcaactgcaagttctacattaaatatttttaatgactatcaggataagcaaccaatcagtaaaagtacagattttaaagaaaaactcaaccattcatatagattcttggtttttcatttaaaatttctaaattaatttgatatatagcctaaataatttccagttttctaaatggacttcagtcagtaaatttggtgatgaccccatttttaaagtgagcagagttagtcattaatggtcaattcatcataactagaagtatcttgtaacaataaaattacagcttccttaacattctcttcaattgctgataaggaaaatattaaactattatcaaaatttgacagtgctattgtaaacattttattcaatattacactttttcacaaaccatttcagggatggttaaagttataccatttggtttttcagctatcagaaataccttcactttcgttttacaaaaaatgatgttatacaaaaatgattaacaagaaaatataaaactgaatataataagttgaaagtgaaagtgttagtcacttagtcatgtctgactcttcgcgaccacatggactgtagttagccaggctcctctgtctatgacattctccaggcaagaatactggagtaggtagcctttcccttctctgagggatatccccaatccaggaattgaacccaggtctcccacattgcaggcagattctttatcatctgagtcacaagggaaactatattaatcaatttatctttgcttttcaaaatttttggatttttctgattggtttttgaaactaattcttaagtcattaggtaatctgatgaagaaacaattttttactttatttctagatattgcatcatctctttgtttcatatatagcaaggttcacagtcattagttgcaaaagtaaaagctcacaactggatgactggatgtcatgtctacctgattgcttatggtatggcagatattagctaacttcttcagacaaccaagaaaaatctgctaccaagtgacaaaggggttcagcagagtctgttttgggagacctaaactcatagaaatgccatcattcaatacaacttcttactacaaacccaaagtcctttccatcaagacaagtgcaactgaatgagaagcatcaatttacaagcaataaaatggagtgatgtagatttaaacacagacatatcatagtagctaaaacataattgggtatttgaaaagtctttcttgaaacaatttgagaggattcattgtgtttttcttagtccttgtggcaactccaaaagtattaatgtgatttctctgtaggaatatgtattatttatctttgttttgtactaaacaaaactaaactatcatatacttctgttcagttcagtctctcagtcgtgtccagctctttgtgaccccatgaattgcagcacgccaggcctccctgtccatcaccaactcccagagttcatccaaactcacgtccatggagtcggttatgcaatccagccatctcatcctctgtcgtccccttctcctcctgcccccaatccctcccagcatcagagtcttttccaatgagtcaactctttgcatgaggtggccaaagtactggagtttcagctttagcatcattccttccaaagaccacccaggactggtctcctttagaatggactggttggatctccttgcagtgcaagggactctcaagagtcctctccaacaccacagttcaaaagcatcaattctttggtgctcagctttcttcacagtccaattctcacatccatacatgaccactggaaaaaccatagccttgactagatggacctttgttggcaaagtaatatctctgcttttcaatatgctatcttggttggtcataactttcctcccaaggagtaagcatcttttaatttcatggctgcagtcaccatctgcagtgattttggagcccccgaaaataaagtctgacactgtttccactgtttctccatctatttcccattaagtgttgggaccagatgccatgattttcattttctgaatattgagctttaagccagcttttccactctcctctttcactttcatcaagaggcttttgagttcctcttcactttctgccataagggtggtgtcatctgcatatctgaggttattgagatttctcccggcaatcttgattccagcttgtgcttcttccagcccagtgtttcttatgatgtactctgcatataagttaaataagcagggtgacaacatacagccttgacgtactccttttcctatttggaaccagtctgttgttccatgtccagttctaacttgcttcctgacctgcatataggtttctcaagaggcaggtcaggtggtctggtattcccatctctttcagcattttccacagtttattgtgatccacacagtcaaaggctttggcatagtcaataaagcagaaatagatgtttttctggagctctcttgctttttccatgatccagtggatgttggcaatttgatctctggttcctctgccttttctaaaaccagcttgaacatctggaagttcacgattcacgtattgctgaagtctggcttggagaattttgagcattactttaccagattgtgagatgagtgcaattgtgcagtagtttgagcattctttggcattgcctttctttgggattgcaatgaaaatggaccttttccagtcctgtggccactgctgagttttccaaatttgctggcatattgagggcagcactttcacagcatcatctttctggatttgaaatagctcaactggaattccatcatctccactagctttattcatagtgatgcttcctaaggcccacttgacttcacattccaggtgtctggctctaggtgagtgattacttctgtagcaaagctaaatttaaaatttttttcatgcgatatttttgatcattatttttctagagaattttttagaatgacattttggtgatcatgttaaatgtctttgtaacactaatgaaacaaaagatttgtctatgaaatgacatattacaaaggtaaataatagagcttcaggtcaaacagaccagaaattagatatcctgttgagtatatatgttccattttttttctttctgatttttaagaatagagaagctaaacaaacaaacaaaaacaggccaaacctaaacccaggagcagcatggtttttgaaatttcaggaagccaatgataactatccactaagagaaaagccccactacagaaaaactgtgggcttccaaggtggcactagaggtaaaaaaacaacactgctgccaatgcaggagacacaagagatatggatctgatccctgtggcaggaagatcccctagaggagggcatggcagtgcattccaccattcctgcccggagaatcccgtggacagaggagcctggtgggctacagtctatagtttcacacagaatgggacacaactgaagcaacttagcactcatgcatgcatagaaaaactttagatatgaattttgtacaactactttgtaattaagagcattccctacaatggtagaatactatttaaaatagagctcctaaattattagagaagtaaaacattaacatagcaagaaacagccaaagtataatagagtatctctgtgtttaaacagaagcacacacacacaaaagtcaaaatatgcatattaaatgtagtgtcaactctataaaatagtactgctactgttcctttaattcgatgcatatgtgcagtaaggagtaagatactaaatctatcaacagggaccccattcacagtatttcctgaaagattatacttagagttttaaagtttaatggagtctgaaaatttcccttgtaacctgttacagacaccctttgactgtgtagctttaacaacccaagacagcatttggtttctaaaacatgtactactgaaatatttcattcagttgtactgcatctgattatatttaaaatttgtaaattcagacatctaaaatatttcaagtcaggtttatttgcaaagatgtttgagtttcaacttaaaggacaaagaaacatatgctaataacaaacatatccaataaattttcactacatttatatcatcataaaattagaacattttaattcctatttcatgttctaaaattttatttttgagtatctatgtatatatttgtgtacacacacaaaatacatttacagttcaaagctaatcaatgcaacatgattatctcatgcataattcatttggctaattcaattgtaagtaatgtttaaagatatttactataatatggaaaagttttgtgattatttttttaatgtaaaacccaaagaaaaattgcattaactcaagcaactactttatacagaaattttcacttattatacattttccacacacaaatattagaaaatcagaatgaaaaatcatcccagtaaatgataactaaaatattcaataattggattccttttcttcagcaataagacttgacaaacagtcattaaaaacccagaaacaaaagttactgaacttatgtttattgtgctagaagcaatagtaaagtaattctaattcaaaacataagcactatttgtagcaaaaaattgtcaagaaaaactgctattaatttaaaacttatagtttattgttttaatatagtttattgttttaactttctgtctaatagtatggtttgtgtgtattacaaagtagtaatgcacatttcagactcctctataaaatctgcttagcaagtggaacccacccaaagacttcctgttcagagattttattgactctctgagtaacacaaatctttacaattatatggccacaggactggaaatgatcagttttcattccaatccctgagaaaggcaatgccaaagactgctcaaactagcgcacaattgcacttatctcatacgctagtaatgcccaaaattctccaagccaggcttcaacagtacataaactatgaaattccacatgttcaagctgtatttagaaaaggcagaggaaccagagatcaaattgccaacatctgttggaacatcgaaaaagtaagagttccagaaagacatctatttctgctttattgactatgccaaagcctttgactgtgtgaatcacaataaactgtggaaaatctgagagagatgggaataccagagcacctgacctgcctcttgagaaatctgtatgcagatcaggaagcagaagttagaactggacatggaacaacagacttgttccaaatcaggaaaggagtatgtcaaggctgtatactgtcaccctgcttatttaacttatacgcagagtacatcataagaaatgctcggctggaagaagcacaagctggaatcaagattgctgggagaaatatcaataacatcagatatgcagatgacaccacccttatggcagaaagcgaagaagaactcaagagcgtcttgataaaagtgaaagaggagagtgaaaaagttggcttaaagctcaacattcagaaaactaagattatggcatccagtcccattatgtcatggcaaatagatgaggaacagtagcagagactttattctgggggctccaaaatcactgtagatggtgactgcagccatggaaacaacctagatgtccattagcagatgaatggataagaaaactgtggtacatatacacaatggggtattactcagccgttaaaaagaatacatttgaatcagttctaatgaggtggatgaagctggagcctcttatacagagtgaagtaagccagaaagaaaaacaccaatacagtatactaacacatatatatggaatttagaaagatggcaatgatgaccctgtatgcaggacagcaaaaaagacacagatgtgtatagcggacttttggactcagagggagagggagagggtgagatgatttgggagaatggcattgaaacatgtataatatcatgtaagaatcgaattgccagtctatggccgatgcaggatacggcacgcttggggctggtacacggggatgacccagagagatgctgtggggaggggggtgggcggggggttcatgtttgggaacgcatgtacacccatggtggattcatgtcaatgtatggcaaaaccaatacagaattgtaaagtaaaataaaaaataaaaaatgaaaaaaaaaaaagacacttactgtttggcagaaaagctatgaccaacctagacagaatattaaaaagcagagacattactttgccaacaaaggttcatctagttttgccagtagtaatgtatggatgtgacagttggcctataaagaaagctgagagctgaagaatggatgcttttgaactgtagtgttgactcttgagagtccattggacggcaagggattccaacctgtcaatcctaaaggaaatcagtactgaatattcactggaaggattgatgctgaagctgaaactccaatactttggccacctcgtttgaagaactgactcattggaaaagaccctgatgctgggaaagattgaagaaaggaatagaaggggacaacagatgatgagatggttggatggcatcaccgattcaacggacatgagtttgagtaaactccgaaagttggtgatggacagggaggcctggcgtgctgcagtacatggggtcacaaatagtcagacaataccgagtgactgaactgactgaactgagggaaaaaatgttattttcaatacgagactagtataaatcttgtctaattttaacaatttgttacgggccattattgtgcttttactttttcttgatgtttttatataaatgacaactgggatgttacttttgttagatggtatggcacattccatgatgcaaacccactcctattttattcccagggagcttattcagaaccatgagcatctgctttccttaatggaacaaagcagaaaactattcactgtgggtgggccataaaaagttaaggaaatcagaaaaataacggatacctttaaaaatacattgattttcaaggcattacttactatggtaacatttacaaaatccttaaaatcaagtgctaacaaaatagcaggatctaccatttcaagtttcttcaaatgtttttgcactagctgtgagagttaacagaagtcaagccaagaagtttgctttccaggagggttataagggtctgaaaaggaatatgtactgagaactctctgatgagaaataaaaaatgagctctatgaaggctttgataagggaaaactcaaggttgaaattaaaggaacaatatccagagcacctatttatgtctatttgtcatatgcaataaaacttgtgagagtgttatcgggattaattctgagtgattttaagctaatttttaaattaccttaatcagataaaagtaaattctttatgttaaaatttaaggttgggttttatagtttttactactgtgatgtggaaaatagaataataaaaaagacatatagattagaatcacagacctacacttgaacctcaactgtcagctgttgaacagccctgggctagatgcttaaccttgctggtcctcagttttctcatcataaagcagcaataacaacacctacacctcagggtggttgtgagattaaaggtgataatggatgaatgaatctaaaacagtgcttgacacaatactctaaagtcatattaaacttcttttcccctgtcttttttcctccttcccagatcctcaggaaatataaaataggtcatgaaaatacaatctatggtgtaggtttctctattaaacacttgaatggaacaggtgcactgttcaatgctcttacatttacaaatcattcatagctgagagaaggaggataaccactttcagtgaatttcaataagatcctatcttgtttttcctgcaaaaaaaaaaaaaactctgtttaccaagatactaaaaaacacatcagacatacctcaagttatttcagagtcgagagaaagaaaagaaaatagaacagaaggtgaatagacataaatccatagtcaaaaatccataatcaatttcagttaaaaatggtggagcgaccgtatgtattcatttcccctccctgatcaattttctttttcaacccacaatatcaaagtaaataaaatagaagatgcaagaagagaaaagactaatgtaaagtaagacaaccttgtaccagcaggaccagtgagtggctcagtacctggatgcaacaaggaaagctacaactcctccactcctccttaggcagtgagtgaaaaatcgctcaatcctatctgactctgcaaccccatggactatacagtccatggtattctccaagccaaaatactggagtgggtaacctttcccttctccaggggatctttccaactcagggatcgaaccaggtctcccgcattgcaggtggattctttaccagctgagccacaagggaagcccaggaatactggagtggggagcctagcccttcaccagcagatcttccgacccatgattcaaactggggtctcctacattgcaggtggattctttacaaactgagctatgagggtagattaggggtttattctacagagaagttaaatatgggagccccagagctgaggatgctggaggatgaacagggaattctgcacattgaattcttgacccttggtctctcgggggaatagtactcttgctcacaggcaaggcattccaggttccttctttgagaaacggagactccaagagaaaagatctaaaatactgacttacagggaaaatcaccaggcactaaactctatccaaatgcagttttatatcaagtctctatttcctcttaagtaagaatgagctgcagaggattatcaactttagaaaaaataaaaaacttccttaggaaaaccagaaaaccacttccattcttatcctaaaaaaaagggtccaaagggtaaagagtcaattaagagagactctcccctcaaaaaacagttattaacgagaggaagactagatgttatatggacaaaagaatagactagtatgaccccaaataatgagaaggcaagaaaaaacttaaaattaaacatgtaataacattaataactcaagagatggcttagacattgacaaagtttcccattaagtaaaaccaaatgatagagatagaacataagataataaaaacaaaagaactagaggatcaattcaaaaactctaatattcagtgagaaaaagttgaacaaaagaaaaacaaaggaaatagttgcatagatattaccaaagaaataataaaattgattttctcagcacaaatctccttaatgaaaaggcctatagaatgcatatggatttccctggtggctcagatgataaagaatccacctgcaatgtgggagacctgggttcaatccctgggtggggaagatccctagagaaaggaatggcaacccactccagtattcttgcctggaaaaatcccatggacagaggagcctggagagatacagtccatggggtcacagacagtcagacatgacggagtgactaagaacagcacatatcatagcatagaatgcctaacaaactaaattttaacacacacacactaagccacttcacacaatatcagaacaaggacaaggataccaaagtttcaatggcataggcacaaagtcaaaggcacttacaacaaggattcagaatcaccagatttctcaaaaggctaaagaataagataatgccttaaaattctgagggaaattatttttctgctagaagtctataactggccaagttatcaaggaaatatgaggactgactaaagacattttcagatttgcacaaaaggaaaaatgaatcccccatttttcatctttcaagaagatacagggaaaagtgctttcatataaaagagtaaataaaaaaaagtaaatgagatgcaagaaaaagtcatcaaaagaaattgagtgaaaagacctcacaggatgagagaatgatcagcaaggttaagttcatcctaaccagatcagagggagaagatcatggtttgggggtggatggctctgggaacagttcaggaaggataaactatctgagcatttaggggaaaaaattcatagagcttttatataactgttcaagcttaagagaaaaaataacaattggaatgttaaaagaaactaagccaatttttaaaggatgcaattattaactctaggaaaatcaaagagttattcaagaaaggagcagtgattcaaagtacattacttgacttcacagtgacataagaataactattgactgaatcaaaattcatttggggtacttccctggtggtccaatggttaagaatctgctttacaatgcaggggacatgggtttgatccctggtcagggaactaagatacatggtgccatggagcaactaaacccccaggccataactactgagtctgcacggagaacactattcattactttatgaaaacatgaaaagcacgtttcccaatttacttttgaccaaaattagaaggatttatttaactgacaaaggattaatctccaaaatatacaagcagatactcaatatcaaaacaacaaacaacccaagcaaaaaataggtggaagacctaaatagacatttctccaaacagatggccaacatggaaagatgttcaacataactccttcttagaaaaatgcaaatcaaaattacaaagaggtatcacctcacccagtcagaatggccatcaccaaaatatctacaaaccataaatgctggagagggtatggagtagagaactctcctacactattggtgggaatgtaaattggcacagccaccatggagaacagtatgctgctgctgctgctaagtcacttcagtcgtatccgactctgtgcaaccccatagacagcctcctaccaggctcccccgtccctgggattctccaggcaagaacactggagtggcttgccatttccttctccaatgcatgaaagtgaaaagtgaaagtgaagtcactcagtcgtgtctgactcagcgacctcatggattgcagcctaccaggctcctctgtccatgggattttccaggcaagagtactagagtggggtgccattgccttctccagagaacagtatagatgttccttaaaaaactacaaatagtactactatatgacccattaattgcactactgggctcataatctgagaaaaccataactgaaagagacacacgtaccccaaagttccttgcagcactatttacaaaagccaggacatggaagcaacctaaatgctcatcaatagatgaatggataaagaagttgtggtacatatatacaatggaatatcactcagccataaaaagaaataaattgggatcattggtagtgatgtggatggacctagagtctgtcacacagaatgaagtatgtcagaaagacaaaaacaagtctcatatattaacgcatacatgtggagtcgagaaaagcagtacaaatgaaccgatttgcacgacaggaatatagatgcagatgtgcagaatggaaatgtggatacaaagggagaaggagagggataaattgggagagtaacattgacagatatacactaccatggtaatatagacagataatggaaagtttctgtataacacaaggagctcggctcagtgctctgtgatgatctagaggaatggcatggggtggaggaggctcaagagggaggggatatatgtatacttatagctgattcacatggctgtacagcagaaacttatacaacattgtaaagcaagtatactccaataataaaattttaaaaataaataaaatgaatcctttcactggaaaaaaattaaaaaaataaaattcagatataagaatttaaaaagatatgtgaatccaaaatattacagaaaaatagacgttctatacttttgcttaaaaatatctactgctatgataaataaaatgattcataaccctatcatatacgatacatattgggcttatactgatgtaagactagtatagaaaaagactaggtgactaagtgactgaattttgatgcaatattgattatattgggcacagtgtttatatcaaaggtggcattattctttctagctatattcttaacagttagaccatgtttgccaatgaatgaaattctagatatcagattttatgagaataatgataaggtgattctgatgattgaagagctgaacaaaatagatatatttaatgaggaaaaaagaaaaatagctgccttcaaatatttgccctgtggaggaggaatttgatgtattcttacttcagggtgcagaatgagttagagatgaatatttcatatatatcaacttcagctcaaaatacagaacagaaatcacataattttcctagaaagaagtgggttatgttatgtataatctccaacctttagaaatgttcctcaatatagaaactgtgtataattcagatgagaaacttaataatgtaagctttgtgaggtaggatatgaaagaagaaattgcaagtctttcccaattttaaagatataataccaaaaaatgtaagaaaacagtattttttaaaatatttcaaatattgcaatgatctaactcttcagacatatatatttaggggtttattttttaaattatattatttactaaaatgataaaatgaaattttctgcacacgtgaattataggacatcctttggttagagaatatgccatcctttaattcttaagaatttcaaatcaattttatattttgatattgccttatttactatgacataggtattgaatgaaatcctgaagttattcccagacttttaaattttaatttctgataaaatagtttttaaaaaataatctgctttttattacaacaaatgtaaaagaaaaacattccaactttaataacttttaaataactcttccagaaatttcctaagcactctatatggaaacattttcccaacagataaggaagtgaattttatttaaaagttttctccatattttgactttaaaagtaactataaagaaatcctcatagtttaatagtgacacagtcataaaaaacttgaaagtgaaagtgaaagtcactcggtcgtatctgactttttgtgaccccatggactatacagtccatgtaattctccaggccagaatactggagtgggtagcctttcccttctccaggggaatcttcccaatcccgggattgaacccaggtctcccacattgcaggcagttccttaaactgaagaaaatatttaatttcataaaatacaaaaaaaaatctccagagcttttctcagtataagccataattttaaatggcctatttaatatatctaaataaataccatatccttcttagcacaatagaaatttagatatcaggattattttcatgtttaaattatgcatcaacaaaaataactagattttctatcaaagtatgcacacatattaaaggtgctgaaataaagaataagtgagaattctaaacttaataaggtcagaaaccatatctataaatgtttactgaataaatactatatagaaaaaatgtatgagcaaatacacacaaagattatttaaatatgcagtttatgttacctgaatgaagtagagttgtagcgtttgtagaactttagttctacaaaaattatatcaaaaagaaagcttcatctaatttagatctctttcctcaagatttttgatgttgttctgattctatggggtaccctgtgggtcagcagagatgagaagaatgcaatcttctggttgcatctaaaattaagatcttgcagcaaaatgctgacttggaaacaggagctcatatgaactctactgttcttttgagcttggacacggatgtgggaggagccaagcctggctatcttccctattccgagatgtgaaaatgctccaaatgcctaagaataaacagtaaaaaagtttccctcagatggaagggtgtaaactttggtggtagaacatggaaacattttttaattagtgtggcagtaaaaatttccttttattctttcactttcctatagactatattcccaaagagcacacatagtcatttatacagtataattggcacattttaattctcacactatatttaatgatatcccaaacatagtgaataatctttaatcacagaaaatgctttttggttctagctgtcagtttttttatgatgggtaacatctattataagaaagaaactttgtgaatgtttatattgttctttagttgctaagttgtgttgaactcttttgagacctttaggactgtatcccacctggctcctctgtccatgggattttctaagcaaggataccagagtggattgccatttccttctccaggggaatcttctcaaccctgtgtctcctatattgtaggtggatggcttaccattgagccaccagggaggcccaaatatgtttataccctgaaaaaaattacagcctataaacaaaaacggttctactgtggatgagcctttttctggcaattttaataactggaccaaatttatgttccccagaaatctgattacttgtcacagtattttcaattatgtttttatttagattttggaactaggttcaaaactgacctggaaaagggcagttttcattccaatccctaagtaatgcaatgccaaagaaagctcaaaatacttcacaattgcactcatctcacacgctagcatagtgatgctcaaaattctccacgtctgtaaagtaattaatctccaattaaaataaatacattaaaaaaaaaatctccaagccaggcttcaacagtatgtgaaccgtgaaattctagatgttcaagctggttttagaaaaggcagaggaaccagagatcaaattgccaacatctgctggatcacggaaaaagcaagagagttccagaaaaacatctatttctgctttattgactatgccaaagcctctgactgtgtggatcacaataaactgtggaaaatgctgaaagagatgggcataccagaccacctgacctgcctcttgagaaatctgtattcaggtcaagaagcaacagttagaactggacatggaacaacacactgcttccaagtagagaaaagagtacatcaaggctgtatattgtcaccctgcttatataacttctatgcaaagtacatcatgagaaacgctgggctggatgaagcacaagctggaatcaagattgctgggagaaatattaataaccccagatatgcagatgacaccaccattatgacagaaagtgaagaggaactcaagagcctcttgatgaaagtgaaagaggagagtgaaaaagttagcttaaagctcaacattcagaaaacaaagattatggcatccagtcccatcacttcatggtaaatagggaaacagtggaaacattgacagactttatttttgtgggctccaaaatcactgcagatggtgactgcagccatgaaattaagatgcttattccttagaaggaaagttatgaccaaaatagatagcatattcaaaagcagagacattactttgccaacaaaggtctgtctagtcaaggctatggcttttccagtagtcacgtatggatgtgagttggactataaagagagctgagcactgaagaatggatgcttttgaactgcggtgttggagaagactcttgagagtcccttggactgcaaggagatccaaccagtccatcctaaaggaaatcagtcctgaatattcattggaaggactgatgttgaagctggaactccaatactttcgccacctgatggaagaactgactcattggaaaagaccctgatgctgggaaacattgaaggcaggaggagaaggggacgacagaggatgagatggttgggtggcatcaccagtcaatggatatgagtttgagtaaactccgggagtttgtgtgggacagggaagcctggcgtgctgcagtccgtggggtcacaaagagtctgacacgactgagcaactgtactgaactgaactggaactaggttaaagttatatttcctgctattgataaattacacattataacaaacatttgcctctaatttatgatagtcataattaaatgtataatttgtgttgttttcgtcttttcttcagagaaggcaatggcaaaccactccagtactcttgcctggaaaatcccattgatggagcagcctgatgggctgcagtccatggggtcactaagactcagacacgactgagcaacttcactttcacttttcactttcatgcattggagaaggaaatggcaacccactcctggagaatcccagggtcgggggagcctggtgggctgtggtctatggggtcgcacagagtcggacacaactgaagcgacttagcagccacagtattttcttaaccagtaatatgtacttaacttgcaatatgtactaccttctatctcttgatacatttgtatttttaccctccacatttagtgctgtgtaactatcactaacacattctaactgttatataaatatccagtacttcttagtagatcagtgataatacatatcaaaataatggaatctttaagtaatgagctctatgtcaaccactttacctattgttccttttaatactaaaaaatgtcctctttagataggcactattttatactctaagaaacaatatcttagaaatgttaagtaactttccaaaggttgctctgctaaacaatagccattttaaccaaaacctaggcatgctaccacaattcttaatctcaagatgtaggaaagacttaatatttaaagattcaggaggcttaagaataatagtattgcttcaaagcttttttggtaaatgaaaaattatatttctcttggtgaactaaagcttatattctcttacatgaaactaatgtaactaatgtaaggagcagcagctacactttgctggagcaactgtgaagagataccccatgcccaaagtaagagaaacccaagtaagatggtaggtgttgcaagagggtatcagagggcagacacactgaaaccatactcatagaaaactactcaatctaatcacactaggaccacagccttgtctaactcaataaaactaagccgtgcccgcagggcaacccaagatgggcgggtcatagtggagaggtctgacagaatgtggtccactggagaagggaatggcaaaccatttcagtattcttgccttgagaacaccatgaacagtatgaaaaggcaaaatgataggatactgaaagaggaactccccaggttagtaggtgcccaacacactactggagatcagtggagaaataactccagaaagaatgaagggatggagccaaagcaaaaacaatacccagctgtggatgtgactggtgatagaagcaaggtccaatgctataaagagcaatattgcataggaacctgaaatgtcaggtccatgaatcaaggcaaattggaagtggtcaaacaagagatggcaagagtgaacatcgacattctaggaatcagtgaaataaaatggactggaatgggtgaatttaactcagatgaccattatatctactactacgggcaggaatccctcagaagaaatggagtagccatcatggtcaacaaaagagtccgaaatgcagtacttggatgcaatctcaaaaacgacacaatgatctctgttcgtctccaagacaagccattcaatatcacagttatccaagtctatgccccaaccagtaacgctgaagaaactgaagttgaatgattctatgaagatctacaagaccttttagaactaacaccccaaagagatgtccttttcattataagggactggaatgcaaaagtaggaagtgaagaaacacctggagtaacaggcaaatttggccttggaatgtggaatgaagcagggcaaaggctaatagagttttgccaagaaaatgcactggtcatagcaaacaccctcttccaacaacacaagagaagagtctacacatggacatcaccagatggtaaacactgaaatcagattgattatattctttgcagccaaagatgaagaagctctatacagtcaacaaaaacaagaccaggagctgactgtggctcagataatgagctccttattaccaaattcagacttaaattgaagaaagtagggaaaaccgctagaccattcaggtactacctaaatcaaatcccttatgattatacagtggaagtgagaaatagatttaagggcctagatctgatagagtgcctgatgaactatggaatgaggttcgtgacattgtacaggagacacgggatcaagaccatccccatggaaaagaaatgcaaaaaagcaaaatggctgcctggggaggccttacaaatagccgtgaagaagagaggtgaaaagcaaaggagaaaaggaaagatataagcatctgaatgaagagtttcaaagaatagcaagaagagataagaaagtcttcttcagcgatcaatgcaaagaaatggaggaaaacaacaacagaatggaaaagactagagatctcttcaagaaaattagagataccaaggggacatttcatgcaaagatgggctcgataaaggacagaaatggtatggacctaacagaagcagaagatattaagaagaggtggcaagaatacacagaagaactgtacaaaaatgatcttcacaacccggataatcacgatggtgtgatcactcatctagagccagacatcctagaatgtgaagtcaagtggttcttagaaagcatcactacaaacaaagctagtggaggtgacagaattccagttgagctatttcaaatcctgaaagatgatgctgtgaaagtgctgcactcaatatgccagcatatttggaaaactcagcagtggccacaggactggaaaaggtcagttttcaatccaatcccaaagaaaggcaatgccaaagaatgctcaaactaccacacaattgcactcatctcacacgctagtaaagtaatgctcaaaattctccaagccaggcttcagcaatatgtgaaccgtgaacttcctgatgttcaagttggttttagaaaaggcagaggaaccagagatcaaattgccaacatccactggatcatggaaaaagcaatagttccagaaaaacatctatttctgctttattgactatgccaaagcctttgactgtgtggatcacaataaactgtggaaaatcctgacagagatgggaattccagatcacctgacctgcctcatgagaaacttatatgcaggtcaggaagcaacagttagaactcaacttggaacaacagactggttccaaataggaaaaggagtccatcaaggctgtatattgtcaccctgcttatttaacttatatgcagagtacatcatgagaaacgctgggctggaagaaacacaagctggaatcaagattgccaggagaaatctcaataacctcagatatgcagatgacacgacacttatggcagaaagtgaagaggaactaaaaagcctcttgatgaaagtaaaagaggagagtgaaaaagttggcttaaagctcaacattcagaaaatgaagatcatggcatctggtcccatcacttcatgggaaatggatggggaaacagtagaaacagtgtcagactttattttctggggctccaaaatcactgcagatggtgaccgcagccctgaaattaaaagacgcttactccttggaagaaaggttatgaccaacctagatagcatattgaaaagcagagacattactttgccgactaaggtccgtctagtcaaggctatggttttgcctttggtcatgtatggatgtaagagttggactgtgaagaaggctgagggccgaagaattgatgtttttgaagtgtggtgttagagaagactcttgagagtcccttgcacagcaaggagatccaaccagtccattctgaaggagatcaaccctgggatttctttggaaggaatgatgctaaagctgaaactccagtactttggccacctcatgcgaagagttgactcattggaaaagactctgatgctgggagggattgggggcagtaggggcaagggatgaccgaggatgagatggctggatggcatcactgagtcgatggacgtgagtctgagtgaactccgggagttggtgatggacagggaggcctggcgtgctgcgacttctggggtcgcaaagagtcggacaccactgagcgactgaagtgaactgaacatgaaactaatactaaaccaagttataaaccatcaaatgggtttttcaatctgcagtttgtaatcctaatactcttcaatctttgacttattgccccaaatatttactctctttaaacccaaacttaattgatctgataattatcaaccatgacttttctcagctttattatcttgacaatacttgacaaggttttctcttatacatcttttcctcccatttgcgaagtccaatagttccatgaatctgtcctctaccggcttcatctactcctgtgagctgtgagtcatctgtaaatatgtgataataactgaatggtccctaaatcatcaccctaaatttttagaagagtcctgtcctggatttctgtagtctctcatgttctgaatgttttcatgatgagaaatgcctattacaaatcttcctaagacatcattagcttccctggtggctcagaggttaaagcatctgcctccaatgcgggagacccaggttcaatccctgggtcgggaagatcccctggagaaggaaatggcaatccactccagtattcttgcttggagaatcccatggatggagaagcctagtaggttacagtccacggggtcacaaagagttggacacgactgagcgacttcacctcaccttaagacatcattgtgatcctactccaaaaaattcgatggcatataaaaaagaaatttttacagaaatttcaatttttaaaactctcaagtataatactcattggtcttccttgttgttgcccaactcatatttctaaccttattcctgccccttgtctctcacaaaccaactgacaccagtcaaatgaaactacttttttggcctctggctttgctgagcacgatctccaatttggcacttcttttcctacttaaatcctatctctctatcagggctcatgcctttttcagaaagtcttaaatttctccaactggatacataatattttctcactttccatgacatttatttctgtcttgttacagttatttgtgtgtgtatttatttttccctgaactgtgagtcctttgaatacagtatgtcattcttattcatctcgagcttttttagcccagtgcctattaagaatggactctctataaccttgaatggattgatgggagatttttttggcagctcagtagccaccattcccttcacagttacttccaaagtctctgagtttccctgagtcacaactgcaaaatgtcgaaagattgaaaatagctcagagtggtcttagaggatcgccttagagcacagtaacaactggtatagaagaatttgttatgtgatctaccaaaaactttgtaatacttcattgaactatcacaaatatatgaaaataatatgatatatatataatgatatatatacaaagctcatatcacaataggacatgatagagtaatttcctaccggatttaggtacattggtgagaagtacaatcttaggggtgggggagtacaaccaggaagcagatgatagcgtctatgaaaacaaattacataattccagtctttactgtgtagagtaggagattttagagatgttactgaacctttaagttttaagtgtatcttagagacaaggtgatacaatggagtacccaaaacatttttaataatttctgttcacatttgtttttacctaaaaaagaaaataagctttcctgtatggagttgtatgtcagcctgatatgtcaagcatataatacatcaggtaccctggcagggaggtcatcactcgcaactcaccttcagtgcactcaccacatgtcacacacacccactgagaaagatgcacgattatggttacacatttatacatttgtaacactctaacgagatgagtgtcatgacacactgctgctgctctttcttctgctttgggcccagtgtgctaaatcacttcagtcatgccagctctatggactgcagccatagtgtattgactatgtgtagccatgtgtagtctgcatgactctatggacagtcgcctgtcaggctcctctgtccatgggattctccaggtgagaatgctggagtgggttgccacgcccttctccagagttttacacattgtattcaaagtaccaaatgggctcatgaagatgaagtaattactaactctattataaaacgaggcttgttcaaaatttgctgaattttttctatgataatgataaaaatgtgataactggcacttaaaaaaaatagactaataatctctctttaaggcaaaggagacatttaacactggatgagaaaacactgcttttggggacttccttggtggtctggtggttaagactctgaactcccaatgcagaggatctgggttcaatctttggtcagggaactagcgcccacatgcctcaaccatgagtttgcatgccacaactaaggcctggtgcagcaaagtcaataataataataataataactgcttctttcaaacccttcttctaaatgcttggaagtatttctagtgttatgggatttgttactataaatataccaactacaaaaactctcaattgtatttaaaactttgaagcaaaattttctaatatctttacattgtttccaaatctttcaaagtttcactgagttttaacactatttattaaaatacaaagatataactccttttagtataatagttttcaagaagtgaatgacagaatggaaaatggaaatttgtcaaattttaatacatttttttcaataactagaatattggatttaaattgaattactactttataacaggaacattcagtggtaatgctacatggagatatgcacttttgcaaagtaattttttcagctatggaagctattgaaatcacatagtagaataaaccagacttttgaaccacttaactgtgctgaacaaagatttcaaactaatgaaaataacgaaacattctaccactttttaaaaattagatgactataacaatagctcactattgaaaaaaatagagaaaaattttgttatccataaaattaaaaacatattaaatattcatcttatcctcttaaattcttatttgtatcttctataaattatatttatatgttagtttatgcttgtaatgtatagattatataatactatataagggcatatgatcaaactattttactgagaaatatacatataattaaaaaattagaaattaattgtatagaaatgtcaaatagactttttaaaatattaatgtttgactttgtattaattatataggcactaaatcttattctcaagctaccaaatgttgataaaaaattataacaaaaaagagtatctaataaatatgctaatttaatgtctatatatcttatatatatagttttatatagcacatagatattgtagaatactgagactacgttcttctaaacatttaaaaatctatttccagagatcttaaatattctgaagcactatgcctggaaaaatagaattacaatagaaacatgattgtctattttttaatattaagaaaaatacatatatcaccatttaatgatatactttaactttagttaactacaaactatagttaagtatgaactatataaacttttagttaactacaaatgtaatgataaagttaactttttagtgatttcaaattacattctaacttcactcaatcaaacacacatacaagtgtcttctttgcattctcatcatcagattgtctccttcagttctgcctagattgcacatgtcaaacctgcaaggcccacttgtgcctctaaagctgtcttcaaagcatcacagctagggcaaactatagtcagtccacatcctcccttttggtgattcatgaactctatgtattcacaaaaaaagaaaaagatgttgcaattacacaaaaacgaaagtattcttctagcatagagacttcaacaccactcatctcttgccaggttgtaatggaatatgtcatactagtttaggctttctaggaggaattgttggaataataatcatgttgtcaagtacaatcctcattacaaattctcgaataattatagtctactaagcccctaatattatgagtcttcactattataaatcaccaggttgttactggaaagagacaggaatcccattctgcttctgataatctagtacattcaccaccaaactgcaaattccttgtacacagagattgtgcccgatttacttctagtgactaacacaatgcctataacatgtagggaatgcttagaatttgggggagttactgaatgtaccatagaacggtatggaaatgtaacaaatagaaacattatttcagtagatttccatgataaattggtaatgaagtaaatttccagccctttgctatacttctgtgtcttttccaaatttaagaaaataaccaattactatagttttactgaacattccactttacaaagaattgacagcttcttgaaaccatttccccacacattaccttgttcccctggctgctgctggacttaggagccacagaggcagtaacaagttcctttccaagtgcattccaccttgagtgggagcccaacccctctgctcagaccctcaatgttcttttgttacacaaaactgttaaattgacaaactgcaaatttactaggtgtgtgcagctaccccattttgtgcagctcatttctgaaagtgtttttatttgtcacattccattgtatcttaatagaaatttagtcatacacacatacacacacacgtatagatatatatgttttaacacaatgttacaggagggtactattttataaagaaatgctttgggaaaagcactaggatcaagacggttcaagtaccaagctttcatcttttaaaaaaatattttctcaattttagaagaaaaaaacaatcttaaatgaaaaaattattctttacttctgttggatcatcattaactccagaaaacaatggaatgcacattattgtcttaccaaatatgaactgattttatgtacagaatgaaaacattctaggaaaataaatcacttaaatgaggcctatgaggaaatatagagaaattaatataaatttatttaaagagcatttgctaaaatagtctatgttacatgtagtgcccctcactttatcaaagaaaaataaaaattttactcaccttttaaagattatcctgggcatgagtacatctattaatttactaagtaagtttgtttacatcataaatttttattcattatttataatatatgaatattaaaattcctagtatttaaaaatttatagctaaacaataaatcttatttttaaaaaccaatgttagtttctaataggattatataaaaataacagtagcttatatacatactcagtaaaattatgaaaacatatactattcaacaattaaatgtttaataagaaaaattaacaatttgttattttaaaaaaaccctcaaaagaaaagaggtattctttacaatacagaatcggttcagtgacttaaaacattttagatattggttcaaggaataaaaatacaacatacatgtgaattaagaaaagcacaaggccaacaacatcattaataagcaagggttaaaatacaatcatttcacattgactagtcacaaaaatgcagtcattaacagatatatgttaagattattttttctttaatcatgcttatagattattacaacacaaagtttccaacatggagaaaatttaaatgtatatttacaacttcattcctagctacatttaattatttagcacttggtattttaattttactttaaaatgaaaagtgtttaagatttcatgtcatttatatatgtatacttatatacatacacacatattttctcacttttctaacttagtaaataggatcttctgaaattaaagttatgcattaaagaatattaacctgatatgttaataagaggtattctgaaatctggctaatacatagcaacactgaaagaggtaaattaaaatgttataactggttttaacaataaaacttcagatcaattaaacccttttaatataaaaggctaatttaaggattaaaattctttatataataagaaattcagaaactttaatgatatatatttactttattaaaagttaataaataaaattattgtaattttaaaattatcttcaatttatcaaaagttttacagttctttactagtgcaaagactgaattaatcaatgaactcatttgtgggatatacatgtaataaacaatgaagaattatatacttctgttttactattttgtaatttgaaattattgttttcttggtcacttgtttttgtgaggttgacaaagttactctgcaaagggtctttagtgaacattcgggtttttcacttatgacataccaaaaaatatcatgatacaaattattggaatatagcatttgatgcaatctaacacaatcaaatttttgtgaggttgtacactttaaacttatacaatatgactacatatctcaataaagctggagcaaaattatgtaaacactatagtgaatatgtagaaaagattgataaaccttaagatatttgaaaatattaaacaaaggatcacaaaatctaaaactgactccaaatgaatatttgcaattccaatatgctataaatttaggtgtgtcaaatttttaaagtttcatgatgtttattaaatagaacaggaatcaacaaactttccccagaaagaccaaatagtaaatatctcaggctttgagggtcagtctctattgtacaagaaagtctctgttgagtctaagaaagtctcaaaagcagccgtagataatacataaaaaatgtgtatgcctgtgttccaataaaagttgtttataaaaatagacaatgggccaggtttgataatttgctgatctctgatatagaagatctaattcaaatcacttaattttaggaacttcaatatatagcacaaagcagaagccatgagtaaatgttgaatgctttgtgaatgaatgaattcatgaatgaatagggaaaataaaacctttatgtctgctgtcccaattgaggcaaattccaagaaggcaatctatggattaagtcttactaatgactaggcttataattaaaccaataaaacaaaagaaaacataacagatatagtacagagaaagtgaatttccaaccaaaaatgactaaccaaaaaaaaaatctatagtgacttcttacaggacttgaagtctctccaattagattgtaaactccatagggtaacaaatatgtctttatattatcatgacagtatagtccctaggatatagcagatggtcagtgaacattttaagtacatgtgaatgttttccatagcaaaatgcttttgttagttccccaaaagttatggctctctaattctaatgcagcaatttaagatcttcccataaagttaaaatgctctgctgttttgtatcagtcatagtgactaaaaagatgaatttagtctgaattagaacttgacctattcttcaaatagcatgaattgaaacaggtttacatttcactgtaaaactttgacctgggtgaagcaaaacaagtgcatacatcaggttcaggtataaaatcagagttaattattttccaaataaagaactgtttaactttataatcttaattataaatagattatagactccaatcattttatcactagaaagaagtgtacttggttgtttgtatttaaaatatcaaaattgatcataatgctagtttcaatgtatctatatattaattattcttcaaagcctgggtagttgaaaaatactagaagaaattaataattcatggctatttatgaatttttgtctatggcttcaaaaaataaaaaattaaaacagcccaaaacacagtaactccacacagtggaagatatgaacattcatataaattactatataaatcatactttttcatgatgtatgtaacaaattgtaaacaattaatttactttgtgtaagtaaatttctcttttttaatacaatattttcacatttccaaactattaaagtttaacaatgataaaaatgttatttgcttttagatcagttactggacattgacagacaaaagccacaaatagttatacactcaaacaagacacagccttaacttgccattgttacaagcacaatgttaacattatgtacaaatgtaaatagtaaaacattttcaattaatttgtggcaagccaaaagggtactggagaaaaacacttccattagattagtgctatggttcaaaattcacttataaaaattaaatacatgtaaaactattatatatatatgtatatattacagtacttgaatgaattctctttcaaactgtcaaatttaatgacataagcctcgagggccaatggtctgctttaaaaaaatattggaagataaaatgtgtgcatcacaatttataaagagagaaaattaaagaaaaagggacagaataaaacaaaacagaaggataaaaataagagtactatcgtaccgatttccatggtccccgatgccatgatacgtcatcagggcaagcatgtatatgacactgtaccacactaggtggcttgttcaacatttcacagttttgctcttgtgacagttggccattgggaaactggcatattacaaatcttgattttattcctcctccacatgtttgtgtacactaaaaataagaaggaagataaaaactatgtggcttcaaaaagaatattatgttggtttattcagtggagtacataatcagaactgctaaagcttaaagtttatcctttcttcataaccctcaacatttcttcaaaaataaatcaaagttttggttccatcctttttttttaaaagacaaaattttgaaaattagtactgtaataggtaataactacataatgtatatggtatcctatcaaaagatacacagtcatgtatccatgaagggaaatctaaatttacaaagataaaaagatgttgaatatacctattacatgagaacagcaggtggcaaagcagcatgtataattaatgaagctacttctgaaacccacacagaactaaagtctggcaggaaattatcaaatattaaaagttcgtatcttttcacaatttttcaaattatttgaattttcacaagaattaactcacaactgaaaaagttactttccttttagaaaattgtaaaagtatattttaaagacatactttatatttattagcacccgatcagaagtgtatctttaaacaatgatttccaaattccctatggagagaaaataggtactgaaaatcattaaacaggggacttccctggtggtgcagtggataggaaacctgctaccaatataggtagcaggtttgatccctggtccgggaagattccacatactgcagagcaactaagcctgtgcgtcacaaccgctgagcttgcgtagtgccaattactgaagcgcatgcgcctagagcctgtgctctgcaacaagagaagccactgcaatgaggagtccgagcattgcaataaagaggaaccccagtttgctgcaactaaggaaagcctgagcgtagcaacagagacccagtgcaatcaaaaataaattaatttatttaaaaaaatcattaaacacaaatgtttgactaattaaattaggtggcttgttttatttatccaaagccaatgaaagtctttcttctttctcatgcataatataggtggaattagtattcattacaaccatttaaaaaattatcctcatatcccagtacctaaaagaaggtcaggacatgaagaaagtgctaaataattgatagctattcattttagattcgtaaaatgaatggttccataataggatattaacatggcctacatatcattctatttttctgtctttatatcaattaattttctaagaaattaagataataatatactagttttagagaggtattaggaagttacctactggctagcacatagcattctgtcaaaaatctggagtatatatttcctatcataaatgagtgatttataccatgatacaatgtttattaaaagattatagttttagtgactcaatttttaaaaaatctgtctagtatagtgaagtaagattattcaacagtaagggtatgaagtgcttaacttttggtcttaggggatgtcataatttccacaagtttaggagagagtaggacttacttctccccagcttccgtagttccactgtggacaaggtcctgaatcacagtgctttgactctgggggtttggacgctgcatcacagtaactggcactttgtccattttcatcctggcagaccacaactctacgttgaacacctccagcacaactgctagagcactggaaaggatgaaacacaggaacacacaaactgaagattccatgtcacaaaattatattataaagcactaaaataaaagaaaaccgaagattccatgtcacaaaattacattataaaacactaaaataaaagaaaaacagctctttgactcaacttcaagctcgccaaattaccgcccccactttggaatcataatttgaataaagaatatctgtcaaaaaaacctatggtttcattaaaatttattgataggaaggtaaatctttaaagtttgcaataaaaaaatcacccttgtcctaggcattaagtaaaaaggaattcaagttttcaggtctcactaggaaggaaaaaaaaaaaaaagataatgttaagtttcccaactttcacgttgtttttctttatttggtatccttaatctcataaaaaatacaaaccacaattgtaccttttgtacaaagtaatcatggttttacaccagtttactgcactgttatcatagttaatttctgggtttgatttttttcttcatagacattggtaatcttaacacttaaaacatttcatttttactataatggactctaagatttttttcaaatggattcctctgtaatcataatatcacattagggtataattcaattagaacactatagagatttgcaatctgcatcaaaaattgcttaatctttttaagatttaaactactgatcttcagaaataattagcattaaaagcatctgatgtcattatgtacatttctgttaaaaggccatataacataacaaaattacagaattagtataactcaataaagagggcttactgatccccatggtcctgttctccactggttttctctgattgatggatggaccccctgattttgattatcttctggtttgtgagttaatggaaaattcctgcctggaaaatggcttggctgctcagaggaactcggaaagtggctgtacgtgggagggcaggctgccagattacattcttgttctatcacagggcggacttcggggtcacagtaattctcattaactggctgatgatagttgatgcataaagcttgtcgagtcatttttccacggccacaggaagctgaacactgatcacaaatttagccaataaactgcattacctcaaggttcaaatattatatttaaatttctcatttcacttttttttgcaaaaaagtacttacaggtgaccaattccctgtttgccactctccacaagggctaaaacagacagctatttcagccggtcggggtaagtgggcacaaaatgattcatctgctattccatcgagagcatcacgacaacttacatagcgggcttgatttcctcttccacaagacacggagcactgaaaaattgaatcataccagagcattatacaggacactcctacatccctcacacttggtgttcaaatttctaaatctcaagattcttgaaaaaacttaatttataaatattatcacctggcatcatttctgagtcaaagacagggcagtgaatatgccaatgagtttaaaaaataaacttcacaaatcagatgcttgtgataataaaacaaaacactcaacttctcagaatagtgattagctatttgtcaaaattaaagaaaagattatagataagagaatcttaagataacatttaagacaactctgaaagacctaggtaatagagaagataggatctcataattaaaatattcagagaatatatgaaacttaaaaatatatctttcatataagactaaagcaagtgtatattccaaatctaataaaagtctaatatcacatctgcttctcataacaacctatgacataaatattatcattctcatttggtaggattagacaacagacctagaaaacttaaattcttgcccacagaaacagagctcttcaaagacagaacaggatttagtcattaaattacctaattctaaaccctatgctcttccaacaccatctccatcaaaatacctgagaatgaatgcatatattaatttggcaaatctggagcaactgaaagcctccatagtagaaatactgtctctcttaaagaaattcacttactggggtccaagaaccatatcgccattgtgttatctttctcatgggaacagctggcaaggaagtggccccaattttagggataactgggcaaggtgtaacaatacaattctgtttgaaagaaaaatggacctcatgaaacattaatgaattaaccactatgattgatactaaatcctatacttcatttctcctttcaattatataagtcaagaacagctgcatagtaaactacaaataagcgatgtaaaggtttttattttccaaaagtacaaagtactatcaagggctagaagtggatagtatgactctgaaggttaaagtttggatcattctgactgatgatttaaaaagaaaagagtaataatcttccaaaaatatcactaagctgaaaccttctgcatgaacacagatcactaccttaagctacacttgagaagttcattatgctcataaggcatcatccttctatagttcaaaggatggaaacataagttaaatgagtgatccaatatcagataaagagtaaaaacaaatccatcaataaagctggcaaaaccaagaacaataaactctctatttttaaggcatatatgtttaagtggaaaaatatatatggaaataattttaacacatcaataatcttcctgtatcaaacatttctgtttataatccatggagaggtgtcgtttacctgcctttcacttgggcgactagctccatggcacagtctgtcatctagcactgtgctaaatagctcgttgacacacttcacagcacgcatctggtacccctgtccacacgtggctgtgcactggaagaatataagcagatacaaaacaccattgctcagacattacataaacttaattttcttaacatgtacacagttaagaatctattttcagtagatatttttattagtcctttattccagattctagacttaaaatgaagaaatttaatcaacatatatctttattcaaatttatatagatactaataaaataagcaatgccaaagaatgctcaaactgccacacaattgcactcatctcacacgctagtaatgtaatgctcaaaattctccaagccaggcttcagcaatatgtgaactgtgaacttccaaatgttcaagctggttttagaaaaggcagagaaccagagatcaaattgccaacagccactggatcatggaaaaagcaagagagttccagaaaaacatctatttctgctttattgactatgccaaagcctttgactgtgtggatcacaataaactgtagaaaattctgaaagagatgggcatatcagaccacctgaccggcctcctgagaaatccgcatgcaggtcaggaagtaacagttagaactggacaacaaactggttccaaataggaaaaggagaatgtcaaggctgtatattgtcaccctgcttatttaacttatatgcagagtacatcatgagaaatgctgggctggagaaagcacaagctggaatcaagattgccgggagaaatatcaataacctgagatatgcagatgacacctcccttatagcagaaagtgaagaactaaagaatctcttgatgaaagtgaaagaggagagtgaaaacattggcttaaaattcaacattcagaaaactaagatcatggcatctggtcccatcacttcatggcaaatagatggggaaacagtggaaatagtgacagacttcattttggggggctccaaaatcactgtagatggtgactgcagccatgaaattaagacgcttactctttagaaggaaagttatgaccaacctagacagcatattagaaagcagagacactattttgccaacaaaggtctgtctagtcaaagctatggcttttccagttgtcatgtatggctgtgagagttggactataaaaaaagctgagcaccaaagaattgatgcttttgaactgtggtattggagaagactcttgagagtcccttggactgcaaggcgatccaaacagtccatcctaaaggaagtcagtgttcattggaaggactgatgctgaagctgaaattccaatactttggccatctgatgcgaagagctgactcatctgaaaagacccggatgctgagaaagattgagggcaggaggaaaagggaaagacagaggatgagatggttggatggcatcgccgactcaatggacatgagtttgggtaaactccaggaggtggtgatggacaaggaggtgtgctgcggtccatggggtcgcaaagtgttggatacgactgagcgactgaactgaactgaactgaaaatagtgaaattgaaatggcaattattattgtatctttaaaaagttatcatgtaaaactatcaatagaagcttcatattttggtggcagaatcaatacagtttaggcaaactaaatacttttcaaaattgattggtatatgcatgccacttaatatactaagtcaattttgaagagataaagaaagaaaagaacaggacagagttaaagggcagaagagagcaggtttcctggcaagcgtagcaatctacacagaatactaaactgcccacaactcatccatcagattatctcctagccatctgtttggcaaaacttcccaacaaggcctactctaaatacagtagagagaataatttaggcaccaaacatgaaaatgcatagtttacataaagttgatgaaagcataaattgtttattgaagtacagttgattaacaatgctatgttaatttctggcatatagcaaagtgattcagttattcatagatatattctttttcgtattcttttctattatggtttatggcaggatactgaataccgaaatttatagtattgtggttaacaaaagagttaaaagtcaaagctagaatatttaccacagcaaaattagcagtactgaaaaaattgtacaggtacagatttacatttcaggaatctttctccaacagccaccccaaaattagatgcagccactaaaagactgcatatacaataattctgtgctattctgtaatgatggattagagcagaaatccatatactgttatatactcacagaaccccaaggtcctacttgccaggaagtacatgcacgaagctcacagggcctctgagactcaggcttggtgcttgggtcacagaagccaccactcaagtgatcttcatccagttgacaccacacctgccgctgctttgttccttttccacaggtaaccagacactggaaaatacaactgaccattactttcagtatcagtcaacacaaatacccaaaaaaatgcaatgatcaatttgtatattcaaatatacaaaagcagagaaggcaatgacaccccactccagtactcttgcctggaaaatcccatggacagaggagcctggtaggctgcagtccatggggtcgctaagagtcggacatgactgaacaacttcattttcacttttcactttcatgcattgcagaaggaaatggcaacccactccagtgttcttgcctgcagaatcccagggatggcggagcctggtgggctgccatctatggggtcgcacagagtcggacacgactgaagcggcttagcagcagtagcagcagcaatacaattaaagaccatccttaaagacactttccctccatgcctcagaaaaaccagagatattcatggggtaaaatccacgactccaaacttctgctgcccaaatcccagtgcaacatctatttgttccagaaataaaggtacaaaactgacttagaacaagtatgtatctcagcctactgtgtacaccatgaaaatgtacttattcactcagtcgtgtctgactctttgtgatcccatggactgtagcctgccaggctcctctgtccatgggattctctaggcaagaatactggagtgggccaccattcccttctccagaggatcttcccaacccagggatcgaccccaagtctcccaaattgcaggtggcttctttaccatctgagccaccagggaagcccccaggaaagcccactatgaaaatggttatagattaaacaccaattatgtcattgttggccagacagtgtaaatagcttaaggacaaaccatttttaaattttactaccttgataatacaattatttactaactgataaagcaaattgaaatattttttgaattacatagccttccactacaaagatctcctttacaatgttttaatagttctaagcctcaagtgcttaatgttacctcactccactcattagtggcccaactgggacaggaaaattcattgcaattctctgttgtcactcggggaagttcctggcattctctgtcagcaagacggtggccaaagttatttatacagtaagattctcgagacctctcccctcctccacaactcctggaacactgattaaaaaaagaaaagtggtgaaaaatggacgcaaaataaaaattttaacaaaacatgactctgaagtgacagatatttaattagatgtaaaataaaggagcaacttttcttaagctattcttttttctttgtacctgagaccattctaaataatgccaccttgttaagacacagtcaccatggcagggttctcgggttggaggtttaagttggtcactgcagtagtggtcatctactggaacagtctgtcctttatgaatggaatacttcatacaatggacgtccaatgacttgtatccttgaccacaaagggttgaacattcacttttgccaatgatgtgccacctacaaaaatgatgttattatgcttaggaggtatgctgatgaacacaatttaaaacatggactcagaaaaagtcacacatattattcaattttaaaaattatgttagaaattatggacaagccacaataaaaatatttgatatatcattgatttagtgatgaaaacttcttagagatcatagagtccaaactttcatcatatagatgagaaaatgaagcccagtgatgctgtgcattcaaatggtagatatgcttggcttctgtcagaaattttacttttctctaaataaaatttaacatttattccagatccataaaagctggaggtagggaaccagcactacacccaggcatttggaggaaccccaagcctcaccctagaggaaccccaaggaaatgtgtgttctcttcctaggaatcccaagcctctccctagacttttaaaaacaattggttgagattaagattgagattaaggttactaagtggcagatttaaaattgtaaccaaatatatctgatctataatcaggtggtgtctgcctgtgcaacatctttatgtgactgaggatcacagaacatctgagcacatgactacatcaaaagcgtttaaaagttggtaaacttgccttcgtaaagcatgtcacatttgctcattacctgatacaatctacttttagacatgctttcaaagagaacattttttttccacaagtaaaatctgctagcgttagcaaaattatcccaattacactctagcaatctctcagacagtatgagcgcagcagtacagcaaagaagagaattcatggagcttctttccatctgaacagtatctcaaggatttcactgcacttcactctactgcaaggcagtggatgcaacttgtacatgccattctaccactagccttccaccatatgtctccaaacaacaccacaaatacatagaaattctcatccttgctgagtaaaggagattctggccatccctgaatgttgactgttgcctgctagacagggttattgctcttagcattactgtaagacctgccacaagaaaacaaatgacaataattttagaagaaaaaacttgcctgccatgatctaggatcttgttacttaatgtttaatggacaaaacgctgataagatagacaaatcaatctatcaattctttaatcctcaaactttaaaagtttattggtacatgagttcaatgggaattagaggatcatgcttaaatgtattgtttcagagctttaaaccataggttttcagattagagttttcctatatttattttacagataaatttgtttccatttcttatacaaaatattgaggtctctctactgaaattcagcaaatactatgaataaaaaactcaaaccaattgctgagtttcacaataaattagcaggtctaaagttttttatgggaatgggaaaggacagacattaattacatgtccaccttataccaggcactgcagtagattctttacatcttatctcacttattgatttttatctggatacattatacattatttctttttttcttacctgagttcacagtctgtattgcacctttcagtcaccagcaatggaagtggtaagtggtcacagctttgatcagacatgaccatatgatcactcttacgtacacaagtaatttttcttctatgaagaccttggccaaagtcaaatgaaaaataaaaattaaaagaaaaatcacataaggagatgttccataataatttacttctgctaaaagtttgaaggatgcagctaagaaagcaaaaacaatttcaacatagtatacaaataggctagcatattgagctagtcaggagtgactttctacaataagcaagatgaatcctgaaacactgaggagtttgctgagtaagaagatgtaaggaaggtggtgcaagtgtgtgaagtaggaagaaatttattacagctggatggaagggttgctagtggagaactgagtggtcagggtccatgctgatatgatacagtatactactgcttcccattatttgcttgccttttcactgcaacaaaattatacatctctacttgctacaacatttctataacttcctagaggaggagcagacttccctgcccatcgacagcaggtttgtgccaaccacctggaagggaatgtaactattccagttctaagcagaagctctaaaagtcttttcttgcttctgccaactcttttctctctgtttccagaacagccttctccagacggggctgatctttcagcctggaatcatgaatgaaaaggcagcatggtcagacttcagttgataataatggaccaactggaataaatgtgccacatgaatgcaagatggtaataacagggtaactggggaaggggtgtggaagaagagagaatataaggattttttgtagtttttgctcaactttctatacacctagtgtgaaagtgaaagtcgcttagtggtgtccacctatttgtgacctcatggatgacagcctgccaggctcctctgtccatggaattctccaggcaagaatactggagtgggtagctgttcccttctccaggggactttcccaacccagggatcgaacccaaacctaaaacccctctaaaatcaagtctattaatttgtttgagaatgacatggaggcagatagcaagctgaagaagagtcagaaccaattagcaaccaccacacagtatgagtgagaaataaatgtttgttgttctaagtcattgagatttagcagttgtttatatggtgcataaccacagtgaaggaaacttcgagaagtcagagaggccagagtagactgaactttgcactttccccgatgaggagacaggaaaacgttcaagctgtcagtggcatgattaaatttctgttttctccaagtccaagtgtatactttcagttggcgaaacatgagcgtgcatggttatctctgcatgcataccatctgaaagaactataaagaattctgaaaaggcaaaaacctgaaggaacaaaaagaatgaaagaggaaacaggaggcaggaaaaggacatgttaaatatgaaaagaagatggaaattactattctgacagagccaaggaagctgtaacctgagcctgtggaggaagaaagtaagaaacaaaccattcatgccgcagaatccaagcaaagcccaggaatcaaaaccaccagtttcctctgaagaggtgaatgtgtgaggcataggcctgaaaaaatggagaagcgattgaaaagtattcctgaagaacagtcagacttccacctaagagtcaacagtagcgctatctaatgaaaacaacgtgaaccacatgcgattttacactgtcctgtagtgacatgaaaaagtaaaaagatacaaatccaaacagggccatttccacatgatgtcaacagaaacactgttgatgatacatctcactttcttttttcatcctaagtcttcagaactcattgtgcatttcacacttgtaccatatttcaatgggctagccacatgtggctaataactaccatactggatactggagagcatagctccagagcacgtgaacttggcagagacacagcagctgagggaagctggggaagtgctgagccgaaaagagaggggctcagtacaagtctccatactgaaatgagattcaggcccactgggctcaccctccatttccctctggctccaagccgatttttacagtttctccagtcccctcactggccatcacaagatgggagaattcctttcttggaaaactctttagctcaagaaaaaagattaagtgacagcaacatttgagcctttccccaaagacacagtaaagaactataagaagacttatttaacccacacaggactttcaattagcattttagtcttaaatatgaataaacatcaaagatcagtaggcaatttaggaaagacactcacacaaaagagacctaaataagcagaaacagaattaagaggaaacacatatgtcatggagcagaagaaagttccaagactataaatactctcacagacacaggtattgcctccatgaaacaaaagcaagctgttgatgagaaaaaaaaatgtacatttggagaggaaattatgagataagaaatcagaccaggaggctgtatatccagacaatataaattttacaaagatagaagagaaaatttaatgtggagaaattatcaaagatatcatacataaaacttctcagatcaaagaatctgtttccagtttggaaggcatcctaattaccaggaaaacagatgaaaggaaaagccaagccaacgcacagtgctctgacatttctcactcccagaatttaggaggggagacacaaaatttccataccaggaagtatcatatccaagcactggaaattggaaaacaagaatttcagcattctaaaggaaaataatctatcttagaattttatacgagccaagctatcaatcaagggtgagaactgaataatgccattttcagacaggaaaggtctcaaaacactgccttgctttctcaggaaatgtccgacagctatgttatcctcagtggaggaaataaaaagaggaattcacagaatttgggacacagggaatccaacacaaaagaaaattaaagagacctcacacgatgataaagaagggagagcatgtgacgacagccgtgtaacaggcctgaaaagcaacatggccaagttagggcagggtagaagagggccaagggaacaacagataagaaaaaggaaaggaaagctgaagccaataccctgaacatagagctccaaaatttacagcgttcacaaaatgtctggagcccgatcattttcagtgcacagggaaacaagtaaacaaaactaaagaaacttccctttagagaaacccaaaagttacacacatacaaaaggaactataatcatagtatatactttgtggcaattgaactaatggctcctttccttctgtaggaaagagatctttcctggttcagactctcaaactatctcaaaatgctttctccagcctttcattttggatcttgttatgtgtttatttgatgtgtcccccatattttagaatgtcccttcattcagctatttagttagatttcttctagctccccacatctactgccacagaccagtttacccagttatgttggaatgctggtcccagatgcccaaaccgcttctctacgctcttctgtaaagcacatccaggttctttttgtcaaaatgaatccctctgtcttctgtgttaccaaagctttgttcctacttgcagtgtttgcaccagtcagcctggcatcatctacttcaggcttcctccccggaggcactgttcaagcaggaatgcctgtttccacaccagcatctgggcactgctgtcctcgtaccacaggaccaagtctgtgcctttctctgggatgggataccacgattcctttggtaccttgaggtcagtttgttatctcgtccttcaagtccccatcttccgtgattgctgcctctggccacctaccttctctcagctcatttctgtactgttcggagctgctcctcctctgactcactgctcccctaattcccagaccttgtctctagtgcccctaggaacgacttttccactctacaccaatttctatcttcccatctatctatcacctcaaactgttcattccatctttcttggggtctccttgatgcatacttgtggcatggcttttaccgtttaaaattaagaaaatttactcattcttctgtttcatccactagactttaaaacttgaatgcaaaatcaggatcctaataatccaaaacaaaaatagtctgtcaataaacatttactgattcaacccagtgtagcatcacacaacaggtattcgtaattatagactgcccaaaggtaccagcctcttcacttgcttttctactataacttcacggctttttcatctctccctgtgttcctttcagttattcatccatcagtacaaacacatttccctgcggtcagagaagggaaataagagaatgagagaatgttgaccccacaacactaaaagaaggagatgcgtgtctgggaaagtggatggaagagaaggacaagaaggtgagcatttcaccagaaaacagtgtcacggtcagggaatctttctctaactgtgagaacacggctgaacaacttcactttcacgcactggagaaggaaatggcaacccactccagtgttcttgcctggagaatcccagggacggggaagcctggtgggctgccgtctatggggtcgcacagagtcagacacgactgaagcgacttagcagcagcagcaggaaaggagctgtgatgcaaaacattggaaagggctgagataagaaaaagggctgagataagggaggctgtaacataagcccagaatgagtggggagaaaagcatacagagagcaaagacgggaaacctttgtaagtctgtgtggtatacgtatgtgggttccacaggcagccagattcaagagcaccccaaatcataccagcatgccacagctgaacttatgtcccttttatttaattctagtgtaccttgacacatttttgtacagtcttgccatggtccatatgggtcccatgtgaatagatcactcttctcttccacggggatattgaaggaataacgtacatcagggttgtatagattacccacacacaaaacctcaataaaaatacaaaggggcacacaatcaattcataaaagatatattcttaaaagatatcactctatgttgaataataaatacaaagcacttacttaagcatcatattttactaatatgattaaaactgtcttagtaacaactaccaagaatttacctgcaaaacaagttcttcttccagtcgatcagtactattaatcctttcaattgagttgtttgaaccactgtattcaaaaatagctccttgtacgttgatttcccttttggacatacttacaacaaaattcccattcaaaagaaaattcccttgagtgtccgataatgctgtaaaaggatagtgctcatgaaacagcaaaaccagtcaacagtccagaaacagttttaacttttaaaattcacattcttttcttctgcagttagagaatataaatataaactaatatagaggaaataaattttattttactataaagtggtatctaacccataagcagcgaaactttagcatatcagccaaacccatgaaaatacattcactctataatttttctttctgagaaggtcatcttccacaaagcatgcagcaccaggagagacatacaggaagtggaaaaacagagggaagtcatgccgacagatcagctaaatcaatcccggtcgtccacggggaggaaagaaagggcagccaggctgctgtagtgctctgtttaccttggaaaacatgtataaagcttcaacatcctagggtcaatattttaaaagcccgtgcctctccactcctctctctgtaaacatctggatctttttcatgggaggcactcatcattggtctgtgtgagtggctgctttttcagaaccctcccactgccccctctgttcttgcccctggtgattcttgctctttcccatggataggtatcaacatcagcctatcaaataagtatatgtgtgtctatctatacactaatatttacatgtgtatatgagtatggaacagagtatgtagtcataatttgttacttttgtaaatacaaaattgcatggtgtccacagtgttgtggaagaccacaggacttagtacagttgatttaaattcaaattgttccaattaatttctatgtgatcttggataaactacttgctttttaattgcataacaggaataataaaaattcccaactcacagactttataattaaaatcaaatttggaaaatgtttctaaagtgtatagattgtaaagtgctgtgttgttagtttaaatttttgagagggtgtctaatattttaaattttacactaataaaacccccatgttaattaaatacatctttgctgatttactatacttctcagtggaataatctttttggaaaacacttacttggtcttccaggaaatcctacccagagcacacaagttaccatgactaaacaaatactacacaccctgaaccaatgctgaaggggatcctaccaaatatgtttgctgattctgtgtctttgtggactattgtgattgtctttatacactacactgaattcagtgaagaaccaacaaaatgaaaatcactctgtaaacctgcacattatcagaagtggacaggcctgtttaaaggactgcctgttacactaaaattaagggaaataaacaaaactttactgagaaaaactatatacatttcattatttttagttaccaaagcaaattacaagtcctttccaaagactccacacatatattttgctcccctatttagattttgatatttccattagtagttcttttacaaaatagactgatattttaatagtgaacatttttaatctttaaacttgagcagaaccaaatttctacatttggatcctaagagagacataataaattgtctataatacatatggcaaatgtctatgccaaatgataaatatggcatatatctatgtatatgtaaaagaaaaagcagtgcaactaaatgtaaacagttaaaacatttacatttgattttctttaggaatgtttttttatagaggtgaaattaacaaaaccagaattaaccattttaaattgaacaacttgatggcatgtactacattcacaatgttgggcaacctctactagttttctaaactttttcctcaccctggaaggaaaatctgtatccattcagcagttgttctttctacaattgactctataaagccagatataatttctgaaatgggctgttcattatagattcagattcccaatcaattcaaagccttgattacttgagccaatatttcacatttcattaatgtgaggcaggtgttttttcattatcagctttatatcatcagcttagtgaattacatgtaagtcaatattaaggtatttatcagacagaaacaagatttgtaaagcattcttttcatctctaggcctaagtgaaatgctttaaacttataagtcaatttccaaaaagtaagtaacaactgaaatgtatactctagaaatagctaaaagacaatatattaggactatgttcattaacatctaaaaatatgaaactatagtcctctttctgtaacataagagcaataaaaatacaatcacaagaaaaactgtatttaaagacttgtgctacatggtaaaaacatttaagaaaaaattttaaaaacatttcccttccctggtggctcagatggtaaagcatctgcctacagtgcaagagacccaggttcgatccctgggttgggaagatcctctgcagaaggccatggcaacccactccagtactcttgcctggaaaatcccagggacagaggagcgtggtaggctacagtccatggggttgcaaagagtcggacacgactgagcaacttcacttttttggattgggaacacgtgtacacccgtggcggattcatgttgatgtatggcaaaaccaatacagtattgtaaagtaaaataaagtaaaattttaaaaaaataaagaaaaaaaacaaaaaatcatttaaccccaatgaggtttataactagagaaatgtattctaactacatacacaactttaactgaatataacctctggttatctaaaacaccctcatggggaaaaaagcttaatttgtcttccagaatttaatttagtatctttaaaataggatatggtacgtaattcaaaaagagaacacatatatggagtcagatgacttggcttagtctgagccgaaactgcatgtttattcaaggggctcttcttgccttccaagaatttacaaccacagacctccatgaaactgcacatactggctgccatttaactaaaaatgtttacccagataattgtcatcttctggttttccagaatagctgtgctgaagaatatcaatgtttgttgctcctgggggaatctttacaacgacattataacctgcaatataattttatacatgttaactttcacaaaaagcagatggcccagaggctagtactgctgagtgaaaaatctgaatagtatagtcagaattaatttcattttatctctgaaagatgatatgtgcttattctttttgaatcaatggcttatacaaattactaaggattaagaaaaagtgtttgttgcctagaaacacacagtttgggattcttaaggtgcacttcctaatttctattacttttaaaattctgaatatagaataaaaatgaacctagtaatttagctcctgaactacttaacacacacattaatttttaaatgtgaccaatacttttacattttatacttcctaatggggaaaaatacaggattccaaatgctattcacaatccaggagatataaaaatagttgaccattgctagatgtttacacagactcagtgaacagcaaaatagtgaatgttaaagaggaatatttatcttaagcttttaagttccagtgtaagcaggaatctccatagctaccccctaaattttacattattttttaaagtctactaacaaagtgtcaagagaaaagtaaaaagtttactctagggaaatgttttatgaggccaaattcaataacactggcacttttcaaaatatgaggaaacactatatcaaatatacattacattacatatacaaatatacattaaacaagaaacatttttcctgcactaaaaccactcatgtcacatcattttcaaatactctcaggttttaagtcaacaattaattctgctctatgatattattctaaggttttcctttctcatattaggattttcctctttcatttaatataaaaacaaaaatttgaaatttttcacatacattaagttttataaatatgaaattaactttagaagaggaagttttaaaagaggttaagtctcatatgagattatcttgtgttttcagagcagccttatttatttatatctaagatatcatatttaaatataaggtgataaatggtatggttattctgtatacattaaatgcatactggttgtagcctacaaaatatacaagcctacaaaaataatttgactcatgattctttttcactataaaatgttcctaccagctccactatttatgtctttgctatgcttttcaagaaagtattccaaggcattgtaaatgtgacaagatgaaagctatcactagggggcagtaatgtgacaactgctgttcagaacctgcacatgaatttaatctttttccatttgcaaactgattaattcatagcacatttttagcaaggttaaattctaatttggtgcattcagctttatataaaaaattacttttcagtgaatacagaccagaatttgataaatgtgtgccactggtgataaaaagggatcaaatatatataggtcccaagaaataaagaatcataacaactagaaaaataatgtcaaatcatctagtaacttagatgcataagcatgaccagagtagtaaatgttctacacttttcatataaatatagtgttctaaatgacactgttttaatcgaagcgattcctactaacttaaacaactctgttcaaaaacatgtgaatacaatttgaagctgaacaataaaactgtaaaacatacatcatttattttgcaaataaagttttaatgggttgattttattaccataaaaataaaaaacgtttctgagaaaatttaatggaaaatatctgatatattctcataaaatttttcaagaaaaatgaagccatggccaaatatcagttatatctgtaatccagacttactgaaaaatcaaatgtaacaataattccaaattaacatataagttaatggcttcatccttcaccttcaatcagtttcaatatatcatcaataaaaaacaacagacaagccagatcactcacacagaaaacatgtagttcagatgattaaaaataattgaaatcaaatttcctggaaagattataaacatatacaatataaattacagaagcagcagtaaaaacacttcattaactggtatgacagggggactatttacacattattgtcaagttgtcctggatttattctaataaatgcacctaaattttttttaagaattaaacttgtcttaagcaggtaaattcattaattcaatcatacaacttgtacaagatttaattaatcattttgaactaaaatacagaataaacaacaacaaaccaacactattattccttaatgatatagtcccattattatatccaaagagaaaactggaaagaaatgcagaactcaccataatgtgcactgttgaagacacctgccattgtcctgcaggaggagttatccccaccacacacgccacatttgtctctcctggccttggagtttaacacgtgatcacagccagcttgcttcaaaacacaataattacagtcaagattattaaagtgactagcgaagcactaatggggctttacaaagttctttccaaaaatattctttcaattaacaggaaattcaatacaacaggattttttcaggatatctaatgatcttgttatatgtacaccagtattttcacacagctgttcacatggttgaaaaagcactggtttttaaaggatcatctacatacttcctgcatcaaaatcacctggtgtgggatttaaagatagattctcagatgttcttaaaaatccctggaagtaaaaagctaagaatccacattgtaataaatattgacagtgattcctattttgattatttgagagtaattctttaaggacatgtgattcaaatgggacaaaaagtaacacactatagtaacttcaagaagaggtcattgatgatttactttattttttttttaacttatgaccttagaactctggggataaactgagcatatctgaaagaaataacttatttccttaaaattaatatccagcataataaagtgtttaagaaaaaaaatgagtaaataaataaaggtgagagtacacagtttgagccaaggctttgaaagaacaaatgcagctcttttctacacagatggtgccctcggcatacactgcagtaacatttagttctttggaacactcctttaaatttagtgatcaggagagtaagaaaaattcataagcctcatgactttgtatgtacaaggtaaatatttccaaaaggaaaattccatccagatattttctgaaagtaatatgcatctttatgttcagacacatgtcatattttctcattatatctgactctctgggtttaacttaaataaaacaagttttcaggcaccaagtgccctttttctcacatttaaaagtcaaataaagtgaagtgaaagtcgctcagtcatgtccaactctttgcaaccccatggactagcccatggaattctccaggccagaatactggagtgagtagcctttcccttcccaaccccgggatcaaacccaggtctcccacattgtaggtggattctttaccagctgagccacaagggaagcccaagaatactggagtgggtagcttatccctctccagaggatcttcctgacccaggaatcaaacctgggtcttctgcattgcaggcagatcctttaccaattgaactatcagggaagtccaaagctatttccaatctgtcagttattttcagtttctctaaacatctcattagcctttgggtgcaaggcctttatcacctaggtaataacagatgtttggttatagggagaagaattggtcctattaagttgcacttaaggaatgagttcacagatgatacttatattctttagacaacattcactatccaagttctcaaactcaccatccattattaggactgccatctacaatttacacgctttaattcaggggctcatctgctctcacctaaaatcctgcctgcatgcatgtgtgctaagtcttcagtcatgcccaactctgtgcaatcctttggactgcagccggccaaactcctttgtccatggaattctccaggaaagaataccagagtgggttgccatgctctcctccaggggatcttcctgacccagggatcgaacccgcacctcttacatttcctgcattggcaggccagctctttactaccagcaccacctgggaatccccgctaaatggcctacctaactccagtttcctaacaactcagtacattctgaagatttcaacatgcaaatcaaatcacatctcttgcttaactccaaatccttggatcttcaaggacttcaggaaaacattttcacataacaaccgtcagctggtggccacctccaaccttggtcccttacttcttcactcttctaaaactttcttaccctaataattagatccagattcacaccctgcatgagcctccccaaatcctttacccacttccccatagactaagacactccatctacaatgtccacaggccaccttgcagataagccccacagccctgtgtgtgcccatctctcccacagatctgccaccatgtcagaggcgggtgttcttttctatcctttcatctcggtgactagaagagtatgttgcattcagtgtgtgtgtgtgtgtgtgtgtgtgtgtgtgtgtgcgtgtgtgtgtgtgtgtatgtgtgtgtgtgtgcactcggtcatgtctgactctcttcaaccctgaggactgtagccatccaggctcctctgttgatgggattcttcaggcaagaatactggagtgagttgcaatttcctcctccaagggatattcctgacccagggatcaaacctgtgtccctgtgtctcctgcactggaagatagattctttaccactactgccacctgggaagcccacagagaaatttggtaaaagtttgttgaatgcatataagaagtaggagaatggaaagcgggtgggaggatatcactgcttctaacacagaggtaaaaagtgtcaccacagaaggtcatgttcaaactagcaaaaggactttgcattccttgggtcctgagacatcttaggaagttaacttcatccctcatcttgattttgagcaccacagacaaaacgtgagtcactcctgatgacaaacaatagctcctaaccatgttcctatcagagaaggcaatggcaccccactccagtactcttgcctggaaaatcccatggacagaggagcctggtaggctacagtccatggagtcgcaaagagtcggacacgactgagcgatttcactttcacttttcactttcatgcattggagaaggaaatggcaacccactccagtattcttgcctggagaatcccagggacagaggagcttagtgggctgccgtctatggagtcgcacagagccggacacgactgaagcgacttagcagccgcagcagcaggttcctatagacagcagggtagcaacagaggatgctgcactgagactcatgagaatgtacatcaaattgcagaagtaatatctggctagaaaaacagaaggaaaacagtattctgaaagtcattttaaatgcagcgattttacttacccgacacaggccttgaacacagatgtcatttgtttccgttccacaaggagtaccatcggcaaccctgtccttcagttggtagaagctagtggttccagccacccggcaatagagtttacaacgatcttttacagcaactgtaagaaaaagtcaaattttggtggacacgaacacagctgtatgttcctttgtctcaaaactgttcacagcagaaaaatattctaattacttactcccactgtactttggaagccacctcacgttaggggagagaccattgatgttgaaatgtttaccatcaaaatcagagcactgcttctcacggaagtcttgcttgccttttggacatgaatcagtgttacatgatcgaaatttcatcctgcggcccacacagtacttgcctccgtttcttggcctagtcaaattcattacagtttaaagcacatcagtacaaggttatttctgccatttcattctaaaactgttccatccctttccaggatctggaaaaccactgatgtcccactaacacttatgtttttaacagaagtatgtaacatgatttggaagcatctctgtggttaatgaactatagaaaatccattttaacatggacattgtggcctggaggacagaaatgatgtcttagtcacgactagattaactaacaaagaactaatggtggggatttgtttattcattttggaggcagggagacatatagagtgaatacaacatgatcacaaaggaagatgacaccatgttaaaattaaaaagaagtatatatgactctttgttgtgtatatcctatgtatcactcagttcaaagaatttcatggtatcaatctatagacatccaactccatttcaatttatgttggaagattaaaaacttatatgaagactttcagcataattcaactattttaaaattcaagtaaactaagtcgtattctattcatagtatgtcatatttctgcattaaaaattctttctttatatatataataagagaaccattttttaaatttttttatggaatccctaaatttttttaaatagtttggtgagcaggatctgtgcttcagtacttattcaagctaaagacactgaagcaactataagatgaaaatacgaaaaagaaaatatgacatgacaaattataccaaacagtaagaaatggtaacaaaaccacctattttacccaggaaaaccaaagcacagttgaaaggggccaggctctttcaacaaaagcacagtaaaagtaaaaatgccattatattactgttgttattttcaactatttctcaaatttacactaaatcaaaaaagaaagaaaatggctgtcttaacttaaattcttaaaagtattttacttttttttttaaggtttgaatctaccaagatagaaagtaatatggcttaaagtattccagaagttttctgaatctcagaaacttacagactgacctccagttttagaagtgaatgaaactgatgtttactttctggtgccttgagataatcttaatttacagtgacataaaaaagacatactcggggcgattacagagcctgcttgtgcttttgattccacctccacatgttcttgaacaagaactgtaaggtccccatggtccccagtctccatctacaggacgtgtttccatctctttatttacacatagcccatggtggcaatgctatgaaaatgacacaaaaagaaacgattcatgtgttatctagttaggacatcacagtaataattataacagcaaaagaccagtagaagaaaatgcatacaacttcaagcagaatgttatcaagtcagaaatgaaatgacatttgataccattttgtgaatatttcctgagtatatactgagtaactggaaacagatcaacagaatgcaaaaaggaacaggaaatttactgtgcttatgagagctagagtctcgctggagagggaagacctatacctatggggaaaacaataatgaaaagcatttttgaaaaagaagcaaacaaatatttgattaatatggtatataaccatgtttctaccttttatgcaaaggtatctatcactctcctactcttttagctaactttctactctatcttactcaaagactcaaagaccactttgtttcttgttttcatcaagaaagtggaaatctacaaaagaaggtgtccagaatctcccagaacctcttctacccacccaacacccaaaatctcccaccatcccttatgcccagtacgcggccttcctgcccatgagtagacatgaaaattccaaaatcaacccctccatcgtgcacctaatctcatctcctctcaccactccagcaattctcccatctctcctacatcatcactgttccactggccactatataaaagctaatcaaactgtagtccatgcacagatgctggtctttgaactagtcactgttaactgggagaaaatgagtacagaagatgaaagtaagcatttagaaactttcagaagattaattttgtttattaaagttaataatgatgaaatcagcttacattttattttttaatatttatgtattcatttatttttggctgtgctgggcttctgttgctggtcacggccatcctctggttgtggtaagcaaggtctgctctttgttgcagggtgcgggcttgtcattgcagtgactttgttgttgtagagcacaggctataggcaagcagactcagctgccctatggcatgtggattctttcctgaccagggatcaaactatgtccctgcattggcaggaggattcttaaccactggaccaccagagaagccctgttctatttttaattgtggtaaaattcacacaacaaaatgtactcccttagccgtttgtatgcatagacttcagtagcattaagaacatttacattgctgtgcaaccatcacatagaattctttgtcgtcccaaatggaaactctgcacccattaaacctggcaaccaccattctaccgtgtctatgaattcaattgctctgtatatctcatataactgaaatcacacagtatttgtctttctgcatacgtgctaagtcattttggtcatatccgattctgtgcgaccctatagactatagcccaccaggctcctctatccatgggattctccagacaagaatactggattgggttgccatgcccttctccaggggatttttcccaaaccagagatcaaaccctgtctcttaagtgtcctgcattagcaggcaggttctttaccactagcgccacctgggaagcccatttgtctttctaggactggcttatttctcttagcaatatgtcctaaaagttaatccatgttccagcatgtgtcagaatttcattcttctaccaactgaaaaatattccattgtatgtatatatcacattttctttatccatatatccatggatggacacgggttgcttccacttctcagctattgtgaataatgcaattcttttggatatatacccagaaatttttgtgttaggtcatgtttctatttttaatctttttgaggaaccaccattttgttttccatataaaaaaattggctcacacttggaatgtctttcttcatttcatttttaccattttgtacaatagcatgtttataaatgaccagaaatatttaaaaaaagaatactagtcctttatgagagatagtttgagaagtactccactcattctttttaaacaaaaatataagatctcatttccctcaccagttattgtcctatttttccttgatagagttgtctttgttcatggtctaactctctccatctcttctcattaccagactgcagccagaggctttcacatcccaccttccacaaacctgctcatgtgacatcaccaatggcctccaggacaccatgaccagtggctggttctccgtctctgccttcgacttatatgacatagtatgtgacagagctaacattcttcttctttgattcactttttcttctcttggtttccaggactctacacactcttggttttcttttctctttaatgatttctcttttgcagtttcttcttttttctaacctcttaatgtctctgggctcagaccatggtcctttagtcatctatttcactaatcactcccagtccagatctctttcctgaactccaaactctatggacagctgcttcctcatttttgtttcaatgtctaatagccacttcaaggataacatatccaaagttgaacctgcccccctcaaaatctgctgagtggatctcagttatcagccaaatacatagtcatcttatctcttcctcctctaatattccatagctaatacattagcaaatgctctgctgctgctgctgctgctgctgctaagtcacatcagtcgagtccgactctgtgcgaccccatagatggcagcccaccaggctcccccatccctgggattctccaggcaagaacactggagtgggttgccatttccttctccaatgcatgaaagtgaaaagtgaaagtgaaatcgctcagtcgtgtccaactcttcgagaccccatggactgcagcctaccaggcccctctgtccacgggattttctaggcaagagtactggagtggggtgtcatcaccttctctgagcaaatgctctagttccttcaaaaacatatataaagttgacttttaatcatcacctgatttgagccaccaacatctattttactccaacagctccctgagtacatctcctccttgtctactcttggcccttagagtttggtctcaaaagttgtcagaacagccatgatcctttttcaatgtagtttaaaattaagtcaaattagatgactcctctgtcaagtctttcaattagctcactttgagtaacacaaaattctcataacacctaaaagattttctagtaattcccacacacatctctctctctctctctctctctctcttctctctctctctctctctctctctctctctctccctccctctctcttcattccactcaaaatggcatctttgctcttccctgaacactctaggaaaattccagatttagtccggctgttccctttgcctggagctcaactcccctgcgatatcctcatagcaaactccctcacttcctttaaaacagctcatgaggcaacttcccataagatcacccttgaccatcatattctaaattgcaatctgtcctctcctaccacacaaaaaatctaatcccttttctgctctatttctcttattcacagtcccattatattgtttgtaatactgtagtatccaactagaatataagctccaggacaggggcagggatctttcctcttttgttcattgatatattctgagcacctagaatagtatctgacatgtaggaggcccttgacaaatttttgttgaatgaattaatcatgtaaccaagattattagcagaaaaaaaaatgctttgcaccctccattagaacaaatcatttaatatgagaaagtcatactagaagtgaacaaaaacaaaatctcaaatagaatatactgtgtgcatgtaaattctgtgggcatcttccagaaatgtttaaataatcctggcacactcccttttcatttatttatttctgagggaacagagcatgaaaaagaatgctatgctgttcattgtgcagtaaaactaactcattgtcagatgggctcagcacgtctacatgcaaatagatttactaagaaaagcatttaacagcattacccatgtaagacagtcacaagataaaagaactaaaggaaaaattaaggatatttgtttaactttccttgaataacaggagctcttaatattcaatatggctaatgcataggggctcactattttcagttaatttttttaagggaatttatacctcacatgatttacattttatgccaaatgtcacctctacttttaatctacatgggttttaaagtaggtctcggtatctcaccacatttacctggattcaacaaacccatgctttccatactgtctcactggggaaatagttaagcgagctaattaaaaaaaggtgctcaaaattgataataattaggataaaacaagtcaaaataagaattaaattctattttgtaccccctagaatggctaaaagtttgttaaggctaacaaaataaacaattggtaaggaatgcagaataattcaaactttcttatattggttggtgagtctaaaatggctcacatactttggaaaatagtttggtattttcttatgaagttaaacacacacctaccctatagcctaacaatttactcaagagaaatacaaacatacagccacaagaagatttatataaggatgctcacagtggctttatacataaaagccctaaacttgaaatgacccaactatctatcaacagaaaaatggtaaacaaattatggcacagctgaattaaactgcaacataaaggaagaagcattgatgcacacaatgatatgaataaaattcaaaaacatcatgaacaaaagaagcctgacccactagctcctagccaagagagagaatactagatagtttcatctactttaaaataaagaacagacaggagatggggcaaagatagtagaccctgagctcacctcctcctaaggacacataaaaattacaactatttatagagcaactatcagtgagagtgacctgaagaccaaagaaaagactatagctaaagatataaagaaggaaccacgacaagatgggtaggagggaacatagtatagttaagacccacacccctgggtaggcaacccacaagcaaaagaataattagacttgcagagggtctctccaaggacccagaagtctaaacctcacagcaggctccccagcctgggagtcctgcaccaggaacacaagcctcacagtgtttggctttgaatgccagcaaggcttactttcagtaaagtcagaaaaatgtaggaaacagagactccactcttaaaaggcacacacacacaaaatatcacatgcttcaagccccagggaagaagcagaaatttgaaagaagcctgggtcagacccatttgctgatcttggagagcttcccaaaaagaaagaaagcatctgggactcaccctggtaacacagatgctgacagaaggcattttagggagctcatcccaccacgaggacactggtactggcaagcaccactttcacgccttctgctagcttattagcatcaggacctggccccactcactaggttgttggcacatatcttgggtcaccccatgacaagcaattacctgggagggaacacagacccatcttccagccagccagtttgccatagaacccactgagaccccagccactccaaaagctggtcttgcccaccagagggcccaggacccagccccaaccaccagtggatcatcactaaccccaaggttccaagagatttgcagccaaccatcagagaagatgccacccaatgggggcaggtaccagcccttataacccctgggctccagccataccacctgctggcccacactgactctgggaccagcagggccctgaagccaggaacccagaccacactcagccaccagtggaccagcaccagtcttagggcttcctgggcctttaagctacccaccaggaaaataacaccagctccaggacatcccaggtacacagggaccccagaacccacctccattcgccatgggcaactactagctctgaggccagattcggccactagtgggcagggacaagtgcctggactctctggacccacagacaccatccctgggagtaccaaggctccatagccagctgtgtaaagacctggcccacccatcaggaagacattagtggactggcactagctctgggacctcttgggaacctcagccaactgccctggaattgaggtccaaccaccagtgagcaagcaccaagaccaagcctccactgaccatgcagccagccacatcaggaccccatcaaatgtacaagtggccagcagtctctgcacaaggtagaatctggcaaccaataagaccaagaagactgaaatcatatcgagcatcttttctgaccacagtcctatgaaacctgaaatcaacaacaagaaaaaatttgcaaagaaaaaaataagacacagtgtgaaagctaaacactgtgctactaaaccaccagtaagtcacacagaaattaaaaaaaaaatacctggagacaaatgaaaacacaagaatctaaaatctatgtaatgaaagcaaacgcagttctatgaggaacatttgtagcgacacaagcctacctcaggaaagaagaaaaatctcaagtaaaccttctacctaaaggaactagaattaaaaggaaactcggtgttggtagaaggaaagaaataattataaagatcagaatgagaagaaattaataaaatagatacaaaaaaaagaatagaaaagatcaaagaaactaagagctgatatttgaaacgataaaatttattatttagattcatcaagaaaataagagaaggctaaaatctggtggctcagtggtaaagaatctgcctgcaatgcaggaaatatggttcaatccctgggtcaggaagatcccctgaaggaaggcatggcaacctgctccagtatttttgcctaggaaatcccatggacagaggagcctgacaggctgcagtcaatagggtctcagggagtcagacatgactgaagcgactaagcagcagcaaatcaatgaaataaaaaatgaaaaagaagttacaattgacaccacagaaacacaaaggaccctaggagattacgatgaacaattacatgccaataaaatggacaacctggaagaaatggataaattcctagaaatgtacaattttacctgattgaatcaggaagaaaacataaaaataccagtttatgaagttcactagtaatgaaactgaatcaataattttaaaaactccttttcagattttattttattttattttactttacaatactgtattggttttgccatacatcaacatgattccgccacgggtgtacacgtgttccccatcctgaaccctcctctcacctccctccccataccctgaaaaaaataaaaataaataaaaataaaaactcccaactcttgaaagtccagagccagatggtttcccaggtgaattctaacaaacatttagagacgagtaacacctatttttccgaaagtgtgaaaagcactcagtcatgtctgactctctgtgaccccatggactatacaagtccatggaattctctaggccagaatactggagtggataacctttcccttccccaggggatttcccaacccagggattgaacccaggtctcccgcattgcaggcagactctttaccagctgagctaccagggaagcccattcttctcaaactattccaaaaaattacagagaaaggaatgctctggaattcattctacaaagccagcatcaccctgataatgaaaccagacaaaggtatcacaggaaggaagattacagaccagtgtcactgctgaacacagatgcaaaaatcttcaacaaaatattagcaaactgaattcaacaatacattaaaaggatcatacactatgattaagtgggatgtattgttcaatatccacaaatcaatatatgtaatagatcacatttcattatcatggtgaacccagtcacttcacatcttgttggcagatttacataagtttatcattgatgctagaatggaaaagatgcggtatgattgacagtttgtcttagagatacaatgtatttaaaaacacaaaaaccaataaacttaaacctttcatttatatttatctgaatttttaggagaaatgtatacaatggtaaatccttaaatttgggagtatttcaggtatttgctgaattacttatagctagatacatctttaataacaagactataatatgcttacataagtaaatgtccatgtaattatgttaactataatatccatctgctttatcttgaaaaaaggataaaatttaaattctaactcacttgaaaacatacatcaaacaaatacagcaaaaacattaattcaactagcagaagaaaatatgacggtgaataatgaagagcgctgaaacacagagcaatcacatccttggataatctcttgatacaaaactcacccttcgagaaaacctaccatcccaggaccacagtttgttccatctgccaggggcatgtgttgagtgcgacagcccctgtgaactccttctgcactggtacaccagagacgcctgcattgtttctgcagagtaataaaaggcaggcaaacaagagtgaaaataacactacgaccaccagatcaattcagtatcacgcattgatttataaattgaccctagatccttcctggtttcatggtcggagctggaaataatcagtaataatctcttactagggtctcactgatggctcagacagtaaagaatctggttgaatgcaggaagcccgggttcgatccctgtgtcagaaagatcccctggagaagggaatggctacccactccagtattcttgcctggagaattccatggacagaggaacctgatgggctacagtccatggagttgcaaagagtcagacatgactgaacaactaacacagatacacataataatctttactaagtcagtcttggtcatcaattttcctctaaacataaaatggcaacatttagttttttaaaaattggattatcatcaaacactgaataatggaaaagatgacttggagcgaagcattcaaaattactgagatagttttctctctttgcaagacatttttctaaaggattttttgttgttaaatgttattcacaaggagtttccaaaagtcccttttgatccaacagtggaatatatgaataatgtgcatagaaaaactgtataatgtatattggtttcctattttgtaaatataatgcatactttcaatttttgaaaatttgttcacaagatatgaaaacccacagaggctcacaggagccatacccaaaataatccctttctttctttgaatttaaattcaaagttgattcagtatccaagtcagtatgaaaaaaaatgcattttttataaaaaataattgacgtatatcttctcttcatagtggatatttaaagacataaataattgtgattttaaatttaagattttaggaataatatacactatatgcagtatgctttgcatgtccctgtgctcattgttaagtacctttcatttattcatccatccatccattcattcataaatcattcatgtattcactcattcaacagtccgtaaacattttttttttggctcctattatatggcagatctgaactaaatccttggaatatatctttatttaaatgaatgagcaaggcgagattcctggttcaatcatcttcacaatctagttgtatagtaagcagtttagcaaaggtctgcacaggattgaagaatatgaaatgagtattctgcttgggaaagtaaggcatggattcaccaaagtactgacatttactagaactaaatcctaaatttacccccaaaaaaagacaaaatcttggctacagagtcaataaaaatgtcaactcaactttttcagaggtcagtgttcattctagtcccaaagaaaaggcagaatgctcaaactactgcacaattgcactcagctcacatgctaataaagtaatgcttacaattctccaaaccaggcttcagcaatacgtgaattgtgaacttccagatgttcaagctggttttagaaaaggaagagaggaaccagagatcaatttgccaacatccgctgatcatcgaaaaaccaagagagttccagaaaaaacatctatttctgctttattgactctgccaaagcctttgactgtgtggatcacaacaaactgcagaaaactctgaaagagatgggactaccagaccacctgaactacctcctgagaaatctgtatgcaggtcaggaagcaacagttagaactggacatggaacaacagactggttccaaataggaaaaggagtacgtcaaggctgtatattgtcaccctgcttatttaacttatatgcagagtacatcatgagaaacgctggactggaagaaacacaagctggaatcaagattgctgggagaaatatcaataacctcagatatgcagatgacaccaccctaatggcagaaagtgaagaaaaactaaagaacctcttgatgaaagtaaaagaggagagtgaaaaagttggcttaaagctcaacattcagaaagcgaagatcatggcatctggtcccatcacttcatggcaaatagatggggaaacagtggaaacagtgtcagactttattttggggggcttcaaaatcactgcagatggtgactgcagccatgaaattaaaagatgcttactccttggaaggaaagttatgaccaatctagacagcatattaaaaagcagagatattactttgccaacaaaggtccgtctagtcaagtctatggtttttccagtggtcatatatggacgtgagagttggactataaaggaagctgagcactgaagaattgatgcttttgaactgtggtgttggagaagactcttgagagtcccttggactgcgaggagatccaaccagtccatcctaaaggatcagtcctgggtgttcattggtaggactgatgctgaagttgaaactccaatactttggccacctgatgcgaagaactgacacatttgaaaaaaccctgattattggaaagattgacggcaggaggagaaggctacaacagaggatgagatggttggatggcattgccaactcaatggacacgggtttgggtggacttcaggagtcggtgatggatagggaggcctggcgtgctgcatttcatggggtcgcaaagagttggacatgactaagtgactgaactgaactgaactgaacctatgaaaaatccttgaaaccaattataaagtaatgattaaagaaaatgaaacaacagactccaaacttctttcctttgtattcaaatctaccgtaaaatatagtctatgaaattcttggggtctttaatacaattcattatcaaagcacttgtattatctctcctacccacaaaacaacatcatttgaaaataactatttgaatgcttttaattttcattaacctggatatttcataggattttgtgagagttaaagataatttttaagtaactaacaaagtgaaagtgaaagtcaatcactcagttgtgactaacaaagagtgactctttgcaaccacatagactatagtcatccaggcttctctgtccatggaattcttcatgcaagaatactggagtaggtaggcattcccttctcttggggatcttcccaacccaggaatcaaacctgggtctcccacattgcaggcagattctttaccatctgagccaccagggaaagcccatctaaaatagcacctggcgaataataagtattcaataaattatagtttccctttttttaaaaaacctctttctgacaaacaccaaatttttctaatatttaaaaatcaagataagttcagcacactacctgtccaagagaataaagtacattttgaaatatatcttttttttttttttttactttacaattctgtattggttttgccatacattgacatgaactacaactttatggtagttttcaaacaaaagaacataatttctcttactaaatagggacacacttgtgatccaggaccaaacataagctcacattgcttgtttacatcatacattaatccaggaagctgtgaagatagatcgtatattcttccatttggtttgtcaaggaggcattccccatgaccggtgctgcaatgacgacagggaacaaaatgttgtgaatacatatggatgtattcaagtagaagattcttcaccacatttttctgtagctctgcactttcaaagagaacatcagtattttttcataatttaaaaaccaactcacatcaaagtcaataagaaaatctcacagtttatataggacttattctatgtgtttgttctcatttaatccccacaactgccttaaaggtaaattttttttaaagaataatgaaaaataaacaaaaatgcatcgaatataatgtttaaaacatgcattcctacgttgatcacactacatttttggtctgctttgctatccaacaggaattccctatatctaattccaatctgtcaaaatgtaaaaagtaacattttcagatcatctgagaaagttcgtttatagtcgacaacaaaataaaggaatttcagagtgctatgctgtctctgtctcaaacagattttcttaggaaaagaatataatgcagagtaaagaatgccagctttgggattttgcatttgagtgtcaccactttccgaattgcatggtgtggacaagttagttagtctccctgggtctaagacttctcaactgcaaattgagagtagaaatggctgctttgcaagttgctattaaatgcattatttaacatctttaaaggagtttgcaaaatagtagatagttgcaaaaatgtgtatttgctactcctagtttgtcaagtaatatacagtatatagaaaactgtgaaaatgttcagccattccaattcagttaaaagcaatcatttgttcaatttgaaataattggaagaaatattttggagggaattttttactggctagaaggcataataaattttgccaaaaaaataaataaataaataaacatttaagtttcaaaatacccattggcaagaatcatatcacccccttccaaaaataagcatacctactggtatttttaatcagtgcttcagtcagcaatcaaacaaagctatatgccaccatgtacagatgagcgactatgtgttgtgcttttaaatcaagttcccataaaggataaataaccactgttaatcataattatacatttataaatatatattccaaaagatggtttaattcattcccatagttctcatagaggtaagtaagtgaaactgtataaactggtgattagaatatgtagtagaaaaaatcaaacaatattgtgtttataccaaaagattacctggaaagaggttggccttgcttttagaacaagtttcaataactaggtagaaacaccatttggataagttgggaagcagagaaatgtaggagatgaagaggcaaggctagaacaatctgaatctgagctagcaatagcctccaaaggataggtaaacccagagactccatatctctttagggaactattaggaatattcataatttgacttcagctattctgtccttcaaggacaacctcaaacttgagccactcaaattcatctcaaaatattacttggcagcttctgaagaaattttaatacacaaggaatctttgattcccattaagcatctccctaagaaggagtttttatcataacaggaaccccaatttttttttaaatgatagctctgaattaaatcccccaccaaaaaacatatagttaagaatgaaataataaaactctttgtctttaaacatccatttgtacagtggaagcaaacttaaatttaagcaataaaaaactcaacagagattgaactattctaaaagaatacatgtttcaaactttataatctaataagtgttcaattatataactaaagtaacacgaaatcacttactctaggaattcggtgatatatttctgactacattttgaccaggtccaaggacttgtgtggtaatttaaagttggagccatgacatgatactgatgtttaattccagtttctttacatttaaaactatcatcgtgtggaacattaaatctaaaaataaaaataaacacttaaaaaagaataatgaaatgtacacaacattagaaacagatctcttattttataatataatctaaaatgtagatcaatctgattatatcaggatttgtactcttgatctcttcataaagtactgcaatgctagggttaccttcatgtttagaagcgcatgatgtttaagaaacagtagattataactctgatcagtagcacagtctgttgctttggtatgtgaatttcaacaatcaaattatttggattccggctcacctcatcacaacatcaacacagcattcacataaaacaattataatttccaacatgcatacccgaggcaatgtgtgtggaaagattaggtaaaggctctatcacagtaacttccagactactgactatcactacagaattaaaaaccaaaaaaacttctttaatcttaattccatatcactttatgctttccacctatttcacatgaaacagcttaactgctctttctggtttataatcataaagtgatgactgatagaactggaataataaaaatattctcaaatggcaaccaaatctttataagggcaatgacattaaatggtcagctggtcagcaacagattttacatatattttgaggatcccagtaaaaactacgtttagaagggataattgattcagtccttgattcagtccttacctgtcaaaatatgtacttaatatcagtgttttaattaaactacttactgatattctaaacacacctaaaaagtttctcaggaagaaaataaaaggtagtatcctttgcaagaatactgtactagttaatacccttggtaaccagcaaacactgccttcaggatgttacaatacatgatataccttgagcatgctgctgaacctgctctacttcagcaaacaacgtaaaaatttggtgggtagtcatgagatataatgatgctgggaactgaagaggaactagtttaataaaaattatctctgcctgaaattattccagttgaatactctaaggatgtcaaggcatgaccaggaaaagacaatggagttcaagagaagcagctccagctttaattccttattagcaaataaccaaaaaatcaaaagagtactgtgggtacattgggaatcatttttcagaggatgaatttctaggggtttctgactttctatgggagcttcacgggtatcatgggaaaccatggcctccacattcttagagcataaaaccccagtagaatttttaataatataggaacaaatagaattccaaatgtttaccaaaaaaaaaaacaaactatagatctgggagaaaaagttttaagaaaatatttcagtgattaagaaattcccacagaccacatactctgttggggctctgagcaataaaagcaagaaatgaattgatagtacaaatatttgggggagttccctagaaccaggggaccctacaggccctcccataagacggtagagcacagtacctggtcatgcataggataacaagggacagaggccagaagtgcttgtcatataatccaatacagtaagtgaaagaaaagagttccaaagttctagttctttgcttagtctgttgatctgtgtagcctgtctgacctaacatagatcacaaaagagccagagttagcatttcaggggttaaaattacactactaatattttgtaaagatataaagatgccaattactccgttaaagacagaattatagacattcatgcaacgctatgtagaaggcacactaccgaggtgacagaaggtacttacacatgaccaagctcatgggctatggtaaaggcagcactgagcccattttcttcactaatagagcagctccgtaaagggtcacacagggtacctaattctgctaaacctgaaaaatttcatgtttgcatttcaacaaaatggggaatagcagaatcataaagaaagcactaaagcatttatcatttggcattactacttagaaataaatgccgagttgactgttaatactgcacagacgttttaaaaggcaaagagaaaaaaaaagaacagaatgatttatctgtagctgaaaccatatacttttactgaagaaaataatccagaatatgggataagcaaacaattttttaaaagacaggaaaaggaaaaggccacaggaagaatgaaattttaggccacgttagtgttattagtaggaaaggtaatgaatgtctaaactggtaacagtactaataaagaaaatggtccagaacaatataaattataaattttatttaattttttaaagctttgaagcagtatagacttattcaattaccatacgataattaaatgactaaaaatatgttaaatacttagaatagtgcctggagttaatagatgttaaataaagcatgataatgacataatcattggaagcacttattttgtaaccatttcagcagtggaacacgtatcacacatcaagatctagccactcatttaaacaacaacttgtaactggaattgttgctaaaagatgatgacaacatgaaatggctggacaccaaagacaatagttacaactgatatagtcttttaatctaggataagaaatataaaattaatgctcattacaatattccatatttcatcatcaagttatcattccattttaccttttaactggagccaattatacagagtgaagtaagccagaaagaaaaacaccaatacagtatactaacacatatatatatggaatttagaaagatggcaatgatgaccctgtatgcaggacagcaaaaaagacacagatgtgtatagcagacttttggactcagtgggagagggagagggtgagatgatttgggagaatgacattgaaacatgtataatatcatgtaagaatcgaattgccagtctatgtccgatgcaggatatggcacgcttggggctggtacacggggatgacccagagagatgttgtggggaagggggtgggaggggggttcatgtttgggaacgcatgtacacccgtggtggattcatgtcaatgtatggcaaaaccaatacagaattgtaaagtaaaataaaaaataaattaaaaaaaaaaaacataacacatagcttttactattgctatccttcaacatttgcttacaaatttattttctctccgatgatgattccttctatttaaaaaaaaagattttcatttatacaataatcagtttcttattataaaatttttcatttagaaattccttaatataaaataaacaggcatattagctactgtgttttagtctttcctattacgtgtacctaaaaaaagaaatagaagttaactaaagaatctaaaaatactggaaaaaagtcagactaatgagttcactcatcaatacattcttaacaaaaatgaaagatgccctctttctgactcttaatgccaaaaagtcttgcttgggcaaagtccccaccaaaagaactttttcttagttagaatcaagaccaaagcaagaagggaaaaaagaaagaaagatattctttctttaacagtcctctgataaagaatgagagaatttttattttctttaagatttaaaaattcatactgtatgggcaatttttagtgaatttcgtatttctcctttgtcaaaataagttaaactgtacacactgctttttaagaatatgtgctgttcccttgccttcactagtactttcaatttgcctagtggctcagttcctgtgtactattcatttacagtgctgagtatttgaaatacaatattgactccattgggttcccatggtggctcagacaataaagaaactgcctgcaatgtaggagacatgggtgcaatccctgagttgggaagatgccctggagaagggaatatactcactccagtattcctgcctggagaattccatggacagagaagcctggcaagctattgcccatggagcagcaaagagttggacatgactgagtgaataatactttaacttttcacctttttcattgactccattaccacccaaactttgcttcatgctcaaatatgggcgggatttcctatagctcagatggtaaagaatctgcctgcaatgcaagagaccaaggttcaattcctaggtcaggaagatcccctggaggaagaaatggcaactctttccagcttaagatggatatattctaagttgaacatcttagtcacgtgacgtatctgtaaaaattagcattgcacacgattaaagatcaagctcaagcatgtccattagataaataagactaacaaaaatcaaagtgaatgtatagccttatagtaccaagcagttggctgatagtttatgcctagattcactcattctgattcagggctctctaaaactgggcagagatattaacagaataaactagcacagcccaaatttgacacagattccctgtgtttgaaagtgcaagaagctgcacaaagtcaccaatctatcatcttgaagaataacaatttttaacttactttgtaaaatatgcccagagactaagacaacaatacttgcaaaaggagatataagcaggaaacttagtcattattgccagtatctggtatttattaagaactattcttagtttgttattttttccacatactttagaagggaaactaaaatactaaaacttgggttaatacaagttgtatagccttgggcaaattatttatcctcatgtataaaattggaataataggtcttaatagatttgtggtaaagattaaatgagtataatcatgttaaaccttagtgtagtgtttgatacataggcactcaaatatatcagctatcattataatcactgctcctcttgatttaaaggataacaggattactttgatttgcatggtctatgtttctagacatcggtatgatttatgtgcacaggagtagctgaaaactgcaaaaaatgaatggggagtgaataacccaaaatttagcattaaatcatttttaaaaatagaaaaatatagcaaatatattcatacttaacttttagtataaatatgtgaaaacaaggcaaagataatctaagaaatacagaacatatgtatctgagtaccaagtcacttcagttgtgttcaactctttgcgactgtatggactatagcctgccagactcctctgtccatggggttctccaggcaagaacaccggagtggactgcagtaccctcctccaggggatcttcctgagtcagggatcaacgtacgtctcttaatctcctgcatagcaggcaggctctttaccacaagcaccacctgggaagcctagatatatagaataatacatctagatatataaatatatctaattatatagaatatatctacaaaattagagagtagcttgcaaggagaagagatgagatctgttgtcaaaattagagtggcagttgcctacttccacatttgtggaagattaacgtctagacagtccttttaccacaaagaaacacatccagtaataaaaactactttttaaatgaatactgagctcatgatgtatgagaactatcaaaaccccacacctccaaaacctcagatatgttctctccctgctcatctcatacctaataatgcatgcatacatacatataaacaattgtatcatgtgagtgaaagtcgctcagtcgggtccaactctttgcgaccccatgaactatacagtccatggaattctctaggccagaatactggagtgggtagtctttcccttctccagggacccagcccagggatcaaacccaggtctcccgcattgcaggaggattctttaccagttgaaccacaagggaagccccatatgatttatatcatgtgctaaatcctaaacagcaagcaaggaataggaagaataggagttactctgagagcaaatactgataaaagcaatatgatgcagagactaagagcttgctagaggaagcttcaaagtagaggatctgattctgaagtctctgccttaagtataagggaccttggttattaacacctttcagattacagcaaaacaactgaaaatctctctagaggaaagaacactttttaagcagtccatcactagccttatggataatttttatataaatatgaacttacacttagagatcatgaaacatacaaacaagtaaacacagcagaaaattagcagacaacacgtatttggtaatcaaatgtttagaatatgggaactgtcaaagatggcatatgaaattactccaaataaaatgtttcagtaaatatgaaaggcaatgataaatatgagaaaatataaaaagagtataaacaaaataaataggcagattttgaataacaactaagtagaatgtttgaaattgcaaaacatgttgaaatggaaaattcagggaagaatgaaataccaaattagatgcagccaaaggaaaaaaaaaaacaataaaatgcacattagagctgctggaataaagcatgaagataaaaagaaataaaaggatggaaaacaattataataaatgtaaatggactaactatggtagtaacaaagattattataaatattgttttaaaaatccaattatatgatggatttatctaaagatgtgagactctgaaaaattgaaacaaaagatatatccagcaaatattaaacaagaaaaagttgggctagttatagtaatgctagacataatattataaaaataaaattataatgactatattttctttaaaaagcattattagacattaaaaagtcactatacaattgcaaacaattcaaatcaaacctatatgcacctaataagttagcccaaaaatagatgaaacaaagtatctcaacactgtaattgaagaaattttaatgtcaaattaaaaataaagagtaacaaagacatattcatgtttcaggttagtgtcctagtaagcaaaaaaaaatagtaaatatgtagttgatttgaacagcataaattgatttaacagacatagttaagaatatacattctgttggaacatacacaaacattttttaattggtcacataatagaccatacagttgaagtctagcatggaggattttgagcatgaccttgctagcatgtgaaatgagagaagttgtgcagcagtttgaacattctttgacattgcccttctttgggactagaatgacaactgaccttttccagtcgtgtggccactgctgagttttccaatttgctggcatatttagtgcagcactttcacagcatcatcttttaggatctgaaatagctcagctggaattccatcacctccactaactttgttgctagtgatgcttcttcctaaggtccacttgactttgtactccaggatgtctggctccaagtgagtgatcccaccattgtagttatctggatcattaagatcttttttgtatagttcttatgtgtattcttgccacctcttcttaatatcttctgcttctgttaggttcataccatttctgttctttattgtgtctgactttgcattaaatattcccttggtatctctaattttcttgaagagaactctagtctttcccattctaatgctttcctctattttttttttttttgcattgttcacttaggaaggctttcttatccctctttgctattctctggaactctgcattcagatgggtatatttttccttttctcctttgcctctcttctcttcttttctcggatatttgtaaggccttcttagacaaccatttgccttttttgcatttctttttcgtgcagatggtcttgatcactgccttctgtacaatgttacaaacctctgcccatagttcttcaggcactctgcctatcatatctagtcccttgaatcttatttgtcacttccactgtataatcgaaaggtatttgatttaggtcacacctgaatggcttagtggttttccctactttcttcaatttaagcctgaattttgcaataaggagtccatgatctgagccacagtcagcttctggtcctgtttttgccgactatatagggcttctccatcttatgtacacatagagagagcttatatagaaaactggatttagaaaaggcagaggaaccaaagatcaaattggcaacatctgctggatcacagaaaaagcaagagaattccagaaaaacatccacttctgctttactgaatactaaagcctttgactgtgtggatcacaactaactgtagaaaattcttaaagagatggaaatgagatcaccttacctgtcttttgagaaacctgtatgcagataaagtagaaacagctagaaatggatatggaataacagactgattcaaaattgagaaaagagtacatcaaggctgtatattgtcaccttgcttatttaacttatatgcatagtacattatgcgaaatgctaggctggaagaagcacaagctgaaatcgagattgctgagagaaatatcaataacctcagatatgcagatgataccactcttatggcagaaagcaaagaaataaaaagcttcttgatgaaagtgaaagtggagagagaaaaagttggcttaaaactcaacattcaaaaaactaagaacatggcatctggccctaccacttcatggcaaatagatggggaaacaatggaaacagtgacagactttattctcttgggctccaaaatcactgcagatggtaactgcagccttgaaattaaaagatacttgctccttgaaagaaaagctatgataaacttatatagcatttcaaaaagcagagacattactttactgacaaaggtccatctaaacaaagctatggtttttccagtagtcatgtatggatgtgagagttgtaccataaaagaaagttgagcactgaagaactgatgttttgaactgaggttttggagaagtctcttgagagtcccttggactgcaaggagatccaaccaccccattctaaaggagatcagtcctgggtgttcattggaagcactaaccctgcagctgaagttccaatactttggccacctgatacaaaaagccaacttattggaaaagaccctgcggctcggaaatacagaggcaggaggaaaaggggacgacagaggatgagatggttgtatgacatcaccaactcaatgaacatgagtttgagcaagctctgggagatggtgaaggacagggaagcctattgtgctgcaatccatggggtcgcacagagtcagacatgactgagtgactgaacaatagaccatacagggatatcaaaagacttcaaagaatgggtatcacgtagatcatgttctgtaactacaatgaaattgaacgaaaaacagtaaatcttgatacattcatataattttaaatgcatttctaaattaataagtctagttaataagtgaagaaatcaagatggatttacacatacttagaatttttaaattttaaatgtcattgaaaacatctataaaaacatgtaggacatagcaaaatgataccttgaagtaacggggtagtcttaacaaaattagaaaagaaaaaattggggggtttgtgagctaagcaaacataagtaaattgggggaaaatgagagagaaaaagcagaaattaaagaaataaaaatgagattaaaagaaagagttgatcctctaaaaaaagaaaactgtaatagacaatatttcagtgaaattgagccatttaaagaagttcaaataaataatatcagaaataaaatgaggcttgtagacaggtatagacaagagagtttaaaagaaaatgctatgagaataatttaagttataaattttactactaaaagaaatggtataatatctagaaaatcagtttttaaagcacattcaaaaagatgtttttgtaagtccgattatccttggagaaattaaatggtaaaatatattcccacacaggaaagataaaacccagctggttttctaggtgggatctcccatgctttcaaggtatagatcactccaacactacaaaaaatcttccagagaatgggaaaaaatatatactcccaacaaatttggcatggtgaataaaactttggcatctgtgtcgctcttcctactcatgacaccaactgtctcgctgttcacactgtctgcacttttcgctgagcccaggctagacaaggcgtgagctgagaggctggaaggagccgtaggaactacagacacatttattctcgcggggctggcacagcagccataacacagccactctcctgactcacgagcagtcatagcagcagccacaatataaccacaatgcagcagtaatatagccatggcataacctcatataacataaccacgatgccactccaatgtagccccaatgccatagcagctagggcttttgtggtgatgctctgacaggcgtgaggcacaaagcagcttgtgaccaagcaagtatctcgtgatgcccatgcgcagcgctgtaagtgatctcagctgttacacagttatcatttacaaaacgtgcggtgagagagcctgacctggccatcttggctaattcgctctctcctcacagtatcaaaatcagagaaatacaatcaaaggaaggtcatttcactcctgaaaatatatgcttggaatgaaatctagtggtgtgtttagaaacaaaaaaaaaaaaaggaaaaaaccttaatcaagattggtttagtgttagaaaactcataaaaggaattcataagattaaaataatcatatggtcacttttagatctgcaaaaatttttaataaaagtatacattttctaagtttcagaaattttatgttaagtttatcagccaagaagaacctgtggcaaatattcctaatggtgaaactttacaaatattccctttaaaatccaggggaaaaaggctatcgtcatcatttctactcaacattcaacaaggtttttatcttactttaagacaaaaaaaagaaaaagatttttaaaaaggaaagaatattatgaggattgaagaagggaaaagaaaaacagccataattcacaatgatataaatgcccacaggtaaattatgagattaatgaatcaggtgtctatatttaaaatcaataatccaaataatttattatatttctatcaatcaacaccatacaccaatatactaataaaagaggtaaatgaaagttgggcacaataaactctgaaagaaaataatacatattactaaaaaatattttaaaagacattcataaatagataattatttcataatgacttaacatactggtctaaaattttataggagatcataggttcaggaatagccacaaactcttgaagaaaattagatggagtatatactctgtgaattatgatgatttattatagagctatataatttgaatttatggaattggtagatgaaataaataaaaagtattgattaatgaaacagcaggatgtttgcacatgccagtgcaaacagaaattttatatgtggcattgcagattctaaggaaacacattgcagattctaggaaactaatcaaaacatgatctcaggaaactggatatccacacagaaaagactcttacaaaactgatccttatttgataccatatcaaaaaaattcaaatagtatagagatttaaatgtgaaaggacaaaattttaaatccttataagaaaacagaataatacattcagattttgcactacagaatacttagaaggctataatttcattaagacaaaattcctaactctaaaattataatttcagctacagtatacattttcatacgaacacaataatcactaaggaactaatcattaagagatatttacaatacatataatcccaaaagggtttggtatcaggaagttataaagaacactaaaaggcataagaaaatgaaaagtactacagcagagaaacaggcgactttttttcatttatttcattcctctcagaaaagatatataaatggctagtaaatatataaaaagatgtccagactcattagtgaccagggaactgaaaattactactataatgaaatatattacatttagattggcaaaaatgagaaatttgaagattcttatattgataagaatataatcaaaaggaatggttatatacgattgataaaaaatgaaaactggtaccactttggaaaataatttggtatatcttataaagttgaacatgagcacatttaatgacatgaaattctaatcttaggaatataccttaaggtcttataataaagttcctaatagaaaaaagctgaaatcagcccaaatattcactgacagaataaagatatgtgaaccgtggttaaaacattgtgtaacagtgaaaatgcatgaactaaagctcaaaaataagcataatcaagcaatttcttttaagaatacatacatgtgctataaaagtatttttcaaaacaatggaaggaactggcacatacaacatttatgcaactgattatctcttggggaaatgcaagggacagaataaggacttagcacaggccatagaacagtactgctaaatttctaattcttaaatctaattcataaatatgatagtggattcatggctattcattttatttttcttgctttacatttgcatataagttattatgtactattttgtatggataaatgatacataataaaatacttatttaagtatgtcaagctttgcacagcacttgatatttagtaattgttagtagttcctattattctttaaaacttatagaagcaaaaatcaaataatagtgacactataatcattaatcaagtcaactaaacaaaatgattaatatgtaaattaagagaaagataatctaaacatcatcctaaataattcagtaaacaattatataagctatatttacaaattaacttacccaatgtgtcacatttctctctagctccacaaatatcttcccttaaaacaaaagattttgaagcatttttagaaaatatttttgcaacaagccaaagcaaagacaaagaagctttaattttgacatgtctatttccctaaattgacttctaagatctagttctctcaagctctcaataagtttaaacctagagtaatgcaccatttttgcataccaataagcaaataggtacagtataaaagtgactgctataaacagctggagcttaatttcaatgaaaagctttcttaatgtatttttcacctctctgccttgacctttgcagtagtatatgtaatactcttttcttgatgtttcatcattatgaactaaagctcttattctctgctgcaaaataatgatgttctcaaatgttaccaagttgcttcaactttttgcttctacattactcggtctctaaccattcaatatgacaattctctagtctctttccccgtggcctcctcttagagcccttttcttccctcccattttaatctgttatctctagccataacctagggcattagaatacagtgtataaatgtgagcaattctgctttagtttggaaaagagataaagcacatcgactatgtcagttgtttcacactgactgaagattttcatttcagggttctagaaagtcaaaatttctctgaatttgaccttcaaacaaaagattttttttcccttttggccaaccaaccaagcaaaacaaactacaaacctgggattcttataccatgacagtggctgaaacaacagtgtgaattaataatgtacttataaaataatcatttcattttataataatagctgtttttcatttaaataaatagggttgagaaaaaagcttagcaaaagcagcccagtaattaagatacgaactgagcaacaaaacacagagcagatagggcttttttaaagtataaggagccaaaaataaattcggaggctttcttttccaagcgattggaaggtcaaatagggaagaaacaaaatgcattctcagttccataactatgttaattttcaaataattttcctaattctgttattctgtcactaacatactaaggaaatcattttgtttaggtcaagccgttacttagcaacctaatgctgctaatttcctatggaatcaggccagtgttctggtctaaagaaacagaagaatgctttcattcaagggtatctttcgtaatacaagttctcatagaacactactacgtactactgataaagaattaaggtaacaggaagtattcgtgatcatgcaggagagaaagggtaaacaatttcattggaacggttatttctagaactgtaccttgtgataagaacagcagtatcatggtgggatgggtgggcatcatcaagaacattctgagtttgttgccataaacagaaattgcgtaacgtggtagctgcattgaaactgatgactggtccttcctacacacacaaaaaagcagcaattcaacaattacatcaaaacattcatgccctctcccttccaaacttgtcagtgtttttgcagttcattaaatagcatttttataggcaaatgaagaagtcacttcattgctccctcatacctcaaacatattttagcaatccttaaaacattgtgatcaaaacagaactgaattagatgcttctcaatgtaagcatccaatatttcagatcaaaaaaactaacttctaaaaatgatcatattttaaatctaacagtagaattataaaagtgaatatctgattgttttcaaccttaactttttaaatcgtttattacttgctgtgacttcctctgttgtcatttcatttccatcatgatggaaaaagtcaacctcattcctttccaaatcaagatttttaacatatttttcaattatcccatttcatgatctacatacatatattcctcctaagagcctattacaactaggaatattagttttagaactgtttcttacctgctcatcatgaattataactaattttacaattactatgtttataagatttccaatacttgagtccttgtagattgctgcaacctgcaaggaaaaagtataagatttgatgcctaaaatcaatatttttttctcaaaaggaaattaaaaccaatctgacagcatcaattctccaattcatttgcacactggtatctcctagggagcttttcataaacctaaagctcaggccacatcccccctcatcaatgaaatcagaagctttagggttgagacacaggcatcggtatcttttaaaactccctggcatttttctgattccaatgtgaagccaagtttgagaaacagtatccttaatcttgttgctgagattaatctgttgatcagcagcatccatatcacctagagctgattagaaatacaaactctcaggccccacctggacaagtgagtcagaatctttagtttaataagatcttcaaggcatctgaatatggattggggcttggaaatactgttctaggtgattcagcaaaaaattaactctattctgggtcacaatccacaatttatgtgaccaaaatactccataaaaataaacacataaattttacctattctttggtagttttacctaatctttcttgccatgactgtgtattttcaattctgaatatgcttatggtttttaattgcttagcaccattagaatccatggagacaaattcatcaagaatcacagagtcatcagttcagttcagtcactcagtcatgtccaactctttgtgaccccatggactgcagcacaccaggcttccctgtatatcgtcaactcttggagcttcctcaaactcatgtccatcgagtcagcaaagagccacagaagtcataggtcacaatctggtcttccactctccaaaactggagaatgcaattctacaagggactctgcatgggctcagtttgtgactcatagtgaaagtgttgtacaattcaccaattaatatcctcctcttacagccaccagggaggctgccagatagcaagagtgtattccatgaccaacacctctgcctaggatttctgtagagatacacctttctggagctgggccacccatgccacgaaaattgcttctgaatgtggatcaccatctcctggaccactgcccaaaccaagacagcaattccttcaggaggtgctacttctttcatttatttaattaatactcagcaaagattccttcctttattggctacagacccagagacagggaagagaagatggtccctgaccttgtagaggttacagtttcctagaagtaccagtagtggagctctgatcctatcagccaaagttgcttcaacataatgaataaaatgagaaccatcagaaacaaacccaaaagcatctctggaaatgctgaccctgtaggtcagcatgaacttaaataaagtttctagcattcttcctattgttttagctgtacaaccacaagcacagattgaccatctttacctgcagtgatgccttttgttctagcattttttggcaagacagatggtcaccccagtggagttaagagttcagttaaacagagacaggcagatgactggcaatttcacactggtcggctagtattgcagtattgctcactttaaactggcagctgtggaaaaatctacggctgaactaatatagagagagttacatggaaaatgggcatctattgtaaaaaaccaaagtatacccatatgtgtgccttctgagttatcctctgaccatgtgaggttaaaagtacatgcttccctaagtcaaactagaaggtaaacaaagcacctcaaaggcaagcacaaaggctcttttaatgaaagccaattgcgaagacttgccactggccagcatgcattcctggtcctccagagataaaagcttaggcactgtgaagtatctaaatggctaatttctctacgcattgcctgaaatgtgctgcctacaaatgacaatctggatacacaatataaactataaaataaccacaaaaatgttttcagtttcagaagaaaacagatgtggcaccttgattgacaaatgaccaagcaaccagctagaatttagaaacacgttcccagtgttctgatactatgtttttaaaaatatattacttcagcaaaatttcttttaaaatttaactttaggaaaaaaaaataattcaagtaattatgcaagatgggcaatgttatgaagtagggtccttttaattccaattttaactgccacttgttgataacacctaattaccaggctactataaagattaagtgcaatggtatacagaaagcatttagatcactagaaaaatagcgctgatgaacctattttcagggcaggaatagagacacgggcatagagaagggacttgtggacatgggctggggcaatggagaggagagggtgagacaaattaagagagcggcactgacatgcatacacttcgtgtaaaacagatagcgagtggccagttgctgtctggcacaggagctcagctcaacgctctgtgatgacctagaggggtaggagggagtctcaagagggaggggatatatatacacacatatagcccattcacttcattgtacagcagaaaccaacaaaacctcataaagcaattatactccaattaaaaacaaacaaacaaatgcaacaacaataaaaaataaagaacactagttattgtaaagaaaagcttttagatcagggtctgggtcacagtgatcaatgacagctactattactacattcagaagaaaaggcatatgttatatataatgtttattctagttcatgtgtttcaaattaggtatcatagaatggcaaattgaaagcaaaggatccaaaagcttcacagttttatctctttcaatatttattaaacatctactggctcacctaataccattaaaaattcagtcttccaggggtaaaagacacagatggttcagtttaaataagtattcatatatgcccaaaaagaaatcctcaggatggtattttctaagtgtatacagaaacactaaaatgtcatgtttctatacatacttccatgtgtaaaatagataagctagtgggacgacagcatagagagttcagttcagtgctctgtggcaacctagaagagtgggacggtgggggttgagagggaggccctagagggaagggtgtatgtgtacagatagctggtccacactgttgcacaacagaaactaacacaacagtgcaaagcaaatgcactccaataaaaattaattaattaaaattaaatggcatgtctcttcaaggtcattttgcttatttaattgtagacacttacttcttactgttttatgtattgacccttataatctatgagctcacaccctatacatatgtattttttatagtatttggatatttagaggtgcttttattgaataactgttcagttaagctgaatggtgaatcaggcaggtaagtgatcagaaggcctacttgttatttcagaagcttttctaattatcatgacaacatgcttctcttagccctaaaactgccaccccataataggccaccacaatgatagggtatcatgtttgcaacttcctcataaatacataactagaaataatatttatggaatatttactgtgtgtcagatgtgatctaagttttaaatgtattaattcatttaataattctcacaacaaattttatgagctggaaactattgtgtccattttacatataagaaaattaaggtacggagaaattcataacacactcaaggttaggtggctgggagcaacagagtaatttccaccagaggtagtctagcttcagctctgactactttgtctgatcttatgaaatttcagcactctaccctaagtagctcttggcacaaatgttattttagaccctgacgtgattcatgccccacccctgacactgtcctgctagttacttgaccatggcctcagaagtcctaagcagacaagagacctagatttcagctctggctcttactagttacaagccagttgtccagctctggaaatagagttatctactttttgtctcaatactccccaccacactgagcaccaagcacccttggtcacaatgccctggtacactgcattagcattcaccagaagctgctgggaaaagggtgtgagaacatttgttttaaagaaaaaaattattccacagttggagaaaagttgagtaaaaagatatcttcatggatatcttggagtggataactcttagagtggataactccatgtgttaagggaccagacctgagccatgacaggctcaacaagctatactaggcctaagattcagattcttgtaaaacctgagtcatgattccgggaaaccacaccctgggaaagtccctgatggcgccaaacctgagccaatccggatagggatgcgggatttgaaaatggcgtgcgcgtagggctccgccaatcatcacccgccagctgtactaagaaccgcctgtataaaagcagctgtgattcagagctcggggctctcgtcaagactccactgcactggatgagacgggagccctagctggagctagcaataaacccctttatgcttttgcattgctgtggacgtcttattctctcagttttggggactcggacttcgggcataacacatggatatcttcatggagtcttgactaggctaagtcttgactagccttgactagtcttgacatgcataaatattaaatgtacaacagaggtatttattatatgcagcatctcactcaactgcctggccaaattctcttttcacctccatcaacaaaccacaggactagtatcccaccccacagactatactgtagaaaacactagatcagattactaaggtataagtaacttataaggtataaaaccatgtaatattattatatataattgtaatcactccattttagagtgctatgcatttggacttttattgatccaattaaaatgtgttcaatcctttatcctgtaagtgatttttttttcccctggcatatagaattcatattgctttacaggcctcataaaatagtaaacattgcttcatagataattagcaaaaggaaaagtgctataaattatttaaatattttaagaaaatctcaggcaacatacagttcgtgcaaagtatgaagcaaattatatctgtattaactgaccactattttgaaacacagcttcagtaaatgtttacatatggcatgtttagagatcacctttttttaaaagccatttaaaaaaattaagataattgacatatatcagtgtattagttgtaggtatacaatgatttgatgtgtgtgtgtgtgtgcatgtgtatattacaaatgaccactacaataagtttagttaacattcatcaccatatatagttgtatttttttttctaataaggactttttagatctactctcttagcaactttcaaatacaaaatacagtgttgctaaccatagtcaccatgctgtacattacattccccaggagttatttatcttataactggatatttgtaccttctgaccaccttcacctttgaagttatctataaaaaactgattttagcaaagtgaacagattttgttacacagatccttactcatcagagagatgttattgtttttaagttagaaaatgacattccacatatgtataaagaaaatatatgcaaagaattaagaacaggtagagcactgagttgaaggaaaaggtaacataaaatgattgaatgtgatgtacgaaagcaaatcattagtttttattctaatgtggttgaaaattttccccatcctaaataacatcagtaaagacaactcaaagaattgaaagcaatgatattaaggcaacgtaatgcaggtaaaactttctagttgataactgcctctaagagcaactgtgtttttaaaaatagggctaattcctgacaaatgatgctcttgagatttacattattaaatctgtaacaaggtgaatattatcaaatcaaactttgtaaacaaaaggagtgtggaggcttctgacaatatttccaaggtttattaaacagtaagtcattgcatatcaaaataaatctgctgagaaaagtaattttcctaatttaaatactacttaatagtttaacaattaatttaaaatgacattttaacctgataatatcacccaaattctctaaggaaaaattttagagtagcaaaaagttgaacatctctgctcgtttaacacacacttatttcattaggtacactatacaccacaaatgtgtttttcccagctaattttaatgttatttctagaaactctttgaatagagatcactaagctatttttacaacatgagtaaagcactctaaaaggtgaattaaatcacatattatttctatatccactgcactcagctattgctaaaatgttgaaagaaaaggaaaagtttgagaagacagcagaattgtttactttgtatgggatgagtaaaggtagataatcccctctctaaagtatgtatacaatctatctgctcaatgctgaaagcattcggcagtctccctcactatacctggagctcaacacaaaatctctttcgtcactttgaacttttctttaaatgactctcaatcatattccaggtgtaaatcacatgttcttgtctttttcctaagttactatgaccaaaaaatattaccaatacgccaagtgtgtctgaataaatacagttaatgtctctttaaaactcaggacatacacaaaacttgaatggcttcttcttcaactggcaacatttggagacagttttggggagacagcattcctcttacttctttagagcaatctggaaatggtcttcacaaatgcagataaaacaagctggattatatttgacaagtctccatgtactgtgaccaactgtccctgtctgcttaggactgagggatttccagggatataagatttttaatactaaaactaagaaattcccaagcaaaacaagtctactgactttctccaagtttctctttacctttaatatggtttacatctacaaatatagctacagccactattgttaactaataaaataacaatgcatgtccaaaatcataaagtctgctgactttcctatgctgctaagtcacttcagtcatgtctgactctgtgcgaccccatagacggcagcccaccaggctcccccatccctgggactctccaggcaagaacactggagtgggttgccatttccttctccaatgcatgaaagtgaaaagtgaaagggaagtcactcagtcgtgtgcgactcttagcaaccccatggactgcagcctaccaggctcctccatccatgggattttccaggcaagagtactggagtggggtgccatcgccttctccaatatccttatttaaacacttaacgaaagaaaaaaggaacagagaaaacaaaaaacccaggtaatctgaagtcatctgaaatcggacctctgaagaggaaagaaagtatgtataaaaccaaaactacctcaaaagggagatttatcctcctaaatttttcctcctatagtccatggggttgcaaaagagttggacatgacttagtaactaaacaacaacatctatatttggaatattcccctattcctcaactgtggcaatatttccctatgaatgaaagctaaacacagattaactgacagcatctacaaacacttcatcttaactgaaatgggctctcctaatggaattaaacatctagggaatggtacgtgcatgcattggtctgtggcttcaagcagtctcagaaccagatttactttccatgacggcagaacgttgactttgtcattcatgaactctggttttaaaacccccatggacaacttcacaaggtacatcacaatatcttctaatcgatactgtgattataatgattttaatcataaaatacatatgacaaaacttttctgaggatggtaccatcatcaaaactatgtagttattcaaaaattacttttgtgttcctttacctcttagagtcagtatttccaaagcactgatacaggagttgtcatttaacatcaaaacatgctgtacttataaaatctagtaattttcttcactatctctatcaccttcccaattttcttaatgaatatcttcttcaaccatataaaatttccaagtttaacccacactattccatataaatgatataatttcctatatagtatcctccatgtcaatgttctcattagaatcccttcacaatgagcatgccactgctgctgctgctgctgctaaatcgcttcagtcatgtccgactctctgcgaccccatagatggcagcccaccaggctcccccgtccctgggattctccaggcaagaacactggagtgggttgccatttccttctccaatgcatgaaagtgaaaagtgaaagtgaagttgctcagtcgtgtccgactctttgcgaccgcatggactgcagcctaccaggctcctccgtccatgggattttccaggcaagagtactggagtggggtgccatcgccttctctggagcatgccacaccagtatctaaataattacacatctagataattatatacatctagatagttacttcagattcagaaagtaatcaggataaatctgtatgtagagctgtgttgtcactttaaaaattcaattcaagtaaataaaacacatctacactgcacaaatttcaaagcttcattttagatgatatgtttgttgcccattataatgtcactcactctgaaaaaattgttaccttaatcatttatttacttattcttttattaacaattgagtgctcatttcataccagatactttgtttaggcagcaaaagcaatgtattcccagcacgtataagaatttaagataaaatgctatatgtaaggaaaataacaaggtcttaagatcttttcagtcacaatgaagttgatcggagagttcttgctaagtgaaatttataatagatgtgtccaggtcccatctttccagccaagcagacctgatttccctccctgtgaatatgagatatgatccaatatcctgaatgtgtataaatagaggaaactataaatttcatcagctaaaccaagatactcctgagcatgaaagagctgctttcagtagttacttcaaaataataggatttaatccaggaatgtcccagacagtaggtacatgtgtgtatatatttgtgtgtgtgttagtccatcagttgtgtccgactctgtgtgaccccatggactgaagcccgccaggctcctctggccatggaattctccaggcaagaatactggagtgggtagccattcccttttccaggggatcttctccaagggatctttcccacccggaaatcaaacctgggtctcctgcactggaggcagattcttcaccatccgagccaccagggaagcccgtacgtatgtatatgtgtgcctatgtactcttatgtatatagagcgctaccactaacacagaactggtgctcttcactagcactagagatctattcatatgccaccactgctcaacagacgctaacatcagaaatcgatgccaccaccactgctcaacagacgctaacatcagaaatcgatgccaccaccactgctcaacagagacgctaacatcagaaatcgatgccaccaccactgctcaacagacgctaacatcagaaatctatgccaccaccactgctcaacagacactaacatcagaaatctatgccaccaccactgctcaacagagacgctaacatcagaaatctatgccaccaccactgctcaacagagacgctaacatcagaaatctatgccaccaccactgctcaacagagacgctaacatcagaaatctatgccaccaccactgctcaacagagacgctaacatcagaaatctatgccaccaccactgctcaacagagacactaacatcaaatcaaaagttcttatagttactgtgatcttactgttcgttgttgctgttcagtcactaagtgactgactgactctgtctgactgactcttatgtctgactctgcaaccccatggacttgtgcacaccaggcttccctgtccttcactctctccctgagtttgctcaaactcatgactcttgagtccatgatgccatccaaccatctcatcttctgtcaccctcttttcctctggccctcaatctttcgcagcatcagagtcttctccaacaagttggctcttcatatcaggtggccaaattggtggagcttcagcttcagcatcaatccttctaatgaatattcaaggttaatttcctttaggattgactggtttgatctccttgctatccaagggactctcaagaatctcctccagcaccacagtttgaaagcatcagttcttcagcactcatactttacagtccaactctcacatccatacttgactaccgaaaaaccatagctatgactttatggacttttgttagcaaagtgataaaaagattaaaaagtctctgctttttaatacactgtctgggtctctcatagcttttcttccaaggagcaaatgtcttttaatttcaaggctgcagtcaccatccaacgattttggagttcaagaaaataaaatatgccactgtttctatttccctactatttgccatgaagtgatgggatcgaaggctatgatcttaagatttgtcttacatcctaagtttgttaaagcagctctattaataatagagctccttttattaccataagtacctttataacttaaaatatgtgtcccaatttgatttggtgaatgcaatagtagtaaaattagtattccctccttctatacagaaactattaaaaattcagagtcaaagggcaaaagatcaattctgtcactagggggcagaagttattcacatgatgaagtcaagattgaagcactttctgtaagcggtttgtttaaaaggtttttagattttttaaaaattgtccaagtaacagaatggaacacttgctatatacatctatatatttaaatttcattcagatattttggcttaaatgtaaacaatttgcttacatctaaagtttggggaaatttttaattaaatgtgaaaaaatattatgtaaaacattttagaaaatacaaaggacctgttaagtttacttacaattgacatcagagttagtacgtagtgctgcaagttctgtccatgatgatgaaccattttagagtcagctgtaaccataacttccacgtatcttggatatgataaaaaacgttttttcctggaatgcaattgacttctttcatcttccaaagatatattttttgaagtgtatccaaaaactctttcttcctttatattgagattttcattcacgtcactgtagttatgaaagggtagagtagttttctttatttcactttctggtgggggaagaatataataatatagagtcattaaattggatgtgactcaaaatactgcacagaatagaagggccaaaaatatttaatacttttacaactgcttccaatatgaaatataaggacaaaaatttattttaaagtcttacaccacattatcctaagcattactattgttcatagtaatataatgtccacattttcatatattgcactaacaaaaccgtatataagtcttagtttaacagccatgactattcaaaatgtgtattaaccactggagagaagataaaaacaaatcaaggagaacttaggcttttttcagtaggtaaattgagtcctcaagccactgactacatctaatctcattgcagagaaattatattttataggataaagcttcataaagtagagaaaacaaatatatttttttgttatgcaacatcaaaagagcaccaaatccatatagcaatagatggcttttcaaacccagaaattcaaaggttgatgtaaattttgtaatacttgattatataaaatacctgattactttgattatgtttgtttatatataaatatagcattaaaactgctaaaacattagggattattatggcaatcactttaagtccttctataaaagttaattctaaattcatgattacttgtgctaatggaaaaaattccatcggcagcttgaatgtttgttctatttccttctccttcaatttattcctctactctctttcttatttttctctgctaatttttctgataattgtttggtgaaagtatttagaataggaaagtggatcaaagcaaacaggtaagaaataaaaggtcctggatagttcataagtcaaatcatcaatactccaacaatcaagatttagttgtattacaaggattgtgaagtcactcagccatgtccgactctttgtgaccccacggactgtagtctaccaggctcctcagtccatggaattttccaggcaagagtattgaagtgggttgccatttccttctccagggcatcttcccaacccagggattggacccgggtctcccacattgcaggcagacgctttaccatctgagccaccagggaagctcaaggattagacagaatataaacctgtattacaaaaataattcattgcccttaaaattagtagcaactctatggttgtaaaaaatgaaactgaagtccttgaacaatgtttctacagacgaactgcttttcctaatttctaaaactatcctgccttttaatattactacgctgttaagttttaaaatatagctcagtgggagactatgggcatctgacaaactgaatatagattcctaacattttgtcctgccatatttttcctaaaggtgagtcaaccaccaaaatgtgttgtgctgtgctaagtcgctacagtcgtgtctgcaaggctcctttgtccatgggatgctccaggcaagaattctgtagtggactgccatgcccttctccaggggatcttcccaaccagggactgaaactgcatcacttacacctgctgcattggcaggcacgctctttaccactggtgccacctgggaagcccacccaccaaaatattcatgcctaattatttgaccctggagaagatcctagatatatctgatatatacaaatcccagtgttatcaggaaaaaagataaatattcatgttttgattatttgttcactcatttcattcattcaaaataaactttcattgagtaactgctcaatgtcagcaaacataagaaattaagcagaaaatagcatctaataaagtttatactctagtgggaagaataaaaaaaaatgaacacatatcaaaggacttaaagttatctcaaattagtccttaaataacaattcaatcaaaagttttaaaaagtgactctaccttaacaaaatggctaaaacttaaaagactgataataccaagtattgtctcagccactttagaatactatctggcaatttttaaattacacatgtacctatcctcatgtgaagtcactcagtcatgtccaactctttgcgaccccatggactgtagcctacgaggctcctccatccatgggattttccaggcaagagtactggagtgggttgccatttccttctccaggggatcttcctgacccagggattgaacccgggtctcccgcattgcagacagatgctttaccgtctgagccaccagggaagtcctgcaattacaatcctgatacctaaaagaaggaaaacatatgtccagaaaacactaagaatgtccatagcatgacctgcataaatacgaatggaataaagaaccaagaaagaaacctttacgtatatggtcaaatgatgtttgaaatttgctacggacagcccatgaagaatgaataggttcttcaacaaatggtgttggaacaactagacatgtccatgcaaaagagtgaaattggacttcatcttacatcatatataaaagttaactcaaaatggattaatatctaaaactactttgaaaatcctaaaagaaaactgaggaaaagctccatgacagtgggtttgacagtgattatttcgatatgacaccaaagctcaagcaataagtgcaaaaaaacagataaatgtgactgcaaactttaacatgtatgtgcattaaagaacacaatcaaaagagtaaaaatgcaatgggaaaaaatacttgcaaatcatatctgatgaggagctacggaagtaatacccactgctgctaagtcacttcattcgtgtctgactttgtgtgaccccatagacggcagcccaccaggctcccccatccctgggattctccaggcaagaacactggagtgggttgccatttccttctccaatgcatgaaagtgaaaagtgaaatcgaagtcgctcagtcatgtctgactcctagcgaccccatggactgcagcctaccaggctcctccatccatgggattttccaggcaagagtactggagtggggtgccactgccctctcccactacacatatacaagtatgtatgatatatatatatatatatatatatatatatatatatattcttataactcaataagggcttctctaatagctcaattggtaaagaatccacctctactgcaggagacctcagtttgattcctgggttgggaagatcccgtggagaagggataggctacccactccagaattcttgggcttcccttgtgattcagctggtaaaaatccaccagcaattgcaggagacctgggttcgatccctagcttgggaagatcccctggagaaagaaatggctacccattccagtattctggccagagaattccatggactagatagtccatggggtcgcaaagagtcagacacaagtaagcggctttcactttcatgactcaataaaaataacctgattttttaaatggggaaaggaatagaccatttttaaaatagtgaatagacattttaccaaagataaaaaatggacaaccgcatatataaagatggttaatgttacttatcattagagatatgcaaatcaaaactataatgagatatcgtttcaaacccacaaggatggctagtattaaaaagaacagaaaataataagtgttgatgaggatgtggagaaactggaaccttcatgaactgatggtaggattataaaacagggtgcaaccgctataggaaatagtataaaagtacctcaaaaatttatatacagaactaccaaatgatccagcaattctacatctcagtatatatccaaaagaattaaaagcagggtcttgaagtaatattttcccactcatgttcactgcagcattatttacaataaccgaaaggtagaagcaactcaaatatctattgattgataaatagacaaatgaaatgcagtatatacagaaaatgggttattcatctttaaaaaaggaaattattacattctctgatatggataaatcttgaggatagtatgataactagaaatgagccagccacaaaagtataaatactatttgattctacttattagctatctaaaacactcaaaaatcatagaaacaaaattgaatggttggttaccagggcctgtcaatatctccacctgagatagcccccaaagttctgtccagcctgggtgctacaaaattaaacatctcactggttaatagtaagctaaacaagaacacaattgaggaagtactgtggcttgaaggagtcagattgacagtaagttagaataggtgactctgtgtaggctgaaataatgaaagaaagaaagaagaattccaaactggaatgaaaacattggataaacaatatacacagaaaaaaaagaatccttagaacaaaaaaatatacaaattcaaatttaaaattcaattctggagtaattgttttaaaaagggaaaaataaacattaagaagatactataaacaacttgatacaaaaaaattaagaaatgttttctagaacatttctgaaaaaaacataacttatcaaaactgacccgtgaagaattagaaagtctaacagccacgtaacttaaaaaaactgaactctaatcaattcttccccaaaaacacagtctcaaagggcttcaccagcaaacatgactaagtaaagaagaaatagcactatttctcaaacttttctaagaatttaaaaaaagggaaagatctcaaacatgtttcatctgtcttttaaatgatgatatatcagaatatattcatgaccttggtttttgtttgaaaaaggactttaggacacaaaaaatactaaccaaaaagactattcatttgagtaaaccaagactttgagctgtgttcaaaacaacattattatgggaaaagggagagatatctggaataaatataaacaaaggacttatatacagattgtatcattaaccactgcaaataagaaatgagataataataaaaataagggagacttgaatatctcacaaaaggcaaaattcaaaggcataaacacaggaaacagtaccaaaaattaccaatcatctgggaaatccacattaaaacacaatgaaatttaactatatatcctcccaaatggctaaaatgcaaaatattgaaaataactaggcatggtaatatactgtggggctcctgaacctctcatatactgctggagacagtgaaaagcggaacattcactttgtaaaagttcagtgggctaagaagggattgggatatgtgacacagcttagtgcaaaaaggatacaattattaatccctttaaaatcagtgagtataggtatgcatatatactgctgttaaaacaagcacattaccaaggaaaaagatacttggtacaaattctaaattcaaagtgttgtgggatgacttaagaatacaaaaatcagcaaaagtaaggaaatagaaaaaaaagaaactgaataaaattaatataaatacaaataacacaatgtatattgtctattataaatcaagtggagatcatccatgaacagcatgggtttgaattgtgtgggttgacttatacatggattttttcaataaatatgtactatgatctgcagatctgaagacgcagaaccacagatatggagagccagctgtaaagggacatgcagactttaccctgaataggggagtcagcacctcaaactcctgccttgtttacgggtcaacttttcatttctaacaaatttatttatattaactcatctaatttttgtttaatcactaagtcatatcccactcttttgtaaccccatggactgtagtctaccaggctcctctgttcatgggatctgccacacaaaaagactgcagtgggttgccattccctttctcaggggatcttcctgactcatgagtggaaaccacatctcttgtactggcaggcaggttctttaccactgaaccaccagggaagcccaacttatttactagtgcatataaagtaagtgctattattaactctactttatagatgagtaatccacaatatgcagagactaaggaattaacatacacagttaattatatttttatgcgggtcaggaaacaacagctagaacgggacatggaacaatagactgattccaaatcaggaaaggagtacttcaagactgtatattgtcagcctgcttatttaacttagatacagagtgcatcacaagaaacactgatctggatgaagcacaagctggaatcaagattgctgggagaaatatcaataatctcagatatgcagatgacaccacccttatggcagaaagtgaagaagaactaaagagcctcttggtaaagtgaaagagaagagtgaaaaagttggcttgaaactcaacattcagaaaaccaagatcatggcatccagtcccatcaatccatggcaaatagatggggaaacagtggaaatagtgacagactttatattcttgggctccaaaatcactacagatggtgactgcagacatgaaattaaaagacgcttactccttggaaggaaagttatgaccaaccaagacagcatattaaaaagcagagacgttactttgccagcaaaggtccgtctagtcaaagctatggtttttccagtggtcatgtatggatgtgagagttggactataaagaaagctgagcgctgaagaattgatgcttttgaactgtggtgttggagaaaacttttgagagtcccttggactgcaaggagacccaaccagtccatcctaaaggagatcagtcctgagtgttcattggaaggactggatgttgaagctgaaactccaatactttggccacctgatgtgaggagctaactcatttgaaaagaccctgatgctgggaaagattaaaagcaggaggagaaggggatgacaaaggatgagatggttggatggcatcaccgactcaatggacatgagtttgagtaaactctgggtgttggtgatgaacagggaggtctggtgtgctgcagtccatggggttgcaaagttggacatgactgaccaactgaactgactgagctgaaaatgaaaacaaataactggttcatttctaaaaccaggaaaaaaaaagtaactggttcatatacaaataaaggtagtttaaatttgtctatcagaaagcaaaagctttatagaattagattagtaaaatacagccatatttaagtaataagtagcacatctgagattgaaatcctacatatcgggctccaaaattggtgattttaaccactaaaacatattgcttgacaatgaaagttaaaggaaaaaaagaaaactgtaatttaacaacaaacacactttcaccaaaacagatatcacgagtttgatctctatagacaatgaaataatgataagaatattgtgcagactttgtaaaatatttgaattatttggaagaaatctgatttcatgctttaacacacaacaatatgagtgaattttgttaattacaagtgacaaaaatgaaaaaaattaaatctgacacatttttatgtagcttaaaaaacaaaataaagatttaagaaatatgtatggatgcagtcacattacagaaaaagcagggaggtgacacgcatgacatttagaatgatcgggtggggggaggtaggtggactaaatgggaggggggatgcaagcaaaattgtgtggccatatatgggctgctgtccaaatgctgtatttcatattggtttatatattcatgactttcattattattatcaacaagttcttaacaaacagtaatttataaaaccaactactattaaaataataggacagttctgattgctatcatacagtagttttagaaatgctaaatattaggaaagaaacactgaatattagaaagtttttttgctaatgttttgattctgcaaatctaattttgcaaagacaaatggctttgataactaaaataaccaagaggtcacatttaaaactttttaaacaaacaatcctcaacaaaggaataattcaacaatggaatgttatgcagatatggaaaaaaaagtgaatgaggtctatgtgttttcataaggaaggatgttcatgatgcatttttaagtaaaaagtgtaagtggcaaaataatatgaatgatagtatgatcttatttttgtgaaaacaaacttttacaaaatatacagattcataaaaacttatatgatgagccaaaaatacatggaagtatatacctcagacttttagcactggtcataaggagaggtgtgactagacaactactaaattctttcattaatatctcagtctcctttaaatcatgacaatgaatttgtttactggtttctgaattacagtattatttttgaaaatagcatctgtaactatcttacaggctaaacattttatctcattacctttttctgatatttatgcttaagtactataatcaatgatcataaaaatgacctctccaaataccctaaataaatgagcactatgcaaagctctctgccaattcaattacaccatttctacgcaatgctccattaactcaaatgtttaagcaatgtcttgtcctttattaaaaacaagtgtattatgacccaaaactaatttagaccaaagcactacatcttaaacatcatgcaacatgataatctgcttactagaacataaaatacttaaaattacaaaagcaaaaatacagtattctagaatgcaaggtgattaaataatccatgcaaatataaactatgaaaaagtttgtcaaacaataatgaaattatccataatttgacttgaatgttctactgacacctcatattcaaagcatataaaaatgagttaattttcttttcccatcctgcgtttccctttttctatcaatgtgggcaataacttccaaataccatactgaaattaaactgtataccacaattgggctcttcctatctttccttctccctttgtatctgatcaccaagttttgccacttcttcacatttttccttgtattgctcctgtcaataatattattgcctctaaactcattcagagctttctcacttaagagtaacattgttggaatcagttcaattcagtcgctcagtctttgcaacaccatggactgcaacaccccagggctccctgcccatcaccaactcccggagtttactcaaagtcacatccattgagtcaatgatgccatccaaccatctcatcctttgtcattcctttctccttctgccttcaatcttcccagcatcagggtcttttcaaatgagtcagttcttcacatcaggaggccaaagtattggagtttcagcttcaacatcagcccttccaatgaatattcaatgattgatttcctttaggatggactggttgggtctccttgcagtccaagggactctcaagagtcttctccaacaccacagctcaaaaacatcaattcttcggcgctcagctttcttcatagtccaactctcacatccatacatgactactggaaaaaccataaccttgactagacggacctttgttggtaaagcaatgtctctgctttttaatatgctgtcttggttggtcataacttttctgccaagtagcaagcatcttttaatttcatgtctgcagtcaccatctgcagtgattttggagccccaaaaataaagtctctcactgtttccattgcttccccatctattcaccatgaagtgatgataccagatgccatgatcttagtttcctgaatgttgagttttaagccaactgtttcactctcctctttcactttcatcaagaggcttttcagttcttcactttctgccataagggtggtgtcatctgcatatctgaggttattgatatttctcccagcaatcttgattccagcttgtgcttcatccagcctggcattttgcatgatgtactctgtatataagttaaataagcagggtgacaatatataaccttgacgtacctcaggaggcaggtctggtggtctggtattcccatctcttgaagaatttttcacagtttgctgtgattcacacagtcaagggctttggcattgtcagtaaagcaaaagtgtttttctggaactctcttgctttttttgatgatccaatggatgctggcaatttgatctctgattcttctaccttttctaaatccagcttaaacatctggaagttcatggttcacgtactgttaaagcctggcttggagaattttgaacattactttgctagcgtgtgaagtgaagtgaagtcgctcaatcatgtctgactctttgccaccccatggactgtagcctaccaggctcctccgtccctgggattctccagcagaaatactggagtgagttgccatttccttctccaggagatcttcccaacccagggatcgaacccaggtctcctgtattgcaggcagatgctttaccatctaagccatcagggaagctcatcactagcatgtgagatgagtgcaacggtgtggtagtttgagcattctttggcattgcctttatttgagattagaatgaaaactgaccttttccagtcttgtggccactgctgagttttccaaatttgctggcatattgagtgcagcactttcacagcatcaactgttaggatttgacatagctcaactactcccatcacgtccactagctttgtttgaagtgatgcttcttaaggcccacttgacttcttaaggcccacttgaatactaaatcaaaataagacacaaactatctcttgaataatcccactaacatcatcagtctcttctccctcccattcacccttcatttgtatccaaaatgattcatttttaggactatccctttcatctattccttattcaagaaattacaatggatcttcattgctgataagattaagtcccaagcccctccccatcagcccaccactaaacataggcatccccactaccatcaagcaatacactctgtcaaggcctgaaaacactgctgggcaatatgttctgccctttggatatgcttaataaatgttcatggaaagaaaggaaaaggagaaggatgaagaaagtgaggatgataaatttggaagtgagatagaaaaaaggaagatagaaggagggagatggaagaaaggaatataatgaggaacaagacaataaatttatcagatgaacagggcagagcaggggtaatccaatcagttgtcagctgcttcgtgtgcaaatgatttctcccattctgactgttgtctttttgtcttgtttatggtttcctttgctgtaaaaaagcttttaagtttaattagatcccatttgtttatttttgtttttatgtttcttactctaggaggtgggtcaaaaagagtcctgctgtgatttctatcaaagagtatgtaaatcagataactagtgagaacttgcagggaggtcagcctggcactctatgatgacctaaggaaatgggtgggaaggaggttcaagagggagggcataaatatatgcataaagctgattcactttattgtacagcagaaactaacacaatattgtaaggcaattatacttgaattaaaaaaaaatacatatcaagtacaacattcattctggtctctgggctgaggctggaattgatactcctccttctgtatttaaccagatgagtaaacaaattttacattctccaacagcacgtaatcatccattttaaaaacaagcatgaaatcacatgaagctcattctagactttcactatttcaaactacttgttaaatacccaataggactctcagctcaaagaactgagtgtgccttgaaataaaggacgatcatatcacatatactgtgaaatctcaattatattttctcatgatttaaatggccttctggatttagtatatgtcctatattgcaatcttattgagttttcttcttaatactactagcaacaataatggcaaacataatattcaatgaatgctaactatgtatcaggtacttgtaaattatctcattattaacaactttataaagtgggtattttgattatctttatttgaagaaagcgaggaacgggagggtcaagtaaactgtacatgctaacatagcttgtaaatataattttagaacatattttttaaaacagtagtattccataacataaaaattcataaaaatctatagttctctgatttgtcaatattagaaatatcaaccacagttaaagaatttgctcataaaatactttataattctttatttcaaagaggctcacaagttaataattagaaccccatctattagtgataaatgtgcagaacatcatggacttgcctgtggccagctgaaacatgaaatataaaagcattattacatcattagtcctcattacatccctgaatcagctactattatggtgtactttttaaaacagagacatgtgacacaagttacataaaatttcaacagccaccaaaaataagtgcataacaaagaaatgaattcatattttctcaatatcaattattacatctgaattccacatcacatgacccttttaaaggtcatgtgtgggtaatacatgcagaatgttaagaatttagtaattagtgttataatggaaaatcctgcctcctacaaaattaaaagaggagttagtcatatacaagaaaatatggggtcttgtcttctttgcattacagaaccatagagttgagctaaaattctgatataaaggggtttagctctatcttttactttactttttactttagtggccctcagggagaaaaaaaaagggggcactggaaacccccaaattactcccattaatcctacatatagcaagaaattctagttccttctgctatgtgttctgacaggacaaagggcacactggtaaatattacagagtaaatatcctttcttccacattctgaaaagtcaacctttggggctagctctgaagatgtacaagacaatttctctaataagctgaatcaaggattcttgcataaatcaagagttaaaaacaagcatacattcattcataaattcaaaacctttaagattttttaaatggagaggaatacacagccattgtctcctatcagcttttggcactccaacctccacagaataggaacacttgcactgcccttcccattttaggaagtgccttttcaggtcttaaaatcccatctcttttcagaaattctaaaaaaagtgagactaagacaaagtaaccaaatgatacaaatgtaagaagaatttgaatgtataattacgtatattgatataacaatgttatattgtatattgataataacaactgcttgaaaagatgctgaaaattttatcaatgagttaaatttatacccttagcaactaaacatgtaaataaaatgtgacattcattctttaaagaaaagtcagttattcagaattcatgctgaacactacatatctcattgatatgtagtgagcttattttgcaacagggcacgactgctgaaattagaacatatcataacactattaaaatagaagccaattgagaattctgcctcattagtcttgtcttcctattttcagatgagctttcatggcaagccactcctgaaccacagccacctactattacttaatagtagataaaataactccctctgctttccagactttccataacttgctcctagagctccatttccccatattatctgacaatctgcctcatgtggaatcattccagaactgccttgagataattttaagtactaagcatcctaaaacacctcccaaattacaaagttagttctaagtaggcatttataagcattacatgctacttgggtcttccctgatggctcagcagtaaagaatccgccctcaatgcaggagatgcaggagatgcccgtttgatccctgggtctggaaagatctcctggaggaggaaacggcaacccacttcagaattcttacttagaaaatcccatggacagaggagcctggtaggctatggtccaaaggttgcaaagagtccgacatgactgagcatgcacacacaccctattttctctatccctgaactgatatactatttttccacactttgccaagtaactctttaaaatcttacactacctgtagtgttattaactatgatttatgtctcagattttttggaaaataaagttataactcataaaaatataaaatgtaatgcaaagatatactttaacttattctttattccaatgttactgcagtcattacaatttatttcttaaactaatatattatttcttaaacttaaacaatttatttcttaaactatatttatttctttatatatatttcttaaactatatatatatatatatatatatatatatatatatatatagttaaaattcctgaaacagctttggctgaaaatagacttcttatatgaaatattctttgaaactttaatatttgcttaagtttttttttaaaaaaagaaatattaaaggtatttcccaaagtaaacagtgaaaaacttagagatctaattaaaagacagtcattaaatgaacataaaatgttaaaaattaaaatgttatgcaatatcttaacagtaattaacatctttgagtgagtgaagtcactcagtcatgtctgactctttgcgaccccatggactatagcccaccaggctccttcgtccatgggattctccaggcaagaatactggagtgggttgccatttccttctccaggggatcttcccaacccagggatcgaacccatgtctcccgcatttcaggaagacgctttaacctctgagccaccagggaagcccatagactaaatttttattcacattgcttttgtaaaggcttttattaagcccgattcttttagttgctgacaaaagtgggggaataaaatcaaactctgaaatcactgataggtcaaattcttatttgtaagcaggtattttgtttatcttatgctacacttcagtatttaacaaattaccactttctaaaagaatatttttgtcaatcgtacaccaggaagttattttatatctaggtacatttatatttaggcaaaagaagttgcaaactgcagatcagatcagagtgggaagggagtttttatcttcagttttctggctctcttccaaggaagaaaagcacaaggaagaagcctccttgggggaggtcccgagaactggatgctctccacatgaaacagatgtctgtctctgacctgaccactggcccagctctcactctgccagtaatgatcctcacaaagagtggaacaccagctgggaccagccaagaacctggccatccttgtgcaattttccccaacatttgtactcattgtgaaagtagacaatctcatgtcttgatgtctttaaacagagctgtttttgaatgttgcaattctgaattagattttaattgcaaataattagaatcttgcatcttcttcatgagaaaagtatcatgtgactcaatactagtgatcaaagattaatacttcactagcatttgtagttaagtcatgtgttggaagaccaaaacaaaactctaaaatgaacaatctggctgattagtaaattaatactttacatagaaaattttatatttattactctccaaaaatctattgaattatttacttctttactttctgagtaattctcaaagaatatcaagtgtataaaacaaaaatcactatatagattatatttcatagtccatcattttaatcattctttccaatagtccttcatcttccttgctcttttctatgcaataagggaaaaattacaaaccaaatccattcataaacatagatgtagaaactctaaagaaaatgttaccaaaactaccctgataagaacccaagccagatttgccatttgagaatcaaataactaaacaaagggggaaaaatatgatcaccttggtacatgaaggaaaaagtgttttgataaaattcaatatccattcataataaaagttctttatgaagcaggagtttaggggaactttcttaatcagataaaaattgatttttcttcctaagaaagacctgcaacattttgttgtagacattgtgcacatcagaaaacatcaaaagctttcattccaaaactgctaatgaggcaagaattttcatcactgcaatttccattcaacattgttctagaaatcctgttgctgctgctgctgctgcttctaagtcgcttcagtcgtgtccaactctgtgcaaccccataggtggctgcccaccaggctcccccgtccctgggactccccaggcaagaacactggagtgggttgccatttccttctccaatgcatgaaaatgaaaagtgaaagtgaagtcgctcagtcatgttcggctcttagtgaccccatggactacagcccaccaggctcctccatccatgggatcttccaggcaagagtactggagtggggtgccattgccttctccatctagaaatcctagtcagtgcaataaggcaagaaaagaaataaaatatggaaataatctttcaaagaaagaaataaaactgtcttatattttcatatataaaatccaacagtctaaacagataaacagaatatataagcagaacaagatcaatgtaaaaatttgcctgcatttttatgtataataattagaaaatgaaattgttatatataaaatgtatacattttatgtataataactagaagataaaatttaattatatcatttacaatagtgtcaaaagcggctaaatacccaggaagaatccaaatatacaagacttctataaagaaatctagaagacattaaatgagaaattaagcaggactttatggatatgtcatatggatagattagaagataattctggaaagatgtcaatgcttcaaattgatctattaatccatttaaatccaataaaaatcccttttattcttttgtagaaatcaacaatatatatatcaagaatagccaaaacaatcttgaacaaattttgaataaaatcaaggatctgttgtaccacatttcaagacttataacacagctataatatttttaggactctttttagctttttatttgtcatggcacatatcctaaataagccaatagaagaaaaaaattatatataaaacagatccacatatatgaacacttttcaaaataaatgttatgctaaatgttttaaattcctatgaaatatctcaattgatttacatgaagtaaacttatttacactgctttcaaaagttttaagttcactatttctggattttgataaaaggaataaatcaaagtttgaaatggataaattgagctcttaatttcaaagatatagtttagtttagtttatgctgcattccaaggcttaatgtatcactttttctataaaagttttcaccattgacaggattagtcctcttaaagcctaaagatagttaatctaagtctcctttgtaataccttaattttatgaatttttattcctgaaaatattctggaacccattccaattaacacaatacttagggtcaccaatcatctctactttgcaaaatccaataatcagttctaaatcttcatgttctttgaattctcagcaccatttagccaattagtcttaccttttgaaaaatcttttatcacttagattgggacactattgcctcagctttttttattatctccctactttttcagtcttcctggttttctcctcatctccacaactgctaaaaatcaaatacctcattgttcagtccttggactttttctcttctgcatataatccattccctacacaattttatacaaacttatcttacaatatcatttatatggtctgacttcaaaattattatcccaagtttagactccttactgatcttccaactcatatattccattgcctacctgactattcaccttttgtatatctaattagcaccttaaattcaaaatatctaaaggctaatttcttgatattctcctctaatccatgatttccacagacttccccatcttggtaaatgacaatccttctacttgttcaggaaaaacaaacaaatataaaacataaataatatgtgacaattttaactctcaacccccacctcttttactctatttatataaaacataaataatatgtgacaatttttactctcaatccccacctattttactctattttttactctgtttaactctcaacccccacctatttttactctcaaccgccactcttcactccacctatcagcttgacaattaagatgtacacagtatctgtgtacatggctaacttcatgactattgcccaattcaagacatcatttatcaacttgatgactgcaatgtcctcttaaccttccttgcttctgcccttctgccagctttgcaggataccttacaacaatctgagtgatatctttaaaaaaacaggctgaccaggtcactcctacgttcaaaatcctacagtggcttccagtgttgaagttatagccaaagccactattgtgtcttacaaggtcccacatgttgaggcgggttcaccaagaatctaaaatagctgaactttcagtctctcacttacaaagtccctttcaaagaccttgaaggaaacctagaagcttttgtcctcataatttatttattgcttttgttaaagaagctccgccttgtgtaatccccaggtcccacaacctggattcacccacatgtatacgatctagccagccacaggagatgctcacttcctctccttctaccctctcaccctgctcacagcaactatacttgtgcaggctggtcatgggatgagttacacaaccccagcaccactgtagcgccagtgaaggaggtactcacatatatgtatcataagtgaatgaacaagtgaatgaacaaatccatgttagggtcaaactgagacctcatcctccagagttactgatgtgaaacaagacccagagtctcctcttagcagtcagcgtttttctccactcactcaattaaagctcaccccggaacatggagcaggggaaacctgcacacatatttcaccactgaactcttcttgcatcccttcttcattcttcttctagcacaccacaagacggacaggctttttatttattgaccctacatcatatatcttctccttcctgctgaatgctataaatggagtcccctagggccagtagtgaatgtactactatagtaaaagagaaagaattcagaaatttcttccattttcttgtagcacaaatttaaaagtcataacctgaatatcatcttggtctttctatttgcattctttacattaccgaaataaaaaactgagagatggtcaggagatccaaatttgctagcatgtatgtaaaattattgaataccatgacagcagaaaaaaatgaattgcctgaaaattctggacagtgttacactaagaacaaaattactactagttctcttacttgtaccacagcttgtattttagttattaatgtctcagtcctctactcattctgtatatttcaacacaaagttcagctaataatctgttaatgtcagaaatattctcttcattctgtatttgtcagttgttggcattttcttttgccagtgctcataggcaccaatttttataacaccagtattataactgcccatcttgtgtttctgcagtttcccctctctagcatttattcacctaacttctcacaacagtccccagtttctctttgggtatctatccccatctattcacttagtcaatagttccagttatactcacctgaccctaccaacagagcgatgtagctgattacatctctgtctcccagtaacagcaattaattcagaccaagtcaggccaaacaacataatcagaccccatatcaggatctttgtttgacctacttgaggagatgactctcaatatctacaggaccagtgttgaggtaaagcgcaaacccctaatccagtttatactgacctccatgaactttcccttgtttacctccccagtattagatcatcctgcttctgtatggtatacttctcacactctccctgtctaatccctactcttcttctgggtttcagataatgagttattttctcaagtaagcttctacaactttcatacctgtgttagactgtctttgtatgatgcaccaaatcaccttctaaatgaacctcatctttcatacctatctgtaagcagtccagttattttagtactaacaatttctcaactatttacatggcatgtattataagcataacatagtattagttgctgtgaggaatataaaaaatgaaataaaatataaccctttagtttaaggagcataaacagagaatcttaaaactgagatgtaggataacagagcacataaaaaattttaaaacaatacaagatagtgttaattatgtgcagaataaatagagcagtccctaaatagtgagatattacagagccagaaattcaaaagtccatgatcttaatctgacaaaatcatgggcaggtatgttaaccagaggagaatgagtaagatgctaattataagtaaaatgaatagcaacttttagtagagtaagaaaccatactaagacacagttagtaaaagagctaaaaattaataactccattcacatttttatctctataagtgaagagcatcttaaatatctaaataaacatatttacagcaaagggatttttttagaaatttgagaagatacctctcactgtagagaaaacattaaagagaaatttctttaaagaacaagtgactcagagtatgaaagaagccaaaggaaacatatggtggagacagagcactgaagaacaagtactgctataataaagggtaaatgaagatgtattcagttctagcagggaggcttatattaccgtcaagttaaaacacatagaaacttaaccaagttgcaaagtgactaagaacactacataagaaatttcaaaacaggaagtgtaccaatctaaaacaaagagagaaaagttcttaatggaggtggaaaagaaacacagatgcacagtgcatttcaaagaaggattaacaatttcagtctcacctcaacagagatttgatgaacacatgaaccagaacaagttgacattagaatgtctagcaacaaaaaaaaagctgtaattttacagcgagagataagcaaatctttaacagaaacataagaagtggtttggcactattatgtttaagacacaggtgtagtttcctcttcaattaggggttataattatgatcgtttcttttatacctcgagaagcacaactctccccatcaattcccaagttagtacaaagacatcaagaaaaagactacgcttcaaaactagaagaatggatcattattcctaccagcaaaacattctccagtttaaagacagagtgtgaaatatataatcccaatacagaggaaagatttttaaaaactgttaaatttttaagagtgagtagtcttcaggcagtccttcctggttagaactgttgttaccacagttaaaatatgaaggatcacagtgactttccatgatacatattttcaaaatgtacctgtcagactggataaatatatcttctggttcccagcatgtgggtttccttcttcatatcccatttaaaacacaattcacccaacgagaatcattaacttcattacaagtaaaactaggtaatacaagacttcacaaataaaataggacttcaaagttctggaactgctacaggcataataatgataacactaagtatcaaaaatggcagactgatccttctctttggaatgaattatttaatacatttcactattacagcaagcagaatacacaattggcaaaacagatcagctaataaaataatgctatatgcacagaacaaataattgtcacagcactactaggtcttcccctcacagaaaacatgcatgaaccaaggatgattacagctcagaattaccctaaggaacagtgacacatgactataaggagtgctttgaaaagtacagatccgtatatatatatatatgggcttccctgggagctcagcagtaaagaatccgcctgccaatgtagaaaacgcaggtttgatccctgggttgggaagatcccctggagaaggaaatagaacccactccagtattcttgcttgacaaatcccatggacacaggagccttgcaggctacagttcatatggtcacaaaacgtcaggcacgaccgagtgactaaacaacaacaagatacatatatatagatagatagatagatatcttctattccatagcattcacagtctcaaaatcttaataagttggtcaaatttcacagtttgggatttttcttttcttcggatgaaattgaacttaagaacattgctagtataataaaatgaagaatagccacttaagcaaataaactactttcatgaactttagcatgctgattaacaaatcaaaaaagaaaacctgaaggttgaggcaaataatctgttattcaaatataaatcaatcttttctagttaactgaacaggactttaaaaagcatgatactggatgcttagggccagagagatggtacggggagggaggagggaggggggttcaggatggggaacacgtgtatacctgtggtggattcatgttgatgtatggcaaaaccagtacaatactgtaaagtaattaacctccaattaaaataaataaatttaaaaaagaaagaaaaaaaagtaatacttgctaagtttgcatatagcatatgcttaatttcaacagaaatttgaacaccaaaaacatacttttggggagtgcaggtaaaaagggagatgggagagagagtaactttggattcagatgtattgaatctaagataccctgggacatccaaggaaacactggcatctggcagttgtaaccctgagatttcatcttaggacaagctgaagatgaacatgtttaagttctatatcatttaaattagtagctaaaagttagagaagtacaaagaaaatatatagactatataagaactggtataaagtggtggccaagaggtgcacttttaaaaaatgttcaacttagaagatgggaaagcaataacaaccaagaagagaaatgggaagaaagctaagaaagaaaaggacactgagaagagagaggcagagcagtgatggcagaatggggataaggctcacgcagcctcccagggaacacagaccagctctgatctgccttgaagagtaagtaatggcagaaccacacttaacagaatccagagggctatcttcattgctatcagcttttcagggtttccctcccccttgggttttaattttgttacttgtggttgtttgttcatctcatgggttttatgagcttattttaccatttccactggattttacttctaatatgtctgatacctacctggaaacctggcatccacaatagctaaggttcagctaccaaacataattcatatggccacatgataaaatctgatgtaaaaaaaaagttaatccatcaagactgaagcaactatgaattaaatcaatagaaatatgagaaaaaatggcttttccttttccaattaattctttgggttcctaagttaaagctttaggccagctacttgaagaattctcctcatgattttagaatatataagatcctgcaagtattacagaacagcagtgtgtgaactggggacgaaggaaaaaacctttgataacattttactaatgacatttacaactctccattttactaacaggatgatgattagcagctaattatttaggccattaattgattgcctttttagtgattaaaaatatgtatgttaattatacctaaaaatgtaggtaatttaagaattgaaaagaatgatgctactttagcattttagtagataaacattttgggaaaatatatcgtgattaaaagaacactaaaactcatagctttctatttgcttgctgtttgtagtttttataataaatctaatttagtacaaggtttttttttggttttttttttttgcttttttaaacaaaagggcctggcttttcttgaaccattctctttctgataatgaacggattgtaaatgcaaaaccctgcatatcattatgtgaaacatttacgcattcagagtgtctacttggtggctttcttcttaagaagctaaacaattcattaaacaagctgctcgtgaatggtggatcagaacaagcataagctgccttccgtagaattctattgtggagctgcacccatttgtgttttctttgaagccataaaaatgaaacccttatgctcatattaaaagcataagaaaggcatctattatgtcaatagatttaaaacacggccttagacacagtgagaaccactccaaaatggcactcatataatagcaaaggttaagaagtgcattcccagggaaaaccttcaaaggcctacatatcattatatccccaaacagatggtattgcagtgtttggaaccatagttcgcggacacctacaatctcaaataaatcctttctaatcccactcttgtctagattttatactttgatggtaagtgcaggtgcttttcaccattcttcatagagtgacataaaatgatatgatgaagattcatatatattataaggacacagctcttaatacaacttctatgcaacatacaagtattctactagcaacagacttacattttatagaaataatcaattcctaacttctaaaccatgaataatcttcatcagtttgaattttacaggaaaaaaaaaagaggaacatacttctctcatatattgctagaaataaaaattgattaaaaaaaaaacacttctttgcaaaataatgtggaattctctagtaacaatgtgtatactctgaatggactcaaacacaagagatgaggataagaattttcacagcagcattttttatagtagcaaaaaactacaaataacccataagctcattgacaggaagacagatatttgaactgtgatatataccctgcaatgaaaatgaacagctgctacatgtaccaacatggccaacccttaaaaacaatgctgagcaaaaaagtcccagaaaactatctgaaatatttcctttatacaaatttaaaagtatgtgaagttgagcaacatgttattgttactaaggttcagttttttcaatcatttaaattctgctgagaaaaatcatactactgtcactaacagattaaagtaaaaaatttctgattctttgttacaaatctcaaatacagtggactgaacacaggttagaattgcacaggtccacttttatggagtttttctcactaaatacctactacagtactatgcaatttatgattggttgaatccatggatgtggaactgcatataaggagcattaactgtaaagttatacatgaattttcaactgggcaggggatcagtaaccctcatgtttttcaaaggctaactctactgaatacttttttgaatgtaaacaatgtacaacaaaattgcctatagataaatttctaatggatccctcaggtcaagaaaatttgtttaaaatatcacatatatcaaaatttaaagaaaatacataaattctaaactaaaaaagatagtaatcttacagttttaccataaagagttttacttcacagtttacctgaaacatcacaaggcttgtgagactgcagaaaatagttcctctttaattcctgtctgtatataagatgtggcttgctatgatcatcgtcatgttcactcccatctgccctcattataggttctaagaaatattcaccgtcatgtgctttaaatgttcccatctggaaataaagaaaataaaaattaattttcttctgtcactaagtagaaaaaatgtgtgctgtcccacaggttaaaatgaggacacagaacaagatagccaggaggagttcattcactaaagtcatcaactgaacataatgtttcctttactggctcacgtcttcttatgtataaagtcacggagaatgaataatattccaataaacagaggtgaaataacaggcattccagctaggaagaatagcataggcgatagcatcaaaatgcccaaaagcttagcacattctagaagtgagaaagcctgtttggcttggtctatgtaaggtaatagtgtgagacaagatttaaaaggaaggctcaggtcagataaaagatctcgagtgtgatgctagcaatctaaactttgtgagaagttgagagccattgaagagttttcacaaagacctgtctcctgaactccagaaggcaatatctaacttgctttttgacatctccacttagatcaacagtagtattctcaacctccacatgtccaaaaccaaactctttattttcagtctaaacctggtattcttcaatgctccctctttcagtaaatggcaacagcattattcagattgcttcagacaaaagtccttagagaaaaatgaaggatggctctctctcaaatctcacattcaattcatctgcaaatccaaatggctcagccttcaagatataattgaagtccaaccacttctcccaaattttaccactatatccatgaactaacctaactttctttccttcctgaactaaatcaatagccctctacagtctctacagaggagctacaataatttgtcttcagtcaagaccatgttgctctcaaaaaagacgaaaacaaaaaaagtattataactgttcaaatcactcagtaagatccaaattccttatcatggtccacaacgtcctacacgatctgcccactcctttccaccaccccatccctccaaatacacagaaaaccaaaagctccgacttcatcctctgctcttccactctggctcattctcgagctccattcctgatgtctctgctattctttaaacatgacaagtattctcgtagctcaggacctatgacttactaaacttgcctcaagcacttttcccagctggctccctctgtgacttgtttaaggtccctgctcaacactcatgaccctatgtattaaaatgttaccagcctcctatgtctatccccactatccaggttcatttttctccataatgcttatcactacctgatagattattacttatatatattacctgtctgacaccatccaccaaaatataagtccatgagagtagagctttgtccgtcttctctgcatgcctgtcatgcctgccacatagcatattggataatatatattaaaggaatgaataatattgtaggcagtaaaatttaatctagtgacactgtgtgttgaaatactagatttataaggtagaagctatagctcggaagggaggtaacaaaacctaaattatggtgacagtgatggtacagcagctggaagagaaagattacatgatgtcagtgcctaaggaaagcagaaaaacagtgagaggaagaatttatgacggagataattatctgggaaaatattatttccaaaatgacttcagagatggtaaaaatccaacaaacctctttactaccaaacaatagaaaagataccagagttacatcatagaaactcctggccttgataatttcatagaggaatcccaccaaacctagcaagagcagataatcccactgttattttcactgtttcaaactatgaaaaaaaaaaaactagttatttttatatatagtgtaaacacaaggagaaggcaatggcaacccactctagtactattgcctggaaaatcccatggacggaggagcctggcaggctgcagtccatggggtcgctaagagtcgggcacaactgagcagcttcactttcacttttcactttcatgcattggagaaggaaatggcaacccactccagtgttcttgcctggagaatcccagggacaagggagcctggtgggctgccatctatggggttgcacagagtcggacacaactgaagcgacttagcatagcatagcatagtgtaaacacacggtaaaacctagttaagacagcacaaaagcaaaacaagtaccaaaaaaacccaaaacaaatataggacaagctcacatatgactatcaagctaaaaatcctaaattatataagcaaacacaagtctgtaacatgagaaaatgaccagatggagtttatcataagaatataactatggttcaacattggaaatcttaattcatcatagtcacttacacgaatgtgaaaaaaaaaaacaagttttttgaaaaaagtcaacattattgatttttaaaacatcaataaaatataaatagacagatgttccctaaacaagatgaattgtaccacagtccaagacaatatcatgaataacaaagatatatgcaaggcactcctacttaggtcaggaatacaaggatgcccagtatcacctgttgtagataacagaattagataaaagattagaaacaaaaaattggaagagctaaaactgtcatcttcatcaatgtacaccttaacaaataagaattgaaaaactactataaaaactaagtgaatttagtcacagaatatacagattaaatagtattcacatatataaaaaacaatgagaagatattgtggaagaagcaatccaatttataaatgaaacatgacccagcaacaccaccactgagcatatacactgaaaaaaccataatcaaaaaagacacatgtaccccagtgttcatagcagctgtatctacaacggtcaagacatggacacaacctaaatgtccatcgacagatgaatggataaagaagacatggtacatatgtataatggaatattattcagccataaaaagaaaaatgaatttgagtcagttatagtgaagtggttgaacctagagcatgctatgcagagtaagaagtcagaaagagagaaacaaatacagtgtattaagacatatgtacgtaatctagaaaaatggtatcgatgaacccatttgcagggaaggaatggagatagagatgtagagaatggtcttgtagacatagcgggggagagaaatagatctctttctctagtttggtgaggctaaattatagaggacaggcatttatcatcatctcagtagctaattctgaaatatacagcagatatcattcacatacattcatcatttatttccacctaccaataactctgaggcaagttattattatccttactttacaggtgagacaaaggagtaacagtgaggttaagcaccttgtccaggtcttacacctagtaagtaacaggatcaaggtgtgaacccaggtagcctggctccatagtttgtgccttaataccgtgcactgtgttagtgatcggacaccaattctgataaaccctcaaaacagctaacaaatatttaaagagcaggcagaggtcgagggactagacatacagaggtgaatgtgacaaattttctgctttcaaagaattcatacttatataggaaaagacagattaaaaaatgcaatatgcctggtggtatatcggtcctattccctattggtaataggtccaataaagaaaaaaataaggcagggagacagaatcccagagggtgtggggatggaggcactctgggctgaggctggaataatgaggaggtagccatggaaaactctgggagaacactgcaaacagaagagcagtgactgaaaggcccagtggcagggaaaagcttggcaggttcaagcgacagagaagagtgaggctgaagatctgcaaaaaagggatacccagcagaagctcaacaggcaggagccagctgcactcattacacgtgacagtgaaaagcactcattacgcctccaaagacacaaatatacgtttacctacatatgaaacttggcaaatttccacttagaaaagcatatttctgtgaagagccaattcagaaatgaattactgaattatggatgctaatgacaactacagttttagtgaatgaggcttcatttccatgtcttaattgtaaatatccttaagttatttagggataataactttgaaattgttgctttaaatttcattgttaataatatatttaaatcaccattttaatcgaatagtcactcaaagctatttaaatgattcaggcaattatagtcataaattcttctctacattcataattattaccacacaaaagtaaccaagtctttactatgtctacagttccaaaatctaaaccattgcctgagacatagcaggcactcaacacatatctacagaaataaacatttttgtaacatggtaatgtacctgatttccccacaccatattcacattacttatcttttatttttttctctaatatttttaagttacaatagtttagggacttggctgagagtagcataatttctttcaatgttaaaaatttaaatgttcaggcattcttggtaacaaaatatgtaaatatattaggaatacacagtttaaaggcttaatataaaggagatttcatcagatatatggacattctagagtagaaaagatacatatatatatatatatatatatatatataaaacaaattcatctgtttcttagtatattatattctagcatatttcattcattctaccagtgctttttttcaaacacaactacaaatcacttattttcaacacataccagaattctaactttctttgccttcccagaaaaataattaactatacttagaagtaacagactatttctgaaacctgagtaaatggactcataatgaaaaatcactttctgcctattttaaaaagcatgctgaggagggaaaatgtgatagcatcctggtaaaagatacaaatagacatgaggaggcttgttactcatcccaaaaatgttttgaataatgtcacattttccccaagcaatgctgaaaatatccatatcttggaaacttttttatattcctttttgatcaaaattttactgtggggtacttcagtggtaatgttcaaataaacccacacacaagcccaactttcattctcatatgaaaggtgaatatggttgtatcaagcccattagtacctcctggagtcatgctagaacactctaaaagtggaagtgttagttgttcagtcatgtccgactctttgcaaccccatggactgtgtagcccaccaggctcttctgtccatggaattctccaggcaagaatactggagtaggtagccattcccttccccaggggatcttcccagcccagggactgaacccagtctcctgcattgcaggctgtttccttaccaactgggccactacaaaagaccctagaatattaccctgctaaaaataatactgcttttataactcaaacatcttttcttcaacaaaatttcatgttttaaaagaattagttcaagaaaaaaataattgtcctcaaaggggtttacccatatttatcagtgaagaagtattttgcttccaacagctttcctataaaccactctactgcagaggactttctgcacaaataataaaaaatattagagctttgcctaaaggctcctaatgaagcacttattttttttttaaacttggaaaggaacctggtaaggcattggaagaattaataaaacaggtggctcatagaattatatttagagcatgccgtatttttagcaactgcctgtgcacagagagtcactgcaacttgattcatgagaaatgccaatcaaattccaaactcttccttttgatgactattaaaagcagaataactagctttcacttgagcaaggggttccaaatttcttgaagcaataacctgctacttgccacactgttttgaaaggcagtaagtgattatacaacaagttctaatttgctctcataggccaaaatttttatgtttagaggattttcatacaattgtttttccaacatgtttctatttcactattgtgacattcattcatacataattttttctaataacatggcaagcacatgtactgtggccacaaacaataatgtattctcagactttattaaagggtaaaaacaacaagcacaaaatataaaccatttggactcttttcccaaaaacttacagctaatcacattaacattggaaacaacagaactagttcaaaatgaagtactactgaacaagacaattagagccaatattgagaatctattttagtaacaaattgctcccaactattaacaaaatcagattttaaggattcaaacactggtaattaatatcatgaaatcaaaatgtttagtttctcagtctttaatcattgctgctgctgctaagttgcttcagttgtgtccgactccgtgcgaccccacagacggcagcccaccaggctcccccatccctttaagtcatatgaaaatcactttgacactatttgtaataaggaagtctgaatcctcggtttgcactcatggaatcctgggcaagccacttcatatctcaaacctcagttccacaactcgtaaaacaaacaaataattctatctatctaacttccttagaaaggcaatgtctgttaaaatgatgtcactgggctttccaggtggcactagaggtaaagaaccgcccatcaatgcaagagacataagagatgtgggtttcatccctgagtctcaggaagatccctggaggagggcatgacaacccactccagtattcttccctggagaatcccatggacagaagagcctggagggctacaggccataaggtcacaaacagtcagacaagactgaagaaaaactcagcacagtccagcacctaacttccttagaaaggccaagtgtatgttaaaataatgtcagtaacagttttgaaagtcagtacattttgacacaggatggaacagtctccactaaaaccacaaatgttacagcgactattttttattctaaataaagtataagtgttaagtaataaaagaagataaagattaactctgagttttatctttattttagggtgctctattcaatgcaaaaggacttttcccctgacagctcctcattattacactactaatcatgccgaggaaatggtgtatgatacacaagcacacactgaatgaatgaacagatgacaggaagaacatttaactggccccaggagcctaaggcagaagatccattgcaaagtgtttgaaaagatgcgtcttctctcctctggttcagttcagttcagttcagtcactcagtcatgtcagactctttgcgaccccataaactgcagcacgccaggactccctgtccatcaccaactcctggagcctacctaaactcatgtccattaagtcggtgatggcatcaaatcgtctcatcctctgtcgtctccttctcctaccctcaatctttcccagcatcagggtctttttatatgagtcagctctttgcatcaggtggccaaagtattggagattttgcttcaatatcagtccttccaatgaacagtcaggactgatctcctttaggatggactggttggatctccttgcagtccaagggactctcaagtcttctccagtaccaaagttcaaaagcatcagttcttcagtgctccgctttctttataagtccaactctcacatccatacatgaccactggaaaacccatagccttgactacacggacctctgttggcaaacaaagtaatgtctctactttttaatatgctgtctaggttggtcataactttccttccaagcagtaagtgttttttaatttcatggctgcaatcaccatctgcagtgattttagaaccgaaaaaaattaaaggcagccactgtatccaatgtttccccatctatttgccatgaagtgatgggactggatgccaggatatttgttttctgaatgttgagctttaagccaactttttcactctcctctttcactttcatcaagaggctctttagttcttcttcattttctgccataacggtggtgtcatctgcatacttgaggttattgagatttctcccagcaatcttgataccagctgtgcttcatccagcccagcgtttctcatgatgtactctgcatagaagttaaaacaaggtgacaatatacagccttgatggactccttttcctatttgaaaccagtctgttgttccatgtccagttctaactgttgcttcctgaccggcatacagatttctcaagaggcaggttaggtggtctggtattcctatctctttcagaattttccacagtttattgtgagccacacagttaaaggctttggcatagtcaataaagcagaaatagatgtttttctggaactctcttgctttttcaatgatccagtggatgttggcaatttgatctctggttcctctgccttttctaaaaccagcttgaacatctggaagttcacggttcacatattactgaagcctggcttgcagaattttgagcattactttactagcatgtgaggtgagtgcaattgtgtggtagttgagtattctttggcactgcctttcttagggattggaatgaaaactgaccttttccagtcctgtggccactgctgagctttccaaatttgctgacatattgagtgcagcactttcacagcatcatctttcaggatttgaaatagttcaattggaattccatcacctccactagctttgttcatagtgatgcttcctaaggcccacttgacttcacattccaggatgtctggctccaggtgagtgatcacactgtcatgattaactgggtcatgaagatcttttttgtacagttcttctgtgtattcttgccacctcttcttaaaatcttctgcttctgtcaggtccataccatttctgtcctttatcgagcccatctttgcatgttcccttgctatctctaattttcttcaagagatctctagtctttcccaatctattgttttcctctgtttctttgcatttattgctgaggaaggctttcttatctctccttgccattctttggaactctgcattcagatgcttatatctttgcttttctcctttgctttttgcctctctccttttcacagctatttgtaaggcctccccagacagccattttgcttttttgcatttcttttcttggggatggtcttgatccctgtctcctgtacaatgtcacaaacctctgtccatagttcatcaggcactctatcagatctagtcccttaaatccatttctcacttccattgtatagtcataagggatttgatttaggtcataccttaatggtttagtggttttccctactttcttcaatttaagtctgaatttggcaataaggagttcatgatctgagccacagtctgctcccggtcttgtttttgctaactgtatagagcttctccatctttggctgcaaagaatataatcaatctgatttcagtgttggccatctggtgatgtccatgtgtagagtcttctcttgtgttgttggagtatttgctatgacccatgcattctcttggcaaaactctattagccttgtcctgccttattctgtactccaaggccaaatttgcctgttattccaggtgtttcttgacttcctacttttgcattccagtctcctataatgaaaaggaaatctttttggggtgttagttctaaaaggtctcataggtcttcatagaaccattcaacttcagcttcttcagcgttactggttgaggcatagacttggattaccatgatattgaatggtttgccttggaaacgaacagagatcattccctggtttttgagattgcatccaaatactgcatttcagactctttttgttgaccatgatggctactccatttcttctaagggattccggccaacagtagtagatataatggtcatctgagttaaatcatccattccagtccattttagttcaatgattcctcgaatgtcaacgttcactcttgccatctcctatttgaccacttccagtttgccttgactcatggacctaacattccaggttcctatgcaatattgctctttacagcctcggaacttgcttctatcaccagtcacatccacaactgggtgttgtttttgctttggctccatcccttcattctttctgaagttatttttccactgatctctagtagcatattgggcacctaccgacctggggagttcatcttttagtgtcctatctttttgccttttcataccattcatggggttctcaaggtaagaatactgaagtggtttgccattcccttctccagtgggccacattctgtcagacctctccaccatgacccgtccgtctcggatggccccatacggcatgccccactttcgctgagttagacaaggctgtggtccatgtgatcagattggctagttttccactaacgttctttattccccactccacaggacaactccagatctccagtgtgaacatgagaggaaatactgctgatcctcaccgaaaaagacgatgctctcaccacgtcctgacccatgaggattaagaatataagacagactctggattcatctacccaagattcatgcagccaaatgactcagctatataaacagtgtcccagagacatcactaacaaggagtaaattctgtaacttttctttttcctggaggaactgagatgtgtttgaagtcacatggattcactagaagtggagagaactatcaaagaaatggccatattcttgtggggtctgtgtagtggtcctcagaaaagtctctcccaacctcttactaaaatatctgtgaagacataaggcctaaagtcattataacaaattataaatttaaaacaataagaaatgattaagaaccactccatagatgtataatggaaagatgttcataatctagtgtcaaaatattttaaagtagtattacttaacaaagatttatatgtaagtattatatatataaaatagttagaagcacacatattatatacctgccagaccatctgtcatatttacagcatatgttttcctagtttcactttaaattttcaatttatttacaattattctgacacatggtactcttcaattattaagcaaatatcatctttatcactcattatgtcttcctttacatttttctctaatgattataatatacaagaagtttattctatcaatacttctttaatacagttggaatttggtttaccaaagatgagaattcaatattttgcttttcttcatagaagagtcttggaattcacagatttaatgtaaatgccttttaggttctggtaactgtcacaggaaactaatttgaagcaattaccaaaacttgacttcccatcagaagtcaacctggttttcaagattacattttccaagatacatgagcctagactaaagaagccctggacattttcattgtagaataatctacagaccctcagaactaccaacattctgtaggaagttaaaatttgaattacagtcatgctgtatattgggttggggtggtgcagataatttaccttttaattcagtaattgctaaaccacaaggagccacatctgaactttatagcaaagactgtgcattactcagagatcctgcacatgagcagaaacagtgcccctgaaggcttgtctccttatatacaatataaatatgtttgaagtgtaagaagagaaaagcacaggtatgcttggtgcacagaaaaacagcctacagtgaaaagtgttggtgatcaccagaatctactgtcctctcttcctcatggacatagcactgtccctcattttctagcccctgacatctaggcagaaccagggaacaaattttcatcaacaaaatgtagacagaagtggtgtgtgtcacgtttggactgaggaagtcaagaggttaggcatgcctttccaattctgttactatggtaataaagcattttatataactcatgaatatttttaattaatagatttactgctgttgtaataaggacacgactgtatgtcatatataacagtggctggtacataagcactgataaggatcagttaaaaaaaatgatctatttcttcctctaaatattagtatgaaatggacagcttaagtaacattattttatgggaaacagcagttacaagatacacagaaatacagccacaagtaacaaaggtacagtgtaagcccatgtaagtgttagtctgtcagtcaagttcaactctttgtgaccccgtagactgcagcccatcaggctcctctgtccatgggattttccaggcaaagatactggagtggtttgccatttccttctccaagccatataaatgaagtaataaatggaacacaactaacttggacatctgaaaaagcttcaatctatatgaaaaaaatgttaaatatgtccaagtatttcaactaaaattgataaaatacttttcttgcactgaattccagaaaagaattaacctaattacctggaacatataaataaaagttgctctagatcattcattcaagtaccaaacatttctatatgctatactgggtgctaaagtaaacaggactatcattctcttacttaaaatctataaatgacagaaacatggataaataaccacaattccatatatgatgtatataaagtctggtggtggaatgaaggtaggcctggtcagctcttcccagagaagatcagggcaaagaaagcaagtaagatgagtaggagttttaggaaaaggacattctagacaaagagaagagtaaatatgaactcaaatccttctgaagattaaagtatacctatggtaaaatcaaacaaatatttctagaataagtatctgtttcttgccacctcctcctggtattgactttcttggtcaatggctacaggatcactcaagtcatttaagtcatgagtcattaaaaccatatttttcgactgctcttctgatccaaaattctaataggtctcctacaaggttgcataacttcagcaccattgacattttggtatgcttcattgttctgggcattatgggatgtttggcaacatatctggcctctatgcacttggtgccactagcttcccctgcccgctgcacagctgtgacaccaaaagtttccccagacactgccaatgttccctaggggacaaaactgcagttgagaaagactggtctccatgtgcactgcccacagggacccactcttcttgccactgcaactacattactcccagcggctcccctaccctacccatacaggggtcgtccttacacaacggtggtcttctcagtgcctcctctgcccctgcacaatgtgcataagcggataccactcctaacacatcgggctaatataccacctacagtttaagcccttactctcgtaatacatttcaagccttaatccgaacttaactttaatattctccctcacttcccaagccactctatgcttcagcagctgagacccacaggaagccctcaaatgttcatatccccaggtgtttagtcatccctaagtccagctgagaagcctcctacagcctaggtctcataacactcttacctgcgcctttctcaaagttcacccagcacttcttatactcctctgttaacagcatcgaacagactatttcattgagcgggtgtgtgtgtgtgtgtgtgtgtgtgtgtgtgtgtgtgcttgacatcacggtgtggtggccctgagcaggctgagcataattagctaaggactcccacagtgggctttgaaagccatcgtgcttatgccccagcagtatctcacatgcaccggtcagccagtaaccaagtgtggcctggctatgaagaggaaactttctcttaggagggattcctctgccagacaaacagttttgagggggagctttgtggaaccttgcttagactgccctgcagcctggggtacttctacccaacactgtcatcctctcttcactggtttcagactctactgctctctccttctctctaacacagacactccccctaaataaactctttgcacagttaaccccaccttgccatctgaggacctaggctaacactacaatgttaaaggcagaggcataagaaagtctccctagtggtgtttacttaactgagtatgggaataaataaaaggggtccttgtgaattttaccaacaaataatacagaatagcatgtgtaatgatctaaggctctaggacttctgagcaaatagaaagtttagaaaataaaagttttacaagacaaaaaaacagtaaagagactattgatggtttccatgcagttatttcctgtctgaacaaggagttactagagcacctcaataatcagtcatcagagggcattagtgtctgacatgctgcagaatggttcacatgagaaacttcaaaaaagtacacacagacactgcaagctactccgtgagaatactgtaaaagccagatgcaacgtctggttttatgacatctggaaactgtttctttcaaccaaaaagactgcattgcttcaaatcccaccaagaaacagtgaagttaattgtctaggcagtcgggttagtccctgagggcctttggaagaagggaacccaccaggtaatgtaagagagctggtagagagacaggggttgtcgggaacgtctctgtacaatttacacatgccatcctgaccaggatatgcccccaatattatatcttatggaatactgacctctactttggcaactgtctatcaacattatgagaagataaataatatgaccgtgaaaaaaaaagtctgtagttgaatctaggggtattaaggcctgataactatatagtctgtgactttatcaatgaactaaaaacagagtttgattagccattatatcgcttatagataaccttatgatttggctctattttcatatctactatagattttagaaacataaaaataaccagaaatgtttgagtatgtgataaatacttatgagaaagaaaaattacagggaaggtaagattagaaaagcaaagttatacccacatgaaacaaagaaaatttctggcagactcatcgccccttctggttcttgggcccaaaacacttaagaaaactaaataatacaagttatggttcagtggtttaatgaaagagaaaaacatgtaaaacctaagacttccagaagtagggaaaatatagctgaatagaaattaaaagaaagcttcagttcatatatctgagttgcaacactagcaactaaaaggaatcaataaatatgttgtggtgtcagtttttttaaaggctgtatgttcagaggtgtttggaaaatagtaatttgtattttattcccttcctctaaaagtcaagttcctcagcagccaccagagaaaggaaggacagatgctacttcaagtgagaagctggaaggggaacaagtcaagtgaatgagacatgaaaggagaacttagtggattccaggaagaaaagaaggatgggtgcaaaggaaacagttgaaaggaggtgtgtgcgctgactcactggaggttaaggtctggaggcagaaagcgagttagacggtctaggggcactgccaagataagtgcttcagcgtgctacacaggattcagggaagggatttctctctgcaaggtcctctcacacacacactgaactaaggggcaaggcagagtctggcaaggggaggaatcaagtccccataacctggagggtctcagaaccttagtggggtctggaagattaccaatggcatcaccaaaacaccttccatggggacagcactgcacaggaattaagtgaccctgtgtcgagggctgcacaatgcatccggcagacaagaaatcaaacaggtgttgcagccagaactcagagggacacacagcgctagagagaacccaggagggaatgagtcagtgaaacccagctgaacaaagaaaagccatcaggctcaatatatagctgctggtgccagaaaaatgcagagaccaaggcacaaaggacattggaggccagaggaactggaggacaatatgatttctccaccctcctctcaagcaatacaaaggcctcaaaacactttatggccctgtatgaggtcactttcatcaatggtcaacatttgcctgaatccagcaatgctcaagataatgaacattagcagggaaaaaaaattaggaagtttcacactcattcaagatattcgggaaaagcatttgattaagtacaacatctattcatgattaaaagcaaaactaaaagcaaagaacaaccagaaaaagagaacctcagtaagactcgctctaaatatccttcagtaaatctcaactttagcaattaacagactgacaaagatcaaagctggatcattacagcagcatatatacaaagtcacaaagatgagttgggaaatgagcaggaacagggctgtaggtgagcattactgacaacctgggcattgcatcaaggtggatttgcaaaaactcagctggttcaggttgtgggtaatgcaactttatctggatctaaaagctaatctgagatttaaaaaagaaatctggtgttataacaaatggactcaagcctaccagaaattctgccacctgacagaactatcattctaaagagtgctaaggagagagttgaagtagaaataaaacaatcataaagtgaaagctgctcagtcgtcatgtctgactctttgttaccccatgggctatacagtgtgtggaattctccaggccagaatacaggagtgggtagcctttcccttctccaggggatcttcccaacccagggatcaaacccccgcctctcacattgcaggtagattctttaccagctgagccacaagggaagcccaaaataatagctaatatctgctatagtactaatatcataagtgaaaaaaaatcaaagaaatggcactaatctcattagtgattcagacttataattggtcctcttcccacttctaaaagatttttagatcctggtacctctagttatctgctatgttactagaaatcttctatctctgccatgactgatgtcttaacacagacttacacatacaaaaaaagtgagataaagctgagttatataggtatgaaaaatatgtttttaaatgttaaatcaaattaaactgataatatcaataagtctatcaaaagcaaagtacatacataaatcaaattaataacacagtataactagacaactatgtcctaattgacgaagtgagaggaaaggatgaacttctgttaagacttaaaaacattttcaaaaaggagatgctgaaaaataatttgaactacaccaacattgtgaatcaacatgagcagaaacatcattcctaataacgtttcccatctggacttttttccatgccttaaatactaaatcaagaaaacatactgactgtggcaaatttgtggtagtaaatctagaattgtccagacaaactaaacattttgaaagtttctagaaaagagaatatttttctttccttttatctgtagatggctgtgtaaatattagcgtgtttctgccattctgatgttgaattttacatttatctatagcaggaaagaaaattgtccaaggcattccttgtatgtataaatcaaaataataattatatctatatataaaataccttgagagatatatatgtaatatctttatatatatacatatataatatatatatatatatatatatatactaaaatagcagggaaaagaacaaagagacattccaaatctacttagtaatgaccaatactcacacccagaaagacatcttacatcaattaccctggaaggaagtattatattttgcctagagggaactgttatcaattttctacttcatcagaaagtaaataatgttgatgttctgaaactcttctaaattttgaccaacaaaagccagaatacttgaagagaatcctgtagccaaattattagtgtctttttcttgaacacaaacttaagtttgtgtatgttttgatattaagtgttcacaactaagggttctgtgaacttggatagaaaagtgttacatctttattttccctaacctctgatacttaacatttccttcaattatgattgcaggtaaaactgcagacattgtgactttgttagcaacaaaagaatagttgtgcattcgtgctcagttgcttcagacatgtctgaccctttgtaaccccctggactatagtcctccaggctcttctgtccatggattctccaggcaagaatactggagtgggttgccgtgcccttctccagggaatctttccaatccaaggatcgaaccctcatctcctatgtctcttgtattggaggtggaatctttaccactgagccaccagggaagccccaaaataacagctacttcaacactaacataatgtaatatgaaactatctggattatttattctcattaccaccacagaagtatagaagtagtcttctccccaacagatattatttaatacattaataaagaaggaagtattatgacatcacaaattctaatacttataacattttgattattgttagtatttaaaagaaagtcaattaaagaacatgtatgctattttacacagtaaaattatgctggcaggaggtcctgggtttcccctagaatgctgaaaaagttgatggggagaaaaaaaagaaggtttagaacctctgttttagaatccaatatttcattttacttcctctctctacaatgagatttttacaaaatccacatcttttactcttgtcattctgataatcatttctcatttgctggcaccagatctttgtagatgctctacatttttaagtgtacattttaaacagacagattcaaccttttccctatcctgtaattcacagattaatgattatccccacactagccaaaaaaaccccaactcttttcaaaccctatattcactctctttttcttctatcactctttattcaaagaacatagtaaagtaaattcaggggtgttggcctcaacagagagtccagcatggatgtgtaagtgaaaaagcctgccttcctgctggaaaccgcacttcatgtgagggcaaagagccctgcctgcctccccgactagctcagcatctgacactttttctcacagctttgcaaaagagggtcagttttgcccagcagggagggacaggctgatcctccacacccctctgcccctgcaggaaggagtggcctctggcttgggttcatctaggtgttaacccctctggtggcgcattctgatcgcctgggtcccccaaccgcgcattcaggaaaagccaatgtccggcttactgaactggatcccaagaaaacgctaagggagcggagggcgcttaccaagcctccacagaggctgaagacggctgtgtgatcctcgcgagcattgacctggccgcggtagaagcagtggcgcaggtctgcgagcgccgcgctgcgctcctccgcccggtgcgcagaggtgcctaagtgcacctcggtgtatcccgcagccaggaaggccgcgtcggcgcttaggttcagctggaagagctgcccgtaggcgcggattcggtagtgggttctgaacggtgtgggctccagagtctccgagctgcgcttcctccggctgaagtggtggctctgcgggaatacttcgccgaactcattgacccgcgcgggggtcaccacttcgtaggaggccagtgtcctcactaaggcttctgcaatcacagggattcggccactgagccccacccgtttccaacttcccagcctcgaacttcatcaaccagacttcctttccaaagggccgaggccccaggtccccatatccccggccgggcgcgacaaatggacacacgctggccagcgcgcgcgcacacacacacgtgcgctctgcgagtgtgcctgcctgctttcccacacccccattctctccaccctccccaagcaggggctctgacattcagggtcctcagcagccacctccttcccgcgtccctcttctcctccctgtggccgccaactcgtgcccgctggcgccctcgccatcctgcccctcgcgcccccgccgcgtggtccccgaagggagacgtggtccctgcgcgcgcgattcctagaaaccccgcatagccgcagcctccggggatgcttcgggctgacggatcccggagttccgagagccccggcagggctacggtcccccaaaggacagagtcgctcccccccgcctccgtcctcccgccccctctggcccgcgccccacctcgctcctgaagtcgccccgcggtgaccttaccctgcctggggtggaagtgaacttcccaagacctggtgatgaagagcgagagctggtagagcagccccgtcagccacttgaccacccgcatggttccacccgggggatcccgaccggggaggccaactcgagccgcccgccgccccgccggcttcccagcgctccgctgcctctcctccctctcgcctgtcgctctccgcgccggccgctgcggcgtctcagcagcctccggagcagcagcctcggccccgggccggcccgtcgcgccacactgccagtcttcgctccctgagccgctgcttcatctcactgcagccccgcagcccccggctcgctctcagcagcctcgcttcgcttcttgcacccgcaccgccctcagaagccctctacaccagtccatcccagcgcgaggaagcaagccgacctagcaggaacggtgccaagatagccaccccgggccgggctagcgcgggggagagcccgcccccaggggccgcgccgggccaatcagagggagacgcggccccactccagcgagctgcccgcccccagctcccagccgcacgcggagtgccgtccctgagggctccc

SEQ ID NO: 206 - DNA, 7635 bp, Hippotragus leucophaeus
  source 1..7635: mol_type = genomic DNA
gttaacattaaacagaagtggagaacaattcaccctggcgattcccatcctccaccatcattctacttcctgcctcccaacttaaccacgcccaggtaccaccctccgactcctgctgtaccccaaccccagcttaacagaaaaaaatctcctccaaaagagacagagtataagagtataggaaaagagaaagaattgaagataaaaagaacttagtttacctttaaaataatgactcattttattttttcttttaatatgtagttataaatatattttgtcaaaatatatgatcaatatggtcaaaacatttgcacgtaaagtcataaataaggtcaaggtgaatgtttagattttttttcctttttttttttttttaagataaaagtccagctataaggaagcagtctgtgtagtgtgtgggtgagtagtggatgggatgtgtgtgtgtgtgtgtgtgtgtgtgtttgtgtgtgtgtctccccaaggaaggcctgatctcagcggcacccacatccctccactaccatctcctgataattttttagaaccaccttgtcatactcatccaggtacagcatggagatggcgctgagttcggtgggaacacaacaggctttggggatactggaattgacagagttgaccagggtctgcacaatggcgtggttggttgagttgaggtggtcggccagtggaaaggggcagtccccgtggcagtagaacgcctggtagcctggtggggccacaatccagtcattccagcccacatcactgaagtccacgtagagcgagtggcgccggcagttcttattcttcttccgggccctctgtgggtgatgcttggggctacgcttggccctccggcgtcgggtcaaggcatgtccccggccatcatggccaaaggtgaccaggaggggccggagctgggcccaatccccactcccttgaggtaacgatcggctaatcctgacatgctggccctggtgggtccgtgtctgatggaggtgggtcacctcaatggccagcccataattgggctgcttctcccgggtccagcgaaggactgcagggctcacatcaaaagtttcccaccgtgtcacattgtggtggaccagtcttgtgtccagtagtcgtgtgatgaggtgcccaggcaccacttctgccgggggcttcataacctcataaatgtttatacgatgaaagccctgctcccagtcagggccctggtccacctgctcccggaagagtcgaagctcggcagacgagatcacctcattctctgggatgctgctgaggttaaagaggaaacgaaaagcagagttttcgctggtccctgggatgttctccagatgttctaggcaccattggggaggaaaaaaataggagaacagagaaaaaaagcacatgagctttttcagagactgaaaagtcaagaaatagctaagagctgggtgatgagtagtgaactctgtttatatagtggaagcctatttgggaaaaataagcatacctttaatttgacagagcagataaatgaggcagtgagcagacgagccaagcctagctagcattcagcaagcaccaaagacagaatctcccaacctcctttacatgtctaataatttccatgtgtcaactccttactccaccaccatcagactccccttttaaagccctcttggctttgtgtacacagttttctttacaagtggttgtaaagaagaagaggggccaacacagcagaggcaggagggaacatgcacacagccaccctctccctcttcttccactttcgagtatgttaccaaacatttccccagcgatcttggaaacacagagcatgccttgttgatcatgttacagagaggaaaataaattccaacacagtaatgatgctggtggattaataactcagatttactttggaaaagaaacatccgctaggaaacattcagatcggattacaaggcccctattgaataaacctgacaaacacacagctgtaatattaaattcagtaggtgctttggggaaaaaaaaaggcagaaaacctggcataaaaggctttgatatagcaaaaacacaccgcaggggctaacccacgtctgagtggtgtcattcccttctcaccaacccctcccttcccttctgtctccaaaaaataaattcagccacagctctggagactcttgaaggtaagcagctctcttttcccagtctcctggatttggggttctgatgtaacctgaattcctcgtcctcccacagcttccactgccccaccccagtccagattccaggtagggactgaccttcgtggtggaagctcctcacggtgttggcccgactggcggggcgctcaggatactccagaccgatgccctggatctgctcttcctcttcctcctccccagactgaagtctgtaaagatcccgcatgtaatccgggatgactgcgctcttgctaggctgcgggcggcggcgcagcccgaacatctgcagaagtgtggcctcgaagtcccgaaggagctcatggctctgccctgagcggcgtcctcccgcgtggccctgaatctcggcgacttttttcttccccgtctcaggtatcaaactagcatggctcgcgcctcctagcaggacttggcataataaaacgaccatcagcattcggttaccaggaatcatggtgtctctggggaggggaggaggtggaagggtaaagaataaataaacaccaataactagagagaaatggagatgtctctgcataggcgtggagagctacagctagagggtctagaagtaacacaggtcagaaagatcaagtttgtgtcttcccccgacatacaccgcccccccaccaccaccagctgcagccatgcacggcctgaaagtaggaattgccctgtaattacttggtctaacttgtttacagtcaaataaccccaaatcagatagcctccatcctgttaatctttttttgtcccaactgctatctgagccatgatctcagcctggcttcttcagggataaacagttaacagtgagaaggtaaagaagggtgggggagggagagttcaaatgccagcgctctcctctccacttcagaccttcaggctctctctcccttctcctccaccccccttcttcctccacccttcctagcccgacttccacaacttccagctggttcggaggagggaaagcagagaagcaggagcagggtgaagacacggggcggcaggatctaggagcgtaccgagtggccagagggtttattttactgtggctgaggagtttgaaatgcccagcaaaaagcatctgatcgcgccctctcgctcactcccagggaagggggtgtgggaggggatgattccacaggcgacctctgtgagttttgacaagcagctaggagcgagccacaggggcactaggtgctcccagtcatgtggggaggggagcggtcagctcccccgactgaggactttccatttgttcagccccttctcgctcccctttcttgcaacgcagtgatcagagagccagtgggagcaagcggcactttaaccagaaccggtaggctccgagcgcagtggctgcccggcctagaagaaagcgacagcgctgccagaaagaagagtgtggactctggaaggaaggtccgacgggagggacacaaggcgagcgcgggcggggagggcagagtgaattcccgggaggagggaaggaagaggtgtctactcactgacagaaaacaaggcatataataacagtccatgattcttgacagccaatcttgaacaaacttgctggaaaggctcagaggagctgctgcagtgcgttgctctggatggcactacggaatggctcctaaaatgaatatttgaatataatgagactggcgcagacggactctgtttttcttccagcccctatgagtcacgtgagcgcagaggccccgccccacgcacggaggagcccgccctcccccaggcgggcggtgaaagggcccgggcgcccgcccccgccccccacccctcccgcccgcggccccaccccctcccggagaggccggcctccccgcccgcagccccaaacctccagcggatcgggaggagctcgccgtggcgctctgctgagccctcggcgggtgtccgggtgcggcgcgtggaggacgtggtcctcgcccctacctgtagccttcggggtgtcgggctgggccctcgtgccagcggcctgaagccaagggtctggggagtaccgtaggggttgcgcctttcagcgcgagcccgcctccagtggggccgagataggggaccgcggagtttcagccgccgaaagcctcaccaccgagggtcatttaaaaaggaaagcgctgagggacacacaaacacacacgccgcgcgcaacccacttcctccccagggtctcggagaggccaaatactgctcccagtgacagctagtcaccccctggcgaacgcctgagaatgtcgagaaaaactggacagccgctttagctcccagcccaaagctgcggaccctgtcgcgcgggacgggagggggagatatttaggcggttatcggtgtgggaaggtggtgagaaaaccgccgctaggttccttctccggttcctttacggagaaaaactccgcactacggcgatcccccgccaagcaaagcaaatccccaaagaaagtggtcggcgggccattcaaggcacggcggcggtcgcagggacgcaaggctcgcgacagactcgaaaagaggcgtctcctgagaaaaggcgcatcacacgtttcaggtctcaaggtcgcagaggttttacaactcccgacccgccgcagaaaggaaatcccaccgcattcccaggagtcgtgaaaaccgtgaacagctttcggcctgcgctcgacctctgcgtctgcgtctctctttctcgctctctccccagctcgtcttttttaaaccactactcctcccccgccacttcctcccccacccccttcctcctttgcaccagctgcagagtcgcagcaaatatttcttcaagaattttaccaacccacagctcaaggaattactagggttctgattctaatcaaagatgctgcctgcgtgggtcgctcagcacaggggccttaaaagaagaagaagaaaaaaaaaaacctgacctaccaactgcggcagccccgggccttttcaaaatcctgacccacgcaattctgcggcagccctgcccgccccgggatcccgagtcccacgattcccgctgcaaagcgcagggcaccggctgcccttttctggggctgttcccagatgctgcttcgggtcgcttcagagctcaagggctcaagttgcccacctcactatccctcgcaaacttgggggcacttggaggaagaggaggaaagggtcaagcgcttagccctctctccggccgcggctgcctagcgccgccagacaccgcactggccgagttgcggaggccgcgggcgcccctgcgcgacggtccacacccggtgagagtcgcgctgctttttgaccggctttaggttttcccactcccgagccacggctggggctgactgcgaaagggtttggaagagcaaagagttttgagacgcctagacccctcaaaatgcccgtgggaggagctccagaaatgggaaaagcagacgaagaagggccggtccccgcgagcgaagggacagtggaaagggcggaagccccgcagtccccagaccatcctccgaccctaagaatcttccagggcgccgcgcgagagcgcgctgcgctaaaacccagaaacctggggaagagggagttgtatttcaatttcagattcagaaggattcttctctaagcacatttttctcccccaattttcttaattaagagataaaagccgaaaatcactttcgtctccagaacattttcttgggggtcaggggtggatcttgtggcaattgtcttttgctttcttgctcgagttttctcctaactccaaagtttgttcagagctggcctcagtttaccaactcaatgtctttcggggttttaatgtctcacaaagacttcagctcataaaacgcaatgctaaccatccaccaattggtgcccgggaagcgtctaaggccgctggcccagctcctgcgggcagggggtctgcagggacctgaaaaccccaggaccctctcccgtcggctctgggccgggagggccagtaagagcagtgcgtccgatgtgcatctcgccagcgactctccaaaggacgggacaatccaggaacctgcgtccccagagcggctagcatcccggccatcgtcccgacagaccctacaccacgaatgatggcagagcgactccctggatgctccaagtccccgagaatagctcgtggagtaggcgtgttgggcaactgcggttcgcctgcgctcaggggctttcgccgactgggggctggctgggttgggtgacactcccctagacgcagccctccggcggcgcgcacgctccagaaaccacagaattgcgcttcccaccaccgaaccagcccaggttaggtgttctctctccacctcgacgcccctcaatcccctcactttctccggacttcagagccaccactcccttttctctccgactcttccagccagacagtcgcaaatgctagtccacgagcgtcatgttccgcttaagaccccacagtctttcccaacgacctccaacgaaaggcttctcctccccttttctcctgccctgaacctactaaacgctgaagtcgcccggggctaccaaacggagaaagtggtctgggcagaggcaatagtgtatatggaagtgtctttcagcaccagcatccctacatctagtaacctctagtaccaccgttgcgggggggaggacgtattttgcctcgaccacaaccagaatcccctacttctcccctcaaggatgcgcctcagcacctccctccgcccttcgcccggtttagccttgctcaccataggtccctgcagtagcgggttcgccagcagcagctcctggggacctctgaacagctgcagtgaacctgggcgagggccgaggactggggcgcagcaggctcgagacggcgcggacgggaatcccatcagggagagaggcgagatactcagcactgatcagcagcgaagtcgcaggctcgggtccctcggctcagatgccaaactcacctaacttccgggccgagctccgctcccgttctctccctccttcctcctctgccttcttgtatctccttcctcctctttccctctctctttctttctttccttcctcctcctcttccccggcagcccctcccttcttccctcctccctcactcgcctccctttctgggatgggagccccgcccacatcctcccatccagccgccgggcctcgcctcgcaggccctggtcccggaaacccaggcagcgcccaagtccgccgctgccgccgcccgagctgggacgccgctgtgtccagctctgggaagcgatcggggcttacctggggaccacgtgcagaggtactagaaagcatgcaccgactagtcgcagtaccttccaaaaatacccatgggagtctgggcttccttgactttaggagt

SEQ ID NO: 207 - DNA, 25698 bp, Hippotragus leucophaeus
  source 1..25698: mol_type = genomic DNA
gtgcccgtgagtcacgagtgtaaagtacgcccagggccttggcaggcaggtctgtgcaagggtaaggtgtcattaggtgaacgctgacaaatgctgccttctcgaactctggagataaaagatagccttcccgtgcagtcttttttatctctcccactgtgctggggtgggagctgcaggtccccgggcagcggggcagcgaggcagcgaggcagcgaggcagcgaggtgggggtgcgagcaggagtgcacgcgtgtgcgtgtgtgcatgtgcgtgtgtgcgcgcgcgtggccttccggcagctgtcccggcccccaccccaccccacccatcgcacccggccctgcgcgcagcccccacccctcgccgtgctgggtgcgccgcgggctgctgcgcgactagccggttccccagcgcctgggaggcgacccccgtgagccccgggttcaaaggcccccgcgctgcaactccagcccctccggggggcggggaggcgaaaggggtggtgcgggagccagaaaagccctaacccacagccggcagccctgagccgggatgggcagcgcgctctgaagtttgtgacggtcgcagccgactcctggccgcagcccgggacgcggcgagccagcggccggcctcgaagcatctgcagtttgagggtgaggcccgctgtgcccggcccgagcgccctttggcggccacaggcgcccgtcctccggcgcggtgcgcccgcgcccgatccgggttcatggagctggggctgtgcttccttttcggactcgctgtgacctccgccgcaggtaagcgggccgggcggcgcgcgtctcctggcgcgagcgcacacaaaaggaccccggttcgggggcccggggagggtgcctccccgggggagcgacgtgggggcaggctagagggcagaggctgagggcacggaccaccccgagggcccgggaggttgcagcccacacacaggcagacctggggcccggggccgacttggtcaatttttcatgaagtcgggaacttttccaaaagtttgcaaacgattcagaaactgtgcaaaacgattgcaaagtgttcagaaagcctgcacaatgcttgcacgttttcagtgggtgcagattgcttgcacgctgtggagtaagtgagaagagctcccaagattgtcgcaaagtgtgcacacaacttgcaagcttttcagaaactgctgcacatagctttgcaaaattttccgaacatcaagagtagtttgaagacttaacaaaaagtgccctcagcttgcagacttggcagaaagttttgttgtccctttccccagtttctatgggatggtgggtgtaagggtctgcattcctaggaactcaggagcccctgcatctgcctcctgcaggatgggtgcctcacccccagtctggggatgctggcaggagcagcatgccccgggccccctctgcagccagatcggagggggacaccaaggagactgtggccaccatggcagcccggggtccaagccccagaagcccttggcgggagcagggaccaagtcagtttgggaagcagggggccgagggggtccctgtgcaccaccgagcccggcgctgtacatgttttacctacaaggacaaagagtgcgtctactactgccacctggacatcatctggatcaacactcctgagtgagtcagccctggggtgggggagttgtcccggggggaggggaggggggctcctggctaggcccctctcttcacactgaaggaggacctagttccttctgagcccagtcagcccagagcccacttggcacagccttcagtcctcctgccaacccaggtcggctctgcaggtcaagggtgtgactctcatctcctctgagggcctggtctgggagaaacccaagcccagagtgtctgatctggtggaggggcaaatgaaacgaaccagccagagggattagatacctgagaagtccctctggggggaggaagccccgaaagttactcctgcccctgggccatgtgggtcctgcccctctgctgaccctgccaggctccaaggagtttcacattccttgaaagcagcctgttctctggggagtgcaggggtgggctaggcagggcctagtgaaccctcccccacggggtgacattccgtggaattcaggctccttacctcttgggtggtgagcccacagttcctcctctcccatatcacccctgcacccaacagctccccttctctcctccagtccgtaagaactctcttactgcaaaactgagacagtgccacctgagtccctcctggagtctccttaatataaagtacctcctgtcccgaggccgtgggtaatgactcagcttaggaaccccttctaaagaaacatcctcctgcaaactgtgaagagtgcttgacctcaatctgatcaccagcctttggaatttgctttcctggtctctaaattccaggacttggaccagacgtctctaggtgtctctgggtattcttgggataccttgggcatcctgcttagcctttccagagccctggacctggacaggcaactttgcttcagtgtttgggtccccttgatccaggggttcctttgtccctgagccatgtgacctctgagcaccctgggtgacagcctgctgggctgcacatagccaccttgttttaccgataccccgaggatgaagtgcaaaggagactgaacgtagcgggtgggatatctttcaaaaccaggtcatgagtcctctgagtacatctggtctggaaagtcaccctgctgtcctgcatggcaggcaggactggctccacccaggagcctggacacgtgtacaaggtcccggctcagaaggaccctcacagtttaaagtgtattcttgttgtcttgaaatgcttaatactttttaaattcaagtatagttgatgtacagtattgtgttagtttcaggtgtccaacacaatgaaatgcttaatattctttgaagcaagggctctacatttgcattttatcccaggccacccaatagagagctgaccctgatgccagaacttgcttgctgggttatgtctggtcagcacacagagggatgaccagaccagatcttaaaaagagaggtgtgctggggagggattcctggacaggctgccactgacagccttctattcccagacagcggtcagggccaacttctcctgcaatctccatcaccctgacactgtcctctctgattcttatcctcctggcatcgtcctctgactcaattagcgtcacagaaccctgggcaaccttggcaggaatcccaggctgtggttctagaaggagaaagaaggaagcaaagccagttaggggaaggggactttgcagaggataggaggggagaaaggagaggatattgggagaccacattagttctctgcctgttgccaagctctgagcactcgctgcatggaagcatttgctccgtccacatgacctggtgggaatcctgtctccccattctgagctatcatgtatgacctgagatgaagccatgggtctttggcttttcccaggatatccaacttgctaatgttcccctcacaacttgatttacctcttcccttcttcccagaccctgattcattttaaacacgagagggaaggattaaatatggtgtttgggagtttcataagctaccctgggaaacagaaaatgacaatagccagacttgagcattttaaagtcagacaagcaatgtaacctttatacggaagatgttcccagatggtctttctctgccttcctttctttcccttcctccctccttcactctttccttccttctgagaattgtctcttgctgtatgggcaacttcactggcaaactttaaaacattttggacaagattgtaaagtgaggggtgggctttagggaacttgggcttttggagaaatggaagcatctgaaaatgactggattgaactaaagggcagggtgacccacacaaggacgtttccaggttctgtttcccattccctccccaacctaccatcagagccctatgtcaagggctcctctctcttagctgtcacccctcttcttcagtagaccttcctcatctcctgagacttctccaggtgtgatttgcatcctgtccccaccattggctgagctgggagacaacaggagtctgggtcttcatgcctaaattgagagtctggaactttgggtgatttttagcttccggtgtctttccttctactgccttccagttgcacggaagtagaggcaacaatcctgcttatctcaaaatgatgcttgggaagttgcaaggccttcttggagaaggtcgtttcagctgcgtttaagcacctgcaagctgcttaaggggggatgttgttcttgcatctcatgtggaaagttaaggctctagagagtagctgctcccagaggtgttttccaggcatgagatccaagttctctggtttcctcacatccttctaagcacttagctcttccagatctgagcttgatctgcacccagcacatagtagatgctcagtaatgctggtctttgctgtcactgaggttctatctgcaggactttctcccacgaatgaggtgtcccgtcccagaggtctcacatccctagagacatgtgcaggaatgtggatttttccggggctgttgctcataacttccattgtttcctccagaagatctcaggccccaaagagatatgagccaactgcatcccaggcagctgccttcttagacctggggaggcggcggagacggctgcccgcccacgaggcgagggatgttcatggctctccttggccctgttaggaagccactgtgccttcccccacccccagcaaccccaccattgccaatgaaaacaaagccccacctcagaggaaatactcatctcatctcatggtcatggaaaatatgccaagaataagatcataaggaaagaaatagggacaagtaggacaagactgaagcaacttagcagcagcagcagcagcaggccacatacttaaatccctatgcgctcggggctgttccacaagaatacttcaaaaacaggagtgtcttgtgacatggtgaaggattgtctctgttggtgtttccagaaagacggaactaataggatatgtatatacagatctctatgtgtatataaacacactacacacacacacagaggaactgatgttacagtctgcaatctgaggcatcctgaaggctgaattcccttcctactcagggcatctcacttctctctgtcagagccttcacctgattagatgaggcccacccacattataaagggtaatctgctttactcaacatctactgatttaagtgttaattgcatctaaaatataccttcctggcaacatctagactggtttttggtcacagatctgggtactgtggcccagtcaagttgacacacacaattaaccatcacagagttctcagtgctaaccataccctcagcagggcagcccctctgcacctgctaccgtccatccacctggccgcagaatgaaaccactagctctgacagccgatgaagctgcagggcccccagcaaggagccccgctcagtctttcccacttcgttcctgagaactgagtggacctgccatctgttaatccctccaaggatgtaatgacagaggcactgtgatgcggtgacagtgacagtgtttccaaacaaaaatctgagccacatggtctgacaagcaggaatgtatttttggaaagagcagtgcaggatgtttggaatcacggctgtggtggaaaatctgggctctgtagactcgtgagaagactgcagccccaggagctctgcccggtgtcctgttttgtgattcgctgcatggcctggggatggtaccaccctctccccgtgcccccaggtaaggtgcaggcatcagtatgactctaggatggtgacctaacaaggtgaccagactggccacactgactcagccagcaggaatgatatttttccccaaagaagaggtgtaaaaataataataattattcaatatattctgccacaaaaaggcaacaattcaacagagtcagctttgcccctcctgttgttcaagagaggtatgccacatgtttctagggaggggacattttaagtttgagaacgtcccagtggaatggatggatctggttctccagcttcccgctgatgtgggactggctgtccacccactgtgtgatcacagggatcccaataacaaccatgtgacccacaagtcaggactgggagtactgttgctggagatacagcttttgaggcagagggatagtcttttgagcatgatcatgatcttgcaggcaacggtccacactgatgttgaccatgactcctgagagtaaagacatgtgaggatgacacgagagagtgtgtggagtgctctcagcacagtatctgagcacagcccactctagtgggctccgtacctcaggaccacaggaccatgtggataagtgtacaaccctgggggctgtataaccttccctgtcgctccacacagtctgtgattggaggagcctgggactaagaagctcaagtcctgctgaagtcggcttccttggacccttaaaccatggtcttacctagcttcctgcagtaacactgaggagcttgcacctgggtaccccagtttttccctacgccatgcctcttggtgggcaatctcttagcatttgttctgcatcgggtttacagaccctgggaaaaggtgtgtctggctgataagcagcttgataagcaacctggtggccaaaggttgttgaggcttgatgaggtttggtcctgcccttttctgcccctcctttgttgtttgcttccctggtgaataattggaatgtttggggaaaggggcatgaaggcattgctctggggctccctgtgctaaataagcaggtgggtacagtgacaatgggggtggggggagggctagggtgatgtggcagcatggtagtgggtctggctgtgctctgcttagttgctcagtcgtgtctgaggttgtagcctttcaggctcctctgccatggggattctacagttcagttcagttcagttcagtcgctcagtcttgagcaactctttgcgaccccatgaactgcagcacgccaggcctctctgtccatcaccaactcccggagtttacccaaactcatgtccattgagtcggtgatgccatccaccatctcatcctctgtcgtccccttctcctcctgcctgcaatctttcccagcatcagggtcttttcaaatgagtcagctctctgcatcagatgaccaaagtattggagtttcagcttcaatatcagaccttccaatgaacacccaggactgatctcctttaagatggactggttggatctctttgcagtctaagggactctcaagagtcttctgcaacaccacagttcaaaagcatcaattcttcggcgctcacctttctttatagtccaactctcacatccatacatgactactggaaaaaccatagccttgactagatggaactttgttgacaaagtaatgtctctgctttttaatatgctgcctaggttggtcataacttttcttccaaggagtaagtgtcttttaatttcatggctgcaatcaccatctgcagtgattttggagccccccaaaataaagtcagccactgtttccactgtttccccatctatttgccatgaagtgatgggactggtccattctgaaggagatcagccctgggatttctttggaaggaatgatgctaaagctgaaactccagtactttggccacctcatgcgaagagttgactcattggaaaagactttgatgctgggagggattgagggcagaaggagaaggggacgacagaggatgagatggctggatggcatcactgactcaatggacgtgaatctgagtgaactctgggagttggtgatggacagggaggcctggcatgctgcgattcatggggtcgcaaagagttgaacatgactgagcgactgaactgaactgaactgatgggaccggatgccatgatcttagttttctgaacgttgagctttaagccaactttttcactctcctctttcactttcatcaagatgctgtttagttcttcactttctgccataagggtggtgtcatctgcatatctgaagttattgatatttctgccggcaatcttgattccagcttgtgcttcatccagcccagcgtttctcatgatgtactctgcatataagttaaataaacagggtgacaatatacagccttgacgtagtctttttccagtttggaactagtctgttgttccatgtccagttctaactgttgcttcctgacctgcatacaggtttctcaagagacaggttaggtggtctggtattcccatcactttcagaattttccacagtttattgtgatccacatagtcaaaggctttggcatagtcaataaagcagacatagatgtttttctggaatgctcttgcttttttggtgatccagcagatgttggcaatttgatcgctggttcctcttccttttctccaggccagaatatttgaataggttgccatgccctccttcaggggatcttcccatcccagggattgaacccaggtctcctgcactgcaggcggattctttaccatctgagccaccgggcaatctgtttggaacccctttgttaaatgatgaaatcttagtaaggctgagtcccaacagagtaaacacaatgccttgcagtcatttctcactgtacacagcacctgggtctcagtacccaagacctgagtgtgggccaccaggaagggatcccaggaaataactacagaatttgtttaccaaaaatggtaaaaaataagaacacataaaaaaagatggttattgggacttccctggtggtccagtggttaagactcccgctttcaattcaggagttgcaggtttgatccctggtcagggaactaagatcctacacatataataaaaataaaaagagaagacagtatcagccagactaaaagtgatcttgaactcaggtttctgactgatcatgtttttactgagtcatttccctcccatgtaaccctctcccgcttagaaatctgtacatgtttacattccagttttgagtttgggtagcagtagctcagaacatttcacggcaagatgcattttttaaagtttgatagccctggggctaaatttcagagtacattggcaaggtcagctcatgcaaggtgacctcctggttgggttcagctggacctgaaatctccttttctaccccagaatgaatgtgaggaggtgagatgtctgggggcaaagatgggtttgttgaaatgcagctgatcccgactggataagaaaaagacttggggctggaaagcaggttgatttgcatcgagaaggtcatgaccctgtgtgccccagaagggagaacttggattttcgctagatgaagaggacgttgcaactaggaaattggccttaaatctgaaggcagatgaaaggctgtgacatctctggtgtggtttgttcctgcaagaatttaaaacaaaggaagctgggaagcaaacagtgctttccttaggggggccccacagccagttggaactcacaggctttgtaacgccagatcataatcctgtcccagatccacagcatctcagcaagtttgatgggggctgcctgtgctccacttcctccctccaggtagtcccctgtaaccattgctcagctttggagtacattagaagtagatttactgtttaacagaaggaaaccctctcagtctaagccgtgtttcggtgaaaacagaattccttaaaatgggacacatgtgcgcgcacaccatttccttctatttgggacaggaaccaattttatttagaaggagaagaaatccaggcaacggccacaatgtagatgagctgctggtctagacaaggttccaggggcttctatagtcctgctggccaagccctcaggaacggagagcagaacagggcatccccaccctttctcatctgccccagtttggagtctcgggagagccaagagcatttggagaacctagcgatgttcagagccctggaggcacaggtcttcccttattttatgacctctcagggccaacttagcaggaggccttaataaacagtaactctagaatgcggcagccagcgagccctgtgcctggcccagtaatttaaaaaacagaaacggattcatgcacctatgagaaaggctcagaggctctcagatgtggccaaggtgtagcggtcctgtgttgcttggtgatgacatgaatggcccacaacttagggagcagtgaacagctttgccaaaagccagaagcaagtccgtgagagagcagaggtgtctgtagcttttccaggtttttctacatctgatttccacagatttcttgtagggtggcaagatagggtgaggctcatgacatattctttcgggtgcaaacttgaaggggatgccataaagttaaataaaagggaatgcgatgttttttaaaaatgaaaatcagtgcagaagtatcataatcaactaaataccaacatttctaataaagacaggatctgactctgcttggttttttggaggggatagagcctgtgtctctagagggacttgagttttcttagttcgaggtaagcaatcaagtgatcagagtgaccacaacaatgcaaaaaattagattaggaaggaaatgggtgtctttatttttgttgccatggcaagtatgtcttcattcagtaaggtttttccatcctaaagatgaaatctgaaagttagcgaggatgtcttctcttctttctgagggttgtttaaagggttgtgtgatggcgtctggacttttttttttaatccccctacacatacccccatccttaaaaaaatacctggtccttattttactccttctgtttccactgctggtaactattttgagccacatctgtctgcagctttgcataaagttataatgagcctgtgccagacagacgtggattgctcatgcctacatttgacctggaatgtgttagggttactgggggttggggagggaaactgtaacctaactcacatggacgcatttgggttgtagcagacagggcggaaaccagctaacctgtcagattccctaaatggcttcagttgcaaatattgcaggcatttgttgccctaacttcttggttattttttgagctgtcactcttggaaattccaccccacacacaacacacgcagaaggatgtttctgttactctgttgctttgaccacttgtgcttcctctaaatagacttcattcagagcccatgcgcctatgaggggaggaggctactgtgttcagggacctgatggcacgattcaatctttggctttggggttatttctaagctcagttatatggtggtaggatgtggaagagtcctactctttggatgaagctttctgaaaataattggtaagatcctgggactctctccacttaggggtaggtagagaccccacatttcattgtggtttcattgctggagagaagccctactctagcatatgtgctattcggagatgctcaggtgtaacagagagggcatttgggaatctctccatggaatttggagttggacggagtctccagagatccagccctttcatctctcagccctggaaagaaaccactcagccagggcctctctgggagctagtcttcagtttggaccaatatcctaggtctgtcagcctagagaggcccctggttttgtctttgagattcatccttccaggcagcctggttttttcctcatgtgtctgcagaagttactgtcaagatgtggtttttccgttttaaatgatctagagaccatattccctctaggacaatgatagtagacatccaatacatcagctaagaattctaaacatttgggagattgggtttggatgagaagtaatggccaattaagacctcctaccttagttggtaaagaatccaccagcaatgtaggagaaagtgaaagtgaagtcgctcaatcatgtctgactctgtgaccccatggactgtagcctaccagattcctccatccatgggattttccaggcaagagttttggagtgggttgccgtttccttctccaggggatcttcccaacccagggatcgaacccgggtctcccgcattgcaggcagatgctttaccctctgagctaccagggaagtcctgttcaattcctgggtcaggaagacaccctggagaagggataggctatccactccagtaatcttgggcttcccttgtggctcagctggtaaaaaatctgcctgcaatgtgggagacctgggtccagtccctggtttgggaagatcccttagagaagagaaagtctacccactccagtattctggcctggagaattccatggactgtttagtccgtggagtcgcaaagagtcggacacaactgagcaattttcacttcactttccctccctcctttcttcacatagcagacccttgtttttgagatgctgtagtattattatcggagaaggcaatggcaccccactccagtactcttgcctagaaaatcccatggatggaggagcctggtgcgctgcagtccatggggtcgctaagagttggacacaactgagcgactccactttcactttttactttcatgcattggagaaggaaatggcaacccactccagtgttcttgcctggagaatcccagggatgggggagcctggtgggctgccgtctatggggttgcacagattcggacacgactgaagcgacttagcagcagcagcagcagtattattatgcacctgctctgagccaggcactgcctgggcttccctggatgctgaggtggacaggcagaggtcagctgttacctaccccaggagacaggaaggaagccacacctgcagcccaggtgaggaaacaccccttcttcttgggtccaactgatgggggtcaatgttttctttgaaaatacatgtaattctggtaaaattccccaacaaccaagtcctgggtaaactcataagttgtggtttgctttctttgagcgggagatgggggggatatctttttttaaaaagttaactaccaactccagcacattgctctctcttttgatattctaaatattctggtcattggctatttctgaggctgcaggaggacttcctcctttggtggttggtggaggaacagtctgccttgggggcctcccacttagagatgcggcaattttctgcagaagcaaagctgcagattgccagttccctttaatgttgtttgtttggggaagttcatggaagttcatgtcatgttctttagaaccagaaagcatgtgtttctgcttgtacaatgaggtcactgaggagatgtatttcctggttattttctttcctagaggttggaagggcacccagtggttgtctggcatgaggcctgtcccaagccaactttcacaggcatttgatgagtggacaaggagtaaattcactggaggataagcctcctgaggtggttagccaagtatctctgagcatcatgaggttgtatgcttgctcccacctgcccaaaggacagtgtgatccaaaccaaacatttcacagtgggcacacctgggaagaaagctagctttgtttgtcctgacttggaacacattcttttgtattttgttgcaatgaagaaaatctctacttgtccttggcagctgcagagactcctggtctttctatgaaacccaagagatcatggttgcatccatcttaagtgagttccagggtcagcttgaggttgcaagcaacagaaacaaatgtagctcacacagcataggagtctattggaaggccatggcgtgatccacaaactggaagggagggagaggcaggaccaggcttagaaagagagagaaaccaggataggactgcgggtcccagggcacaaacagacaaggcaggatgattagtagcagctccagactgttttctttttttaaaaaaattttgttgcactatgtggcatgagggatcttagttccccgaccagggatcaaacctgtgtcccctacaggggaagctcagagtcccaactgctggaccatcagggaattcccatccgaactattttctgacctcgaattggttttctcaggtgtcttgggaaggagagggtgccatgagccagcttgggtcacctgatgagtcttgaggtgtgggaaggtgagatacagtgattgacagtctcatcaagacctcacacagggaaaaagggaccattccccaggggaaagacaagagattggattcaaggagatgaaaacagccagcactgaactcaggctctagagaatcctgggcttttaagtttttcaaggcaggtatttctgtgtctgagctattgtttcctccttgtctctatgtctttgtgcaaagtggaagtgggcagggggcagtccactagatgtttcttgaagtgaatggatgcttttacaggcctttgaatattcagtcactttccgtagttacttcattctgtcttattcttctaacagaattcttagttcatacttttctctgattaagttttacaaagacagtcaatgaagttgatccacattttcttccctgcccaagaaggtatttcaaagcttgagagagcaactgagtggtaccttctaaggaagaaatttaataaaatctgcaattgagccttagttacaaagcctgttggagtctagaagttgattctctggggagttgtgaggggcagtatctaatgaccgctggtgcctggcagctgggggggcctctgccgtctgcctgccactggcaaacagttgctcctcttcttttcagctgcaggactggtcagcagcatcgtgcctcctgtatgatagccctgaccttgctcttccatttcagaaggaaaatgtgaagcggaggagacagcatcatcttgacgtctgagtgtgaagtgaaaatgttctgtttgttggggagacattcaccagaacctgggctttttaaaattgaaaatgacaacagtttgtaaaaatagtagctggtgctacttttgtcaccatgtcacatgatctgtctggctttgctttatggaacaagccactagaacagggattgtaccctgagatacccatgaaggccagacaggtaagaaaagcaagcagagaaggacaggagtagggactgaggccaaacaagagtgtttgagccaggctttgatggtaccactcagcttcagacagctgctgctatgttggagtgtgggactggagtgagtataactgagagaagatggaaattgggatatttgcgtgaaattttcaagttaaaaaaaacaaaaacaccaccctcttgtgattggacaaagcctacagaaatgccaattttctaacctctgtactagattaaactgtgtgtgtacagggccatgggcccgtcatgaatcatcagaagtctagtccaggcccgtacattggaaaccactctgcaaatatttgttgagtgctattcagttcggggtgggtaggtggggttatgaaaactgggctttctaggacaattcgatcatcttcgctgagaatttagagtctggctgggtgatgatgcagatggagaatgaatacaggagatttgaaagtttagtatttactaacgtttatatatggcagctgggagaaaatgggaaataaggaacactgtgataagtatgatcttggcatcatcatcactgatcaaataatgaatgttctgagcatatgctgaggacaatttaatatacaaagacacacaacactagacattgccaatgtgattgttttgaggtgttttcttttgtctaagagcatttgtactgatcttacctgcttctcttttgtttggagctctgtgttataactggaacattagcaggttgaaatgctgcctacttttataaagaactttgttctttaagccccactgtagaacaggaggctaaaccacaggtcagacggtgtgctggtcaaagttctcagccaatttaacttcattttcagggttccttcattagttcctcccaattcaccgttcaagagacatttgtttctttatcattcaagaaatgacaaaggtaccaaggcaacaactaaaacatgagtgcttattgggcagacagtgtagggagatggcccagccaaaggaagcctgacaaagaatggcactgctgtgccaggtggcattctggttccttcttacttgtctttcttacttagtcacacatcttaaatgcagggctggtagatagggttttctatgcctggtacaactcacttgaattcccagaccaaaaaagtaacagcagtagccacattcattcactgctaggagctctttgctaagtacttttcatgcagtgcagtgtatccttcagtccagcgacttccgtaaatcaggaaactggaacaggtggtgtgatcatcatgtaagtgctatacagcataataatgggatcaccaggtaacctttctctgtgctctgtgtaccttgtacatacctgtgcatattggcttgtgaggtttctttatcctgtattgttttcacacaccagtagtgtgtgaatgcccgaaggcctttctgcatcctcatcacacttggcataataccagggagatacaggcagaccttggaaatactgcacatgtggttccaggctacctcaacaaagtgaaaaagcaagtcacacgaattttttggtttcttaacacttatgaaacttttgtttatgctatactgccgtctattaggtatgcaatagcatatctaaggagaaggcaatggcaccccactccagtactcttgcctggaaaatctcatggatggaggagcctggtaggctgcagtccatggggtcgctaagagtcaggcacaactgagcgacttcactttcacttttcattttcatgcattggagaaggaaatggcaaccccactccagtattcttgcctggagaatcccacggacagaggagcctagtgggctgctgtctatggggtcgcagagagtcagacacgactgaagcgacttagcagcagcagcagcagcatatctaaaaaatatacatcccttaaaactactttattgctaaaaattccaatcatctaatgtatgtggccacaaaacttcaatttgtaaaattcatattatctgtgaagtgcagtaaaataaggtatttccagatattgtggatgcttggcaaatgttggaattttgtggttgttgaacattgtaggttggagagaatccagtcttactggtctagtttatctcacgctcaacaaccagttacttaattaatagtcttcattttctcagccttgtgctgggtccacagcaggtgcaaaagacggagccctgtcttctactctcttggagctggtgtccactgtaagagctggacaagaaagacccctgccctggttctgtggggtagagggcgtctctgaccctcctctggccctatctcctacccactgcaaggagtctatgggactgaaagccatatgccccttcttctagaccatataccgagtatttatgattctgtaatcccccccttctcaggtgtctccgagcccacttaagggtctgacatccatgaacagaacagggcttagggcacatctcccaaggcctacagggcagccaaggcgcagctgcttgcaggatggggggtggggacgggtggagcttggggtgcacttgggatcaagcaggatgggaagctgaagtgccgagtctcccagtgctgccatgttgcaacacagaactccaaggagcctcagaatcctaaaatcaagttctaatttccaaggtattctgaagccaaactcttatttaagtgcttgaagtgaagtgaagtcgctcagtcgtgtccgactctttgcgaccccatggactgtagcctaccaggctcctccatccatgggattttccaggctataatactggagggggttgccatttccttctccaggggatcttcccgacccagggatcgaacccggatctcccgcattgtagacagacgttttaccgtctgagccactgagcgcttatcagattttaaaaacctttaaattttcaacctattggaagtgggccttcgttggagctggaattgttactgtgggaaggaggggaacagagggtgggccttcggtgggcaggactatctcctaagtcctctggttctcagcttgcatcacctgctactggctcccaggtcagccagcagagtgcacacctagaacacccaggcttggagcagggttttctccctccatgaacattcctggaaagtttcaagggccgtttgcatactagctcctcccactaggctgctaggaaagtgcttagcagttctgttaaagaataccaggtctccctgtttcctcacttaaaacactttttgtgaagttgagtggctctgagcacacaaatgcctaatcagctgacagcaacttcaaaattgcaggtcttgctgttgatggaaaaatgggagccgtggttgttaatccttgtgtgtaattttcaccaagaaatgggggcctgggtttaatgtcaacacctagtgacttaatgtggccctattactggaaatctatacctttagtcaaatcctgcctccccacaatgtcggtattgtcttgctaccccacccccaccatttcccattcctgagaaaagatgaggttttagcaaaggttccactcagaacagggccttcccaggcagctcaggggtaaagaacctgcctgccagcgcaggagacacaggagactagggttcaactcctgggtcgggaagatcctctggagaagggaatggcaacccactccagtactcttgcctagagaatcccatggacagaggagcctggtgggctacagtccatggggtcgcagagagtcagacacaactgagtgattgaaaacacatgcacagctcagaatgggaagggccgctgcttgctttctccatcctgtgagcaaagactgctccgtactggggctgcctggatccaggaaccatttcataactaactcgggtaggaccgagtggggagaggggaagagaaagagggtgggggtggttatgttctcagctccagtctctggtccagcagggagcaggtttctcccaagcttcaggtcaggatgaggcaccccccaactttgtcctcaccacccccaaaagacaccatggcatgtgttttaaattaaaggaaattcaatttgatgttattttgaacgcacacagaggatgtcagaaccccctttgaggtggctgattggtgatacttcatggggctcacagaaaccaaggtggttaatcttggggactggaaggaaagccagaatttattggaaaagtaacttttggccacgtgtatttcctctagctattattaatctgcccccaaatcctattcagtagtgctaatgaattaagcagccacttttaactttttcccactgaattgcttggtagtgtcctcccatccctggagagcactggtttggatggacatgagcataagaaacagattaaacatttattgtttcaagtgacaccaccaccctcatgccagctccaaccataaaatgaaatgggtaaatagtttcaggcatttatttcttcataagaagacttttcccaaggccatttctgtcttcggctatatctctcaaggcacagaggcttctgtgtctgtgtctttaaggaagccttgttccaaggccacaatgtgtttcaatggccataactgaatttgtattccaattagcacagactacaaatttgatgtatgcacagaagaaatttggtggctggcggggcaggaacaaaccaggccaaccaggccttgggctgcggggtaggaaggcatcttattggtatggatgaccaggctcaggtgctgctggctgaaggatgaagactgagatcagcattcgggccagcgggaatgtccatgtcaagggtttggatgcagggaggggaaaccagaactgccctgcaaagatccgggacgggaggtgtgcttgctgaggttaggtcttgaaaagactgaaaatgcacacacgcacacacctggcattgctggctcccgcccagacagggctggctgctgggaggatgcagacaggccatcctccatcctccaccgggacttcccatctttccaaccctgaggctccagcgtactgcctggggcttaggggagagcaggggtcagggagtgggcgtaacagggttgaagggttcactccagaacctttccaaggctcaaagcgtggggaggatgtggacaccaggtcctgggacgtggctgcaccgcctgcctcacccaccctgcgtccaccatcttccacccctttgccaactccacacctgccggcgcccaagagcagggaggcccaggcggctcgcccagaagtggccctgacgttgctctttcctttgcagacggactgtgccctatggactgtccagctacagaggcagcggaagcaggggcaggaggtcggctgggcagttcccacagagcccacagccggtgaaggggacgctgcgctgtgcctgcacggagagcgatgatgatgcctgcttgcagttctgcacctggtccctggctgcccgcgggtatgaccccctccctggctttccgcacttccagagatcctcgccctaggcagtgtgggtacaggagggctcggcttatcctggaggataccatctgatgcgtggtgagggtggggactgcgcagaggggatgtggagccccggctcctggagggccgtgggcatggtatcccatcccctcgctgcctttcagagcagagtccattaaatggccacagccttatctggtctccagaggtatttcttctggattgcatagcaatttgccaaaatctgaataagttgctaacttttaaaaattgaagaataccacccccccccccacaaatgcacatttttagcttcttcaaaagtaacaaatgggagcatctggtctcaccagcccacatgccctcgtggccagaaaggctggtaccgagtgaaggccatgagtgagatgtgcaacgtccattcacctgtgttactcatcgtcttactttgtggctccctccccggtccctgagttggagaccctgtagtctcctacaagcatctggagaagcttgtgagtcagtgtggactcagataaatcagcaggccctaggtctgccttgtggtggccatttaaattgggttttacctaatagccattcctattaatacttctcgctcatgtttttcattaatttggaccaagaccctgccaggcagagctaccctgccgagcctcttctgagagccgtcgctggtgggatggcacctccaggtgcttcctgggcaagtaagcgccagcaagggggctgtctatgcagcaggtgccaccccaaccagggacccagggcctgctgtctggaacccccagcacaaccacagttttcttcttggctccttaatgtccagtggataactgaggagtgtgggtggaggctggattttagtgggactccacccctgtgtgctcagccttcggaaactatacccgagaggcagtcctgggggaccatgcttatactggtggaaagacaagccttactggatgctgaaaaaccagccacatggaaatgtaggttgattcatttgaactggctctctccccacaggaattcaaggtcggcacaaacacctgacaaagaagtggaaaagcacactggtggtgccctggggggcgtgcgtccgaggaggtgaagttgttttctgggttgctgccccttgggcggcatgaaggacatgcggggcgcatttggcctgtgcaggcggctagcaggaaccccactgcatgtggggggttgctttgtcccctggggtcagagcagccaaaattgtggacagcctgccctctgtcttaggagctgacccctgcattccctatagcttttgagcagtgatgtccagccctggatttcaccaggtctggataaagctcaccaaccactgcttcttggaagccctgcaggctcatctgctagggcccacgttgtgcttctactcccatagaaaaatatgatctttagaaaaagaatcatttcttcttttcagcagctgattctgaacagagatgaattacagcagctgggcgccaggttctccaagtcctccagttcattttataagtttttttttttaaacccgtttgtggtttttgtatgatcccgagggcttccagcagcctaactgggtttatttgtcattctatcaatcagaaattgttattaatgagttgtctaccatctgcaatgggatggtaatttatgttcgtagcagtggcctggagggggtttgggttcctacctggtctgatcaagggagggttaaacccgtctggatatatacaaggcattccaaattggtggcagatcgcttctagtcatctggagaggactctgtcagcatccacaataatgacgcagaggagcggcagaggcagaccctggagaggatgagttaggcccccaccagtctccactttgcctcttcttccttaccccaaacccaaaccactctcagtgagggagtagtgtgattaaaccatccaccttttatgtcgtttactcaattcagcaaggattcattgagcacctgtgatgtacagggcaccattctaaatgctggggacactaccgagaattcggcaaaagttcagccttcctggcacttaagtagtgggagaagcagatcgcaaaccagtacataaaacaaagagcagggcatgtgaaggagagcaggaagcaggctgggggtagggagttttgggggaggttgcaggttgggtggtctcactggccacgtgacagtggcataaagacctagagaagtggggcagggtgagccagagtgatgaggaagggaagagggtgtcagacaaggcaaggtaagtgcataggccctgcagtaggaacatgctgtgccaggcgcgttctgggaagccaggggaggccagtgctgttgtcattatcctgtgttgatgttcaggaggtgaggacattggcacagatgttccacctgggcctggaaaggatctacttctaggctttacaatgttgcatgtcaagctcctgtaagaagctttacttggaaagaaaaagtctttccttataagcatggtcccgactttcttgcaagactggagttagccatccctagattgacattttcagagtggaacttgctcctgtcctgagcttgtgatcctcaaaggtgggaccaggctgcaagagaagagctcccaaggctctgttgacagcgatgactgtgtgtacacattcaggcaaatgggaggctctgaaattgccaagaagctctgccaaggaggctctgttcaaaacaaggaataggctgaagagggatggggtggctccctttcaggtagtggagagcttggcttttgttataggcttctttcttctcttttgcatatccctcccaccttttctgaggtaggctgaagtcaaggccagacaaagaaagtaggctttagacctccatcagagtggacgtcccctccccgcagtctgcttgcccctccactggccctttggggagctccctggggagaagggcctgcagcaggaaggcctcagttatgcctcctccttggttcacatttccacctctttgaggacgagaaacgagttttgcctgggggagaaaacccactcaaagggtcctcacttaacaatacagccctttcccaagaatgccccatccaaagaccccagcttccctaatgggtaaaacgatcccagctgtgcctcagggcccgcagcccaaggctccggtttcactcaggaaattgtttttggagaggtatggcacttcgcaaagccacttctctctgggagtgagtggaccccaagctaactctttgcaaatgtaaacccatgtccatctggtaacagacgcaggctccgccggagcatgtcgtcgttcgacccatcacagggggcaggcaccaggggtgggccagcagatcacagctctacaggagttgatgagtttgaagcttatgggatttagacagacattttcagctgtgcttggtacccactaaaagaatacatctaaaaaagaaaaggaaaggaagaaagaaaggattcttgatgtttgtgataaggaaatgaacaccctcaggtgttgaaccccaggccctgcggcagagggacttccgtgccctttgccaacaggcacacagatgaaccatagacctggttccctgggagcctctgtgaaggcagccccagcgcaaggctattagggtgatatttgttttcaggaagaaatgtggatctttggggaatggcttcaaaataagccgcagacacaagcgctttgtaaattatgtaaatttctatttatctatataattggcaacaactgggaattgtaacgcctgacagttcgcaatctctttcagctgcgctctagtggctacgctgagattattgagcagctgaagaagacggtgtttttcaacagcagggatggggaggggccgcccatcccttcctccttcccctgccaaggtgctcatgcaataatggtggatgctgaggtgttagccttgaccaaatgctaaattctcaatgagtatgataaggtacgaatgtgaatatccatcataaggaaatggaaaggactgatgtgccagcgagatggtatacagtttagagaagcaattatttattgtgaaactggtctctacatcaactcctttcagtggatgtgttcgcagcagaatctctgtacatagagatgttaaattctgttctgaatcccagctcatgttccttagggcttgaactacattttttaaaacgcctaagcactgtttggctctgtggcaggatggtatctcggaaacgcattcattgtgctaacactcagaaaatactgtcaaatgcaaaataaaaaaatctgaaagtctgctctgatttgtgggtttttctggctggtgtgatatatgttgttacacatctgctttctgtgggccctgggagaggacagaaaacagttccagttccaaaagtaggttcatctaaagtcaattatggagcaagatgagcaagggggctgctggaattgtaaggaaggagcggatctgggggactgtctgaggaaggtaaaacattcaaggtggttgggaagagatatatttgggggagcaatggctccttcccctgggccacccttgtccgcttcgtagcgatgcacacctttgtcttctggccccacaggcacagaggtattgagcaggatcccagggagaggacagtcgtagccaacagccaacagtggaccttcacattttattttgccttgctactcatgattcttgagaattaaaagccagaagtgaccatgtttggttgatcttctctatcaattacaatgttttcaagcctctaagacttacaagacatctg
